United States Patent Application Publication US 2008/0114160 A1 - sequence listing, part 16

SEQ ID NO: 5911 - DNA, 62440 bp, Oryza sativa
  unsure (1)..(62440): unsure at all n locations
aacccccccccccccccccgggttcaaaactcctgggtaaactgtcaggctgcttttgtgctagctacgtggtaattatacaaggcgccccgagagagctgatcattgacacgcaatgcacagtcgctgcgaattcgtgatgggcacatatatacgtaccactgcccctaggtccccctgccggcacatgccccgtgcaggccgggacgaggcgccgtacgcgccaacaataatgcttgctcgatcgccaatcgatcgcaaacggcaaaccgtccgggcgattctaccgtggcgcacggcgccggccggcaacgaaccgagcaacgacacccccccccccccctcccctgctcccccggcgctggtcgatcggacgagaattcggccgtggcgctgtgcgctgtgcgcgcgcgacaactgggaggtacgcgtgcgtcgcagcgtgggatcgaaagtgcgtaatgtcgcttgattaatattgtgggctgtcctaccaagtcctgatttgatttgacggggattagctagctcagctgctgcgttagttgctggtgagaaagatagaggattgctgtggtgtgtaacccggatttcctgcgagaatacggtggaacgacagggattgttcgtgcacagcacagggtgcagttgtgtcgggacgatgcaccaacgccacggattggtgcttttccgtggtgttttctcgcgtgatctgcacgcgggtttcggcgcaaactcgcaaggccggcgcgcgcggcccacgaacgcgatttcaactgtggacgctgcttcgactgagcgagcccactatccttcacggggttcggcccaaaaagaccagcagcgctccctttccgacaccgagtccgtttcggtttcaggctttcagcacgcacggtcagtatgtatataaaactacaggtgcaccatgcacgcagctgcggtagtctgcaggtttacttgagagttttgtcgatggagtgttgtgggggaaactgttttaaatactcgggtggacgtccacccgtttcttgcatgtcatctaaatgattatgaaaaaatttcaaaaaaattgacatgataggttaatatgtaatatatcacttcacaaacatgcaaatccaaattcaacttctataagtcgtaacaaaaaaaataataaatttaactgtgaatatacgtatactagttaaagtttgatttgttattttcgttacaacttgtagaagtcgaatttgaacttacatgttcgtgaagtgatatattacatattaacctatcttgtgaatttttttgaaatttttttataattatttaggtggcatgcaagaaacgggtggacgtccacccgagagagattagaatccatcctcagtgttgtggccaacgatccatcgctggcggcggcggcggtggcgaagaccgtctgagcgcgttgccggacgacatcctgctggaaatcatgggcaacctcggcgtccgcgaggctgggaggatggccgtgctgtcgaggcggtggcggcggctgcccggccttctcccgcggctggtcatcgacgcccgggagttcgagcccgccgctctccgcgccggctggcacgcgaggacgaagcgggccatggagcgcgtcgccggcgcggtggagagccttcttcccggagaccgnnnnnnnnnnnnnnnnnnnnnnnnngcgtacctgctcagggacgagtcctacaccgtccgccgcgtcgtcgagcgcctcaacgacgccgtcgacagcggcaaggtcgcggccggcgggctggagctcgtgttcagggccaccggcggaggcggcgcgcccgatcaggatcagccgagcaagcggcaggcgcggcggctggcgcgcctcctggccgcggccgcgtcgccgagcctgctgccctccgtcgccgagctttccctcgtcaacctgcggttcacgtcgccggcgctcgcgtccctcctcggccgctgcaccggcctggaggagctcggaatgtaccagtccgacgcggggttcggcgcggtgttggacgtggggcacgcgcggctgaggcgcctcgccgtgcacgccgtggacgaggccatgtacaagaaactgcgggtgtcgtcggcgccgaggctggagcgcgtcgtcgtcgccaactggttctgccgctacgcccccgtctcgttcggccacgtcccgtgcctcagggagctgcacttgaagaacaaagccgtttactaccaggaaccagtaagactaagcaaaatgttggccagcacaccgcacctcgagtctctgacattggggttctcatcttggagggtaagtatctaatgcaacatcagtcaccctactccttcattaaaagaaggcaatcaactttttttatagtgtaagtttcgtaaaactgcagatactttgcaactacagatttaaaaacttgtttcacaaaactacagatttagtggcttcgtttgtcataaaactatagatactttgtataatatatcacaaaaatacagatttaagaacttgttttataaaactacagattcagtggcttcgtttatcacaaaactacaaatgctttgcacaatatatcacaaaactacagatttaagaatttgtttcataaaactacagatttaatatattcatttattacaaaactataagtttagtgtcttcattatcacaaaactacatattttagtattcttaaaacttgtagttttgggataatggagacactgaatctgtagttttgtgataaatgaagacacaaaatgtgtagttttgtaataaacgaatacactaaatctataattttgtaaaacaagttcttaaatctatagttttgtcatagattgtacaaactacctgtagttttgtgataaacggagacactgaatatgtagttttgtgaaacaaccttttaaatctgtagttttgtgataaattgtgcaaaatacttgtagttttgtgaaatttactcatttttattttttttaccaactgcctctttactctttatgtactttaattttataaaacatcccttctacatattgttaatatcttattttatctctagaatttaagtttatcatgcaaagatatctacaggattaaattgttccaaaagccttacaattattcaattagcttgttccaaacaatatatttttctcattgcccatgcccacgacgagttgtatgcagatttggatcgaaccagaggctcccaaacaacttgaaccgatgttcagcaagctgaagtccctcgttctgacaggaattttccgtgggtgcgacctctcgtggacattgttcttcctccaagcagcgccggttttggaggaatttatactcgaggtaactaaacatatgcatgctttgtcaaatctcatctaacggcacagttttttttcgtctgaaaatcactctaatatgcatatatatatatatatatatatatatatatatatgaacttctgcaggtggacaaacctttagatgccaaggcaccgagtgatatttatggcgaaatgccgaagaccgacgatgtgacatggcaggtgcctgagttccagcatcaccatctcaagcatctgtagttcagtggcttcaatgaagaagaaatgcactggaggatagtggagcttgtcaaggagagagctgtgaacctgcagagcattgctctggatgacggatgccaagcctgcgatgttgtggcgaatgaatatgttctctccggtgggatcaaaaacaagaaaccggtgttgttatcagtgtcccagatcacaggatctcctcctattctcacccttgtatagagggtgtatccggtgccttgtgctcgcaggcgagtatagggttgacgccgactcttttaaatatgttcctaaatatttgacatcgttgactttttaaagcatgtttgatcgttcgtcttattaaaaaaattaagtaataattaattcttttcctattatttgattcattgtcaaatatacttttatgtatatatatatatatatatatagttttacatatttcacaaaagtttttaaataaaatgaacggtcaaacatgtttaaaaaaaatcaacagtgtcaaatatttagggacggatggagtaatatagagttactaactgcaaatacaaatcaatgggaggatggactcagcggccgtaaagctaatatgcaaggcatgggcaccttcagaatacaaaaaaattatatggctcctactacaaaataagatttggacggtagacgctgcaaatccgacagtggccaaacaattatttttaccagctctactaaaaaaaccttgaaacagctcagcatcaaatcaaggactgcattttcgtatgccaaatataggagaaaatcatgtaaaacactgagatgtgatgctccaagcatgtacaacagcgatgaaacctagctgaattggtagataaaagggacaccccaaggtgaaaaacacaagacaaagatgataaaagagtggcatgagagatatggtgtgaacagaacaaaagagtggttcataacaaacagactgaaatgccacaactaatgaccaggaatccaggatcatatgcagcgccaaggatatcattagaatttcccaatagatcgacataggcgggactattctgtttgctttctgtttctttttcgttttcaggtctcttcacacttggtgatgttgtaaattatttataccctactttttttaacattaaataatttctatcctacttaatataacaaaagacacaaaccaaaattagggcgaaacaggaaaataaaacgattggtcttaaccaaccagaaaggataagaaaatttatactggaaagtagatgtgatggaagaaaagaaacagaaaaggtagtaaaagtttttataattaaagagtttctatagtaaagacttattgtgatcattgtttcctatttatgtttgagtgcaaagtagagaaggtaaggaagctggtatttgtgttatgtgaactgtttgagttagatgcttagtgaaagtctgcagccaaacacaatggatccaaaatgtgatgagctcttttatagaaatcactaatctgtgtcttcattcagtgttccaatagcaacagatacacaaaaaaaaagtccatttgccgtgttacgacaactacagttaatcagttattattctgatccatcaggaaaatgttcaagtgcattctgttttccattgacgtaaaactcaatcactgctttcatgcgttccgacttatcaggatggtaattcaagtgcacaatcactggcttcaacttccgcagattagcatctttcctcacagtcttgaatagaactttgctgttcataaattggtatatatccatggttcttttggatatatggagaccttcataacctggatgtgaggggaagaacagttcctcattgaaaacagcttgatcccatgatttgggttcacgagaaaggcggccagctactctatccaaaagctcaatagaaggaattgttggccttatgaagaaaaatccggaattataaacccatatgcgcattgtgtgtgcgtatcttgcccagcccattaagggctcatcaaatacatcattgaaaccataagctgtcctattgtcatgaccatcactcattgactctacatcagcatctctgtaaagatgatcaaacggattctggaagaaaataatatcgatatctgataggagcacactatatccaagctgcaagaattccctcaatatgcgaaactttagtccagacacagcatggtttccacctacctttccaatattgtcaactccttcgtcaggatcccgcctataaaatggaacacctttagacttgcaaaaggtttcagtgctgtcatccaatgcaacaattaaataatttgaaatcccaactcgtttgatgttagtaaaccacatctcaagcatctctctcacattggagtttgccaacgcaacaattagttctttctttatagcaacctgttgcaatatcttggccaatctgggatttatggattcatcagggataactgttggattttttctaatagccttgacagtaccaaaaggaccagccttatatagaacctcgtcttttccttgcccagctaattgaagcttcattgttagttcattaatctgcttcctaaattcagcatttttcctctccaacaatactacatgtgactttaggctggtaactccctcagaagtctcacaggcaactgagtcagcctataaagatagaaacataattgtaaaaccatatctgataataaaacaaatatcagtgcatctaaggttataacaaaaagtttaaacgatcaacaaggtgcattcagttttgatgtatgaagacatattatacacatttaatttatggtatacgtgtgcagggtattgaacacaatgactaacatatcctgtaacactgcatacaagccaaaagcaaacaaagaaaggattgcacttcacaagattgtttggaagacaggattatcgaggattcatgtagtatggagttgtattgagttgaatttaactaaagttatgttccaaatgtagcttacaagtttatggaaacataacacttgtaaaaataactctgtggaaaaagtttcataatcttttttttcatggtattacatggtgtggcttacatattgataaatttacttccacccctcaaagtgttactatttgaacaacaatttatacatattacaagcagtagttaaacagactgtgagccatatactttttctattagacccctggtggcattacaaaaattataaataacagtactaactacacacaggaaattaagattcaaaaaaaaaatttcaacaaaaaaaaagacaactgactgatttttcattgaaacataaattcgatgtccaggacacaagaaaattttggcctggtttggtacaatccaggcaaagaacttaacgaagtagaaccttggtatcataataactgcagaattaatacaggaaattgcaatcttaaaattggtagtgtctcaatcaatgaaggtggcaattggaactacatgagtgtatcgtgaagagtatgcacgtgtgaaagcgggggacaaaacttagtaccaactcaacattgaagataaaaattcatctccgtactcattagtaatttgagcatccccctggctaacttactgtatcttctctttcagcccaatttcttgacaatggctcattgctagtgccttgagaatcacatctattagctatagatgacaaccacttgaaatactgttgttcatagatgggtaaaaaactaaaaacaaatagatgtgttgctacaagaaataccgtgacaagctactggctgcaagcgctgccaaccaaagtgaactagtgattggccaaagatcaatatttccaaacgaattgctcattatttgtgacaaaatattgcagtgtgtgccatcaacaccatgaacaagcatataagggaccacttcaacagaggtaacaaccaaccccctaatacattcatggaatcatgggtaataatcacatagcgttgcagcaatcaaggaaaatctctattttaaggtcatacgatcctagcaattgattgactgatttgtcggcttgtcccaatacaattgccttcgtataacacaaaccttccttatcgtatcatttaagcataccttagagagttgagctttttttttcttttgggtaaaatgatcttacttttttccgagtgatctcacgcacaccgtcttactaatccatataacaatcaggattccgtgatccaatcaccgattgctactgttacagtagtccaaaaatgaatcgtgttcgactaaaaaaatgaattcccctaacattagaaaaccccaagctaaaacagatgccccaaaaccaacaatcgctaaccgccccagttcaaaccccaacgatccccgcccacgactctcccctcccttcccacgagacgacgcggcgggcggcgaaaaggcaaggggacgggggagataggcgcggaggcggcggtttacctggcgaggccaatggagggcggcgtcggaggagcgggagaggaggccgtcggggtagaggaaggcgcacacgcagccgagcgcgacgccgacggcgaccgccgccgcgatgcgcgacccgcgcgagagcggctgccctgccccgccgcccgcgccgccgcgcatcagggggccctcccgccggctggccatccgccgctcgccgccgccgccgccgaggagatcggagggaacgggagatctgggagaagggtggggcccggctactgactagtggtggcttgcccgcccgagacgtgacgctcggtttgctttgtttgtgtggagaagtgggacgaactgtatcgagtaagattcgttagtggaggaaggggacggtggatatgtagtgcaccacttatcatatcaactgggcgtacggctcagatttgaccagatttttgcaattgggagtgtactgctccctccctctgttccatccttgttattactccctctcccaccgtctcgaaatataacaaaatacaataacctataatcagataagacattttctaatactatcgaggactaagaaatgtcttatctggtcttagatttattttaggacggaaggagtagttgttttgaaatttttttcgtaattatattttttaagtttagcatttttaacataaaataaatatattatcaaaatatatctaatgttagatttaatgaagctaatttcgtgttttacatgttgctaaattatactaaaaatttaattaaacttaacaaattttgaatagcaaaaaatcacggtgatttataatatggtacggaggtagtattatatttctgtaaggaacccgtttccaggagttgacttttggcacaacccgcaaggtccctgttttaaatagtatcctcactttgtttataaaaagaatgggaggactccaggagtattcctgctggctcactgtgaaatactacttgcataatttatgtgaatttctctgtgtttcaagtgggacatatataggagtaaagagtgattgcaaacatttactagtagcatatggttggtgtagtagggacacaagtgtgacttgaaagatactccatccggtcataatttgttgaaatttatggttaatcttttaaaactttgcaatttttcaaatacttattcaaaaaaaaataatatacatagatttactgtgaaaattactagcacgatatcccacttattctaatatgtaatcgatcgtcatgatttcagaactttaaccaaattttgttctaaacatataatacttatgaccagagggagagttttagtttgtgcttgtgtcgatgattggattttgacagtgaaattttagtggtgcttgtttgaaagcataccaattttggatttttagaacttaattaattttacaattctcaaggacatgaactaatattgtggccagcatcagaacattctttttttttccaggttcatgtagaaatcacatttagtttatatgaaaatgctacaaaatccacatggaatgaaaaattttgtgttctatagaaggcatgaaattaaataatagggagtataggcaatgattttctcatgtctagtactccatccatcccaaaatataagaggcctataattttaggaaaatccatagtttgcaattttgactaataattaaactgacaatatactacgtgcttagtactaaggagtattatgtatgtggcatcgttatattcgtcatattatgccaattttgttgtgctaattttgtggttgttgataatatattatgaaataaactaaggggcaaagttttatgttgaaaaccaagtaaaagacttaatactccttatattttaggatataaagagtagcaaattttattgttgatttaggatgtgtcgtaatgtgttaataggctaggccgcttcctcgtttattgtgactttgtactgcttaacagtgtatttcatgtcaaaactctttatattgaagtttctttaaactatcaaacaaatccatcttttaaggccaatgagcttgatccaacgaagccttaaaccaagtgaatgcattacatttgacatttgtcaacgaactatcccatttgtcaactgaatggatggccacagtatcggcaaagcgaagtacaccacgtgcaaagggagaattcctggatgaatgatcatgttcttcaaggacgatatggaagaatttccaaggaatcgtgtggcgatctgctgtagcgaagtacaccatagaataattttgagatggatggctgtgaggcgttcacaatttcgcggaatctcgcttgaacagttgaacttaacaaatttcgagcgtctcaagcaggtcaaaacaatatctaaaaacgtgaatattaggaaagaacctaatatcaaataattaaaaggggtgatgcttcgaacccaggtcgtctagctcaccaccttgtggagctagttggaagaccctgggcgtttcaaacgtcaaaacaagatctcaactgcttgaggtgcatttcgaatggtttgtttgaaatttgttaaatttatttgaaattagcgaaaaatcgacctctcccaacggggctcgaatttcactattctaatgatattgtaaagattactcatgatcagcactttcagaataagtacaacaaagtttttcttttttttgaggaacagggtgtgtctgaatctgattcagaactcagaagtgtccggttcattcatgttagcattaaaccaaacaaaaaactgttgagcctgcaactctgcatgcagtaacctctctaataagcattcgttgatcaaggctggctcttgagttgtacaaacggaccaaaacaaatttttgccattaaaaaaagcaagaaaacgaacaaattagcatcgaaaatatatcatatggccgtgcaaagatagtggcaacatgatcagatcacttctcctgatagatgtatataccacacggatcatgcatgcgtgcattgcagtcgccatgcacacgcacgcaattgctcggatcacacgatggacagattcctccggtgaggccgcgtcagctcgtcggcgtcggcgtcggcgtcgagctccggcgcatcggtggacatggctttgtcgttcacgctcacgcgcgcagcggcgcgttcgccggacgtgggcggcgcggcggcggcggcggtgactggtctccggccgaacaggttcttgaacccgagcaccagccgagacttgaggcccctggtgttcgtggtgtccttggtgatgacggcggcggccggcgcggcgaggtcctcgccgtcccagagccggcttcgcgggatccggaagctggcggacttggcggacgcgcggtctatggcggccgaggccgtggccgcggcggccgccgcctgctcggagcggcgcaggcgcgtgcggagcccggcgagctcgcgctcgaggctgtcgatccgctgggtggtggcctgcatggacgccctgatgtgcgccgactggcgcagcacggcgtcgcgctggaggatgtcgccgagcgtcatgctgctggcggcgtcgcccgcggcggcggcggtggcggcgaagccgccacaagcaccgaatgcgccggagagggagctcttgaggagcgaagcaggcggcgcggcggagctcggtgcgccggcggcgccggcgtggtgatggtgaccgccgctgagcagcatggagtggtgggagtggagctgctcgacgagcatggcctgcacgacgaagcggagcgggaggcgcgggttctggacgaggtgcatgaacaggtggtgcgacagcttggtgcagttcacgttgtagcacaccctgctcttctcctcctccgtcagcttccccctgtgattctgcatccatcccaaattcagtgcagatccaacacaaaaatcattaatgccgtgtttagttccaaactatttcttcaaacttccaacttttccatcacatcaaaactttcttacacacacaaacttctaacttttccgtcacatcgttccaatttcaaccaaacttctaaattaagtgtgaactaaacacattctaaatacatttttacacaagagatgcattgaattatggtctgtcaaaatgctgatgaattcctctgaacttcttatagaacttattttaagataatggaaattgtttatatcttcggattctgtctttaaggtacatgaccattaaatttgtgaactcttaccagatttaaattgtttgtttcaagatcctacaaaattcatctgagactcatggctagaaaatattataacttgagttgtgacttgtagaatgcagggtgcaacacaatcctcaaaagctcaacttcctttgacctgtagcccagtaggataaggattgtgctaacctgtacctccaatgacaacttcctttgaactcaacttagcaccaaagcaaaagtatactaataatcagatgattaatgattagtgactagatgattagttttcagagcatagaatctgatgcatctccatgactccgtgtatagtttgcttcagcacaaaggttctgcagctaattagcctatccaggttgacttgcaattagttactactccaaatagtgctgcacctatccagtatccaagtatgacttgcattgggagcaaggaatcttgatcctacagttgagctctacgaggattgctttgcattcagcaacaaattcgccacagtgcactgcttccgaaaccaaccgacacactacttcagtagcaaaatgcttacagcttgatgaatcattggatcacgtgatgaacagttcaaggtctagcgaattttcgttcccccgagtatttaatttgactcgaccatgctactatatcaacttggcataaattttaacaaattttgggaatttgatgttgtaaacttttttttttacttacctgcaggtagtgatcaacgatggtgtacatgaggtcgtggtcgtgggcgaagcgcgcgcgcatggcctcgacggcgacctcgaactcctccacggggagcgcggccacgtcgtcgagccacctgccgtcggcgccgccggacgacgcgagcgtctcgaggcaccggacgagcagcgcggcgccggcgccggccgcctcgccgccgaggaacgccgtgcacgcgcgcagcaccgcggcggcgcggccgtggtccgtggccacctcctggaagaagtagtcctcggcgcgccgggccagcccgtcctcgccgcgcagctccagccagtccgccgccgcccacgccgccgcgaggctccccggcgacagcgccgcctcggcgccgtagcacgacgccaccgcgtccacgaacgcgtcgacggtgagccccgccggcaggtccacggcgacgtcgctgcactccgacagccgccgcttcaggtagctgctctgcgacgtgatcggatcctaccaataaaccaaattaaaaccttgctaaaaaaatggaaaaatgctcttgtgaaaaaacgtgggtagctgacatgggatccacgagttacgggttcacgtgtcagtcagttagggcatgttattataaccaaaataaactagagcaagttaacaatattgtcaaaattttagcaagatttcttatgtatttatcaaatttggcaacatttttttaacttttctaaaaaaaatagtatagttgaaaatagcatcaatttgaacaacctgaatagtaagttaaatgatctatttttaaatttcacgcatcatgaaacataatgttatttatctatacttcatcgtctcttagcttgtgacatcaacgatttggcagagacagaagaacaatccaacaggtgtacgtgtcgtactacgaaatcttggaacttattatgagagaaaaaccattgccaaacaggatggagctggaaatgtcgatctggcgaatggttccatggttccatgagcccacaaagatagcaaggccaaagtatttgagcggattggatcttgattatttgcaaatactacaaatgacagcagggttggcaattccggcactctaccagtaacaaatgaccctagtagaactgcatcctgcagctctgctacgctatccgtgagaggaaaagaacaaaaaagacgccattaaattccaacttttcagaagttataactttcttgtgtttatgcatctcgcaggtggcaccagcctcagaagttctaacttttcagcctttaaacacacggttgctgtacactgtacaaaccccattaactcttcactaaactggaatgcacagtacagcacaagaaacatttcagtctgctacctgcacaatagtactagaactcctaatgagcagcagttaattctgcaataacttgcaactaaaggttgcttaggagtatcctagaaaaccatgtcggccaagttgagcacagttaagaactgatgcagacatgacactaacgttcagagcttcctaaaggacactgatagtaaattttgaagagatctgtccatctaacccacatttattcacaccttccttttgtttggttagcatgaatgcaatgcttatgtatgtgtacgtcgacgaaatgccatggtcccaatccaccataattcatattcgaattccagcaatattacctgtagaactgcgtcaaatttaatagccaaactgcgtactacctagcacatgttatattgaagggaccaaatcctaatgataatgaatacccctattccacacaagatctcttcttctcctagccttctactactactgtattcaattcagttcaaagttcaaatcatcactgcagcctgcaaggtaaaccaatgcaggaatacaggagcagtacaaaagtgcaacgaggatggaaggcagtaacttgtcgaggcagtaacttcgctgacggttactgaatgtttacaaatccctcctgcatcccagtgctcagaccaaggcagggaagtaaatgtgctacagaattgtcatcaataattttgcctcttgcaatgccattgggagctgttcctcgtggggggcagagaagcctgtggcattgcgggctcactactctaccttcttggcccaaatttaagcacaaccaaactgctcatctacctgcaaaccttttgcaggatctcttaatgcagaaaaatttaattgatgaatgccattataatccatgtatttatgcaagttccagttgatgaaggattgaaagccacatttgccagtgccactacattgatgaaatttgcaggcacataatttcttttttaggcagaaaatgggcatctgcccaacgaattcttgtgcagtgcggctaaaccataaggatgtaacctgaaatgttgtatacctaaagaaggcagtagcccagccacagtgaatctatgagcactgtctttttggtgcaaggaaaaatgcacagtaactaatgtgagttactcccttccctttcttaccatcacaagaaacgtatgaccagatggatgtggactgatcatgcattgccatccgtccgtttctatccagccggacccgtattaatttgccatgaataatttgtttctaacagaagacatgcagctgcagcatgatctattacactattcaatttttaaaaactgccaggactgcaggacatcactaacgcagcaggttagaaaattcagtcacattctaatcggtaataatatccttcaaaaaaaatcggtaataataagatactatgtgtggtaaaaattcgataaaggacggcgttcgaaatcagaaagaaggactgaatttttaccctgtgcagaaagaaagcaagtgttcaagaaaggaagggtctttcttaccctgtgcagagcgaagcaatgttcttggacacggacgatcacatccggcttgcacggcccattcgcccgcgacctttcgccgatgcatcatcagaacagagaggaaacaaaattcaacaccgatctcccagtcagattgcgaaattcaccaccaccaccacaagaaccaatcaaccgaaaagatcaacaactgaaactgcagcaaacgtttacgtaccactcgcgcaccgcgttcctgagcgccgccggcatggcgaactcctccgccgccggaggcggcgagcacgaccgcgacgtggccgccggagaagacgacatggtgggcgaatcgaagcactcctcttcttcttcttcttcctcctcctcctcctcttcctcttcctcctcgtggtcgtcctcgtagatggtgtccacgacgccgagctcttgccagcttctgctcatctccatctccatgacgccttcgaaatctctctcgccttcaccttcttgtcctatctaccgcgtcaccgctgcgcttctagtaccgggcgacgccattacaattacggggagggggtggtgttaaatcggggcggcaatgaatgcgtgcatgtggatgataaatgctgtggcaccctcatccatcttcttcttcctcttctctctcactcccagtggtggtgtccttcaggctgcactgcaactgcagtgctgcagctggtgcttatatgaggttcttttgtttttgaacactgtgtcttgtgaggggtggatggagaggaggatcagagatagctgcagccagtggtgtactggtgtggctgtttggttggtagcctgataggtggtgtggttgcaaggtttgcgcgagatctggaccgttggatcgggcaatggatggttcagattaggcgagcccatcttgttaccgaggttttgtagggctttatggcagtttaatggtttaacatatgttacgcatcattgctgaggaagtacggtgcgaaaaaaaaacctagaatcttaaaagaattaagagatggcaattcctactatagtgagcaaaattcaggaagtaatcaacatatggagagttttttttttctaaaacatatatatggatcatgtgtagggctaaagatttggcgaaattattgtaagcgtcttgagctgatcttttcttttctttgtttttattttcagcttctgagcaggttggttttgtgggtaatacctatccaaccagcttatgcacaaaattgctacttttcctaactatatataacacaagcagtttgctggctcaaatttaaaaatatattttccttttaaagttttgtttatatatttccttcggaatggggaaaaataaactaaaacaccaatatatatgaacatggtctattagatttagaggttatttttaaggctgcattcgatctgcacttttaaagatagatttttagtgcactcaaaacaagaaaccttattatcacatgattaattaagtattaataattataaattttaaaaagatttgtttgaattttgtaaataacttctatacattttttaaaaaaaacacatcgtttaacaatttaaaaagtgtgctaacgaaaaacgtgaaaattgaagtttggagttgaagaaaagaattagacctaagtctgtttagcaattgttagatctatcttgacacgtgctagctcatctcaaaacataatccaaggttgataaaaaaaaagaatgccctagtttggagagtgatcgacctagaagattcatcctagtttggagagtgatcgacctagaagattcattcatgcacatttgtcgagcataaatctatggtaaaaatatcgattagattgcagacgtgagtaagttagcacttagcacggattcgttatacttgtcatgtacagtttgagtaactacaacattttctatgtcagtactataatgacatagatgtattgttgacatatgcggtttgttcgtccattgcatttgtcgtatggactatggacagatgaaaggctgtcgtcggtttaatttgtcttcatgggcggatgggcctctccttctgtacgtagaacaatcacatggttgatggttggtcagcatagcagatctcgctgaattaaaagatgtaactgttgtttttgctgacacgctgttccaagggtgcttagcacgcaagagcgctggaggtgcgtcgagattcgtgcggtgttaggccacacgctgatgccgaaacgatatgcgttgtacacgactaccacgtagtacatgcttcagcaatactccctccagtcacgtgatggaatttatcctttgaacttattcaaaaatttgttttattgttaaatataatttaaacgtgacttatgtttttttttctaaattacacagtaccacgcagacactcacaacgcacgcacgctcacccctatgaacgcacgcacgcacgcacctactcctatgaggatcttcgaagactgggccggcaaatccatcttggagatcgcacgcagctcacccctatgaacgcacacacgcacgcaaatcctactcctatgaggatcttcgaagactgggccggcaaatccatcttggagattgatgaagtcaccgcaggcgcttcgccgtcgcctaccgctgaaagcacaagccgttaaatcctaaaaaaatatgcccccacggaaagtcgaacccaggatttaaagtgctactgagactcttgtaaccactgagctacatgctcatgtgacttatgtttgtatacatttgcattaaaactttgaataacatacatggtaaaatctcgtgatcaaagttaactgtgtatatttatgaccagtgagagtatatgtttgataattttggagttcgtaattcttgttctgtacgtgtttgtgttgttctcgatctccttttttgttggatgcacctaacctagtattagttttccgtccacttaattatagggaaaaatcagtacacaaatttaattacacgtgagataccacgaaagcttgcactccttgcttttttttcaatgtgttggttaattaaggatcagggagcaacaaaagtcaggcgcattaagatgaacagtaggaggaacagtgtattctgttagacagttagagaaggatactttgcagctggaagccttcacttaaggacagaagttgcaacttgcaaccgtgccatccatgttcagatacaactttttgaaaccttccatctcaaaagaaatacggagcagtaaaattctgaaacttgaccaaagcaaagaagaacatggtgggcatggctgatggctctctcatgtcatgcgacgaaacgcaagttacggagctgttgaattcttcccgaattggatgcggtttctcggcgtgttttttttttctttttgttctgttcaacctgacgctagcagaagttcagaactaggaactcgccgtggcagacttagggcctattcactttaatgccaaaaaaaaccttaccaaattttagcaacttgctaaaaattttgcaggatttcttatatagttaccaaaatttggcaagaaattaaatgtaaccactttttttgtaactttaccaaaatttaatagggttgaaaatggcatcaaagtgaacagacccctacgtaagctactcatagatatacaaatcacgaggatgatcattgagttgacaattcgttattggtttttttctccattttatatgtatggtcatgtacattttcgaatacaagtcaaaagataaatgtaggcgaatgattggcagaactagtgaaaatatgagcggtgatcaccttcatcttacgctcgtaggtagaatcggaactttgtttcttacatggctaacaacaaatcaagcaaattaaaccaaagtaacaaaacctaataaatcaataacggtgcaaatttgcaaaaccatccttcaaacttaatggtcctcctcccgtgttgctcatttccggcgataagctgacccggcggcaaccacggcggccggcggccggcttcgctcgtcctcggcagcaccggtctcctggacggagcccggccgtgcgtcctccgccgccgatccggcgagctcccagtagtcgatcaggtgcctcctgctgccgccgccgccgccgtgggagctcccgtcctgcgacgacacgccgcggtagccgccgcgctgatcgttgctcctcctgatcgcgtcgatcacgaacgggatcagcccctccatttttgccacaaaacccctctcctctttagtaatcttctctcccccttcgtctcgcggtcgcggctgcttgtgttgctgtggttggttacttgggttggttggtgttacgttcatggctgtggcttgtgtatttgtagaggccacgaggtcgtggcggcgcgggcgaaacggggtcgcgcctggagaaggtggcttccggtgggcggtcgttgattggggtggagtacgaagatttccttcgtgttcgtcgtcgtcgtcgggctcatcttctcatccggaattcaggattccgttctgcttcacattttcttttctgtatagatgcgtgggactctggaataggggaaaggatgagagggatcttgtttttcagggggcgcgtacacacgaaaccggagcacagcagtgcgtttgctgccgtaggttgggttctgggttctgttcttttattacttgtcattctggaaggcgtgcgaatttgcaaatgttttttcacatgaaaatgtttttctattcacaaggagttagcttttgatgtttttcacacgaaaatgttttttttttcacaccaaaatgttgttgcttcataacaacaaacacaaattcattttagttactctttttgacctatgtggtactcagaaaagaacagagtattcctttaaaatccttcaagaggtttcagaaaagagagaggtcggtttgtgccttttggcataaacaaaagaacatgttggtcacgtgctcgataatgcgagaaaaaaaagattttagtgtccatgtttgatgggctcgctattacgattagaaggtgcaattaacccaccattagtttagaaagactgggccacccccttatcagcatgacacatcacgcttaacaatccgaagcatatgccgttcgtcatgagtcgcgtgtattaattccatctgcttggctgcttcttcgcctgtcaaaatctgcagggcaatgcaaaaccaccacccacttgcatgcacagcgcaacaatccgcggcccgccggcgcagcaacagcgaagtctgcgacctcgagtcgcccagcgagaatttctaaaaccccatcggaattcggaagtggcgacgagcactgcaaatcacgtggtttgcgaccatgacgtggaaaattcaacgagaacggcggtttttttgaccgatctgacgtgcaaggctcaacagcctttgttacttttgacacgccttgattcattctccccagcagctatacagagagggcaccaaccaactctgattttgttgagttgaaagtgatttttatcactgcttctgcattgccatcaagcaaatccccacggcaattgggtgtaacataagggagtcattgccagaaaatgcgagaaatatcggcatccggcttgaccaaacagctatggaaccacggggcacgggagaaacgtagtatagacatagcaggcaagatccaaccaactgacgtcaaaataaagccatgggggagcccagcaataagaggagcaaactagcataacagtaacttcattgcaaaaactgcaaaagtagcagattacaccatatagtcacgagcgcgtccagcgtgctcaatttcaagcagacactagaattcagaacttgcgaatatagttgcaaaaagcagacaatagacaaccagtacgaccttggcaacagcatgccttttaagttcgataacttcttgacacattactatcatgatgatgtgactcagtaatcctttcgccttaatcccttccagcataggatgaggctggcccacgcccatcaatttctggatctgaaacagaggagaggaatagtcaagtttacattatagcatgagaaagtaaccaaaataatttgagcaagaccaaagaattaatatgcatacagctgctttcgaagtgttcctgcgtaagtagagcgaatcagactcgttgcagctgcggcgtccttccctgggccagcacagtcatgtgattggctgattgctaatcagagtcttcatacaatccctcatcgtcagaaagctcatcaaatgaccggatatctagctggtaacgcaagataccaccaatgccaccgaatcctctacaaaactgagatccctcttgagatttattagtgacaaactcaagcgagcaaccaaacttcttgtattcattagcaaaccattccagaagagacattttttcctgaacttccaactcagcattactagccggatcacggaaattactctggtcagcttcctgctctttgttaaaatgtttgatcacagtttcaccagatgcactgttcttaagcacatatctgttggtttcaaggttctcccacactattagagtctcaacagcacccatctcaagagctttaagagtgtcatcaaccccaaagacatatttcccagtatcttgactgatctcttcaaaatacttgccaattagcttcttctcctgtatgaacttgacatttgctagaatctcagctgacaattcaatagcttggttgaaaccattctcgccaccataagaaacatcaaccacattaagtatcttggcttgaagtcgttgatcaaacatgtcagactgactcaattctgtcttaaaatcagcagaaccagcgaggattaggcctgaaacattaggctgacttgtagcaggattaatgaagaactgagtagcaagctcagctgttttccggacataattatggcgtttctccatccgaagacgagcaaaacgcaaagcagattgtcctcctctaccatgcttctttgggagatcaacagtgaatttgtgaagcacctcacgtgtgttgccacttagtgtgccaaaaagagtaccattaccatccataacaatgaacccaaacttgtcatcagattccaagagctcattcaaagcttcagtgtggaacttgttatcacaaagatacagtgatacattgataggcttgaagggttcaaaatcaatggtaaccttcttttccttcccatcttcagtaacaatggttccagtgtagagaaccaatccatttggaggaactttgttatagagcttcagcctctgctgagctgaggtaatggcagccaaaacagactgacgattgactctactcttgatgtttgaggcggtaccatattcatcacccaacatcttagccactcgcgcaatctggtcacgtggaggcataataagagagatcatgcttgtgccatttcctctagctgactccagagccttgattagcttcttaatcttccagatctcaatgttcctatcagtttcatggctgtcagacatcttgacagagcttggatgactggctcacctgtacaatgccaaaacacagggatataagggatttgaagggaacattaaccagacagttcactcaagaaaaacttgcaaacagattaaaaaaaaacacagaacaaagacaagtcatattattgttatatagtacattcaactttcttgttgacacaagctctgttcatgataccaaattggacatggacatgctaaataagaaatgatacctgtctcctgtacaaattaatcaataatgagactgatttcttcaaagcagcatgctctattactttatacgtaacacagtgaaagaacaagaaaaacaaccaccgtttatcttactaaatatctcacaacaaaatttcggcagcaaaggtactatcaaataaccacaacactcagcagacaaggttaaaattaaaccacaacactcagcagacaaggttaatattgcccaatgggtggcaaattttggtttggtttaggaaaaggtaggttacgaaatgtgaaaaaggttttcatttgcatatactcaaatgatttttgcagctaacatgaaacaatcatgaacacatacgatgttatcactaggttacaggtacttggtaacattttttatgtgggacaaacatactgaaataaaataaagcatggagttaacccccaagacaaatgaaggacctgcatagccatgtaaaattttcagaatcggaatgtcacccagataaaataataaaaccaacataaaatctaaattatatccaagaaacagaatttagtttcaataatcacaaaaccgaaatagagagtacactcatgaaacaaacggaaagtacaattagtactagtcaactagatatcaacttggaaaatcacaaaacaatgaaatatggaatataatcagtcaataaagttaaaacagcacatcttagatgtatttatcttctgccaacaatgtaataaaaaattaactataggcaatcaatataattaaagtaaatcattgtaagaccaaacatgcatctgtcaccaagactaagatagaagataagaactaaacctcaggctaacattttaagatcgaatggcataaatttatagaagttgcattgacattgacatggtcagtgttttgtctttacaagctaccagagtcatagaagatcaagaaaccttcttaacttcttgattgccatgttcatcaaggggtattccttctagttcatgttctactagcagtccagcacatacattttcagttaccagttacttccaaaatcaataaggcaaacgtgcagcaatctacagatttcagaatgtttgaatctttaaaatcatgtaaattcagaaaaaaaacacatagtttgctcaatgctcactactacttcaagttaacctaaatgatacatcaccaatgaaaaggaaactattagcgcaacaaaacatacaagagcagaatgcaaccatgaagaagacatataacatgtaattttcaaaccaacaacgctaaaaagagcgccgtgaacttgagtaaccgcatgtccgcatggcaccatagcaggaaggctcgtctaatatgacaataactccaagcattaaggaatcaaaataacccgattaatatccacgatggaaaatagcatgtattcctatgttaatacacatcccagtacgctacttcaaatagccaacaaacaaagccatctcctggcaggcaattacaacttacaaacacagcatggatccaaatacatccacctaaattagtggcctaaatcaggaaaatcgcgcggaacagccatctagagtacttcccgcacagatcccgagaccgggaggcgaaggatcactacacgccctagaaatttcgccacagaactaggtcccaatcactcccgatccacctcgcgctaccagtacaccggatccagactctaatctcgaccaaatctgacgaccacacgaaccatgaaaacaacacaacccgcgacgattcaacagatccaacctgctcccgatccgccgcacccacgcagctccgaacgatcgggggagaagaagcacgagacgggatcggatcgagggggcgcaggagggaggaagaggaggaggggctagggtttccttaccgaggaggagggaggaggaggaagaggggagcgccgacttctcgcgggtgggaaaccctcgcctctgaacttctggtgtggtcggctgtttcggagagagagagagataaggccccggaattgaaccacgcgatataaccctcggttccgtggggcccacctgtaagccggggtgcggcttggtgggggggggtggggctttggagacgacgggatcggaatgggtcccatccggcggctttcccaggatctggatggacggttggatcgtcaccgcccagaggcgaacggaccggattgggccgaatttttctgcaccaatgattaacaagtgggcctagtttctagttttgttgtccccaacgaatttcttctaccctttctttttcaaatatccatgttattattcacacgtttcaaacatcttcttgttacatttttattaaaattaataaattttttttgcaaaaatataaagtacttactttagctaatactcctataccataaattttatggatttaaaaaagtatcttatacagagttatttggttcactaccaaagttttatggatttaaaaaagtagcttatttggttcactaccaaagtttatctcaccatgtcatagcttagattaggcaaggtgtctatttagtttgtgccacgcttatggcatgattcctccatcgtgacgtgggtccgatatatcattttgcatataaaagtgtggcaaggttttatatggtgttgcttcagagaaatgttccaataggacagagtgcccttacatagagttgacttaataaatcttatgttgtaacgtttatatgttgtatttgtttgttgcaggtttctggtccatttgactaacaagaaacgattgggtgtgttaatagtaaactaatgtcgaatgttctatacttgcctcacaaagttgcgtcgttttttatacagtggagaagtttgactcctcataagcttttgggggccttggatgcttaaaggagtcactgcttaccaatgtccacgatgagaggaccaaaaaacttcttaagtttagaggactggaggaaggtggaatttagtcgacctagcccatgagaagatcaatgtgtttctaaaaacatggttgaagatcttttgtggtggtagtttgctagtgtttttagaggttttttagttatggattgttaagttatgccaacagctagggttcttcgcccgccgggacattgtgtttcatttcgcgctggcatccttagttttgttcttttattttgttatatggatctttaagttgggtgaaaacctttttgtctaaaagtgtagcaagcttattctcttttatggctgaagtatgatttcaattttgttggccacgtgttggacatgttagctaacataagtatgacaaattttcagtaatgtgggtacgccaatcaaacagtcctcggaagtacccaaaaccatgttagttgtatccactattacataacacgtagaatccacttgtagtctcgaattatgcctagtatgaaaggtgacctggaaagaagatgatgtataaaatggttattggaaccataggtaaccagaaaggctagaagttatagttttatgatagaacatccgtaaaatgtgtaattttttaattaatcatgttattaaatttgtagctttacgataaattggatagagcatctatagttttacaaaatttactcaaataaatgttggatgcacaaggaggtaaataatttcgttgatgtgtgcgtgtttttgtgttctaggtttggtttgtggtggaggacttgactgttaggttttaacattaagcttagacacagcaacttaagtacttaaccacaaaaaatgacgcacaatgggaaaaaaaatataagtcaagcaagtcatggcaagatgacccgtgcggttcacatagagataggataaaacgagtcgatttgtgtggaaaaagaagaaaatggcgcgtgctttgacgctttgtagcattgaccctccttcctagggtcttttcctgcaaattccaaattggagcacatgattttggtgcatgagtatctaaaaacatcagtagtattctatattcttaagtcttaaccccgtcgaaatcaacgtatcaacactcaagatcttaccactgtacaacctggctccatcacgtgtgatttgttgggctcagaagcaatagcagctgttattggatggctccgcagtacaaacgcccatgcttttatccatcgccgctcgtccgagcacgtctcattaactaactcactcactcaagtgaggtcaaattacagaagctcaagtcaaatgcttatctaatctgccgatactgtcgccggatgatgccattacaccccttcactctcacgcagaggctgtccaaaaccatcaaatcgtcgtgacgacgcgagacctctcgctagcctgacagactggtccaacccaaccatcttctcctccgactcgagccggaaatccaagaaccgagtccaccgcgctcctccccttccacggtcgctgacaagtggggcccaggtggaccggcccgcacgcgtccctgccgccctcacgtgcgggcctcggtcgcacgtgtcgcgcgcggaacttgtcgcgcccacacaccaccgtcgctccgtgctaacgaagatgcggcacgcgcggaccgtcggattcgcatcgtgcgggtgaggggtgcgtgccgcgtgccccgtcgccccggacgcgtccaggtggcgggcgtgcggacagccgttggattggatccagcggcggtggttggatagcgcgggaagggaggaaaaagggttaggaaaaggtcattaattaattcgattaattatttttcgcggtgattaatacctcgccccactcctcctcttcgcttatttcattcgctcgtcgcgtcgcctttgccttgcctcgctcggttccaaacgcaaagcacccaattccatttccgttcccctctcggcgaacagcctcgcctcctcctcctcctcgccgccgacgccgacgccgacgcctccccggcatttggttcgcgcgggtggtgccgtgagatacgtggtggacggggtagggatggagtcggacgcctccacctcgccgcgccggcggagcaccagctgctacagcgacagcggcgattcgtcatgctccgagccgttcagcgagtgcggcagcgacgacctctcgttcacgccggctgccgccgcgggaatccaccggctgctgctgtcgtgcgcggcggaggcgtcggacgggacgatctcgtcgctcgtcgcggagctggagtcgccgtcgtcgtcgctggactcgctacggcgcgccgcgatggagctccggctgctggcgaagcacaacccggacaaccggattcgcatcgcggcggccggggcggtgcgtccgctcgtcgcgctgctgtcgcacgccgacccgctcctgcaggagcacggcgtcacggcgctgctcaacctgtcgatctgcgacgagaacaaggcgatcatcgtggaggccggcgcgatacggccgctcgtccacgcgctcaagtcggccgcgtcgccggccgcgcgggagaacgcggcgtgcgcgctgctccgcctgtcccagctcgacggctccgccgcggcctccatcggccgcgcgggcgccatcccgctgctggtctccctcctcgagaccggcggcgcgcgcggcaagaaggacgccgctacggccctctacgcgctctgcagcggcgcgcgcgagaaccgcctccgcgccgtggaggccggtgccgtgcgcccactgctcgacctcatggccgacccggagaccggcatggtggacaaggccgcctacgtcttgcactccctcgtcggcatcgccgagggccgctccgccgccgtcgaggaaggcggcatccccgtcctcgtcgagatggtggaggtcggctccccgcggcagaaggagatcgccaccctctccctcctacagatctgcgaggacagcgctgcctaccgcaccatggtcgcccgcgagggcgccatccctcccctcgtcgccctctcccaatcctcctccgcccgccccaagctcaaaaccaaggtaatcatcaatcacatttcctcatcaaaacacaatcgttttacacgttcttgcaaattacaaattgggaaatcgtgtgttgatcggttttatgattacacaggcggaggcgctgatcgagatgctacggcagccacggagcgcgagcctgcgcgcgaggccaacggcggtcgttgcggcggagtgaccctgacctcgttcaattcaagtccccaacttggcggtgccccaggtgttgtgctttgcttcccctattccggcggcgaccggggccggcgccggccgccggcgcgcgcgtgtaaatataccaatcagcgtgtttgcgtccgcgagcgagtgtacattttcctcaagcgagatgacgacgaaggcgatggtggagcgaagaaaagtctcttgtaatttcattcttccccaccacttgttttttttttcacttcacttttatcccctaccttgcttggttgtttcctcctcgtcaaacgaggagaaggttgtgcaaaaaaaaaaaaaaagctacaaaaatttcatgtgtgagcgtgtggtatcaaacagtgagaatttgtgctatgtgtgtgttttagttggggaaaaggaaattttttggtgtcacatcgaacgtttgaccggacgtcggaaggggttttcggacacgaatgaaaaaactaatttcagaattcgcctggaaactggaaaccgcgagacgaatctttttagactaattaagccgtcattagcacatgtgagttactgtagcacttagagcaagtttaatagcatagcccactacaaactccaattcacttatagccgatctaatagccaatttatataatagttgcttactatactaatatatagtcccatctatcatacacacattgtgtcttggagtccgtgctgcagctggctacaaatctatagcctgctatttctctctaattttttatctcattaaaatatgtttatagctggctaatagtctgctattgtacctgctcttatggctaatcacggactaattaggcttaaaagattcgtctcgcgatttcccccgtaactgtgcaattagtttttctttttatctatatttaatgttttatacatgtgtccaaagattcaatatgatgtctttgggaaaaaattttggggaactaaacggccctatgtcactgtgtgtgcgctacgtcaggaatctcatgcaggtctatgtgaaatacaacagaaaaacctcctgtctctgaaagcaccagccagtcggaatttcagctggaatgaatgaccatgctgctccattcagttcctaccgtgtctgcaccgtttttacgagtggttacagtgaaaccaccgtgagatcaaggttaggtccgttgtaggaacggcgagttcgttggccgtgagtgcgtgtgcgtgcatgacttggtaaaccagcaaaccttttactacctgttcaaaccaacagggaaagcacaaaatatttttccagtgaccatccttgtcatctactgctactcacttcttctgcgtctttcttcttctgctgcttgtggattgtggtctagaagacgcaggaggacggattggtggagagtggcgtgggggcccgggagcggtaaaggcgagagatcgatcttgcccgtgcccggtaggtcgatcattcgttcgcctgcagctgaaaacgaccctgttctctggctgaatctagcctctgctggtagttttcagtttctggagctctcgtttcccgagccatggaagaaaagcatataccgttgcctacgccaacgtggctactgttgctaggacggtatttctacgtgtcttttttacgggtgtgtttaattcacgttaaaattgaaagtttatttggaattggaacggtgtaacggaaaagttagaagtttgtgtatgtagaaaaattttgatgtgatgaaaaagttggaaatttgaagaaaatttccaaactaaacaatggctacgtctcctgatatgggtagggatagtaggagttgtatgacgagattgagcacatcgtttcgttcacttgtcgtttgtcgcttgtcgttgcatgtctatgctacggatgatgtattgtacgagtactggaagtacatgcttgtgtggacacgactgccttttttggatgacgtggagacacacacccggcgagcggcaaaggtgcttccaatactagcatgagatttttctcttttctatctgaaaaacatgcggtttcctgctccaaccacacgaccttgtttgtgcacaacgcaacgcgtggacaagttctcggtggagtgttcgtaaccctgatgtgacagtgactgtccttggcattttttgttactttgtcaagtgcagtgcagctaagagaaaaagaagagtgtcaactgttactacctaccatacggtgtattgctcgtgcatcgaccaaattaatcgtcaatgcccttccaaaaaaacaaatatttgactcggacggcggggcgattgacttttgccctgttcaaagcagcgcagcagaatccttcaaaacagaaggggaaaagaagcagagctggttgtcaacttcaaccatgaacaataccacggcaccccattcgtagcaaccgatgacctaaaaagtcacccacggaaaaaagcacacaaaacccacatctacacgcacgcaaacattcctgcaggagaaaaaaaacaaaaacaaaacgtattcaccactatacgcacatctcggatgccaaatgcttggcataattgcgttaattaatctagccccctgccaatcatcgccaccccggtagcaacggtgcgttgtggttgcccccgcctccgctgcgctgcgctgcgcacccacacatgcgctgccggctcggccggctgccgcgcgaactgacacgtgagctctccccctcgccccaatcggatcgtgaactcgtgagacgaccacccccgcgcgcgccacgcgtcgtgcgcggccggcgcgggggtgggccatcggacggatggcggggggacacatgtggtcgtgtggtggcgccgcgggtggatgccgcccccgcctccctcctccgcgcgcgcagccgcgcccccacttcgtgcgtgcgcgcggctgcgtttgcgttgcctttccgccgctgggagcggagccacagccgaacgaacggaacgaacgaacgtgttgcggttgatggggtgcaaagcgggggtggcatggagacgggcggctagcatgatgattgctgatgggggtggggccgtggtggtgcgagatgccgctgcctccgctgctgccacacacgaccacacatgcaaaataaaacggggatcatgtgacggcacatgagcgtactgtgcggcggtttgattgatctctctggctaaaaagaaaacgtttccttgcctgacgtctttctttgatgattgagtgtagaggtagcagcacaagtaatccctccgtaaaaaaaaaacaaaccctgatttcgtgtccaaagtttgaccgtctgtatatttaaaaaattataaaaaaattaaaaatataagtcacgcataaagtattaatcatgttttatcatttaacatcaatgaaaatactaattataaaaaaaattcatataagacggccagtcaaacgttggcacgagaatccatggtctgtcttttttttttgacggagcgagtatatatgattagcatatgcctgttgtttctgcctggttgttgtagttttgcagggatcggtacgtacggtaccgcattccgcatgtgtgcgtatcgtcggagtaaattttattcccaacatgtcatttttgttatcggtggagtatattgtaccatgtggagtggtgtggtggaaattaaaccaaaggtggttgactgcgatcgatcgatcgagattttgtactagtggtactgttcgtacagagttgacaatctactactactactacctttgtttttatctgcattgacttgccatcgattttcttccatgcgctgcgcgtgtttcttttcctccgatcttatacgtacgtattagcgtatatcttcacgaagatctgcgcgtgacagaggtgtggcaccatggcatgggcgggacgccggaacagggtagggtttggtgtggggtgaccgtgacaggagcgtgtgtgtgcatggtgcgtcgagctgtacgtacgtccgacctttgtagtagtggttgagaccagccgcgaatccccgacgcgtggcagccgagcgcggcccacgctggaccgcgaccctcacacgatgcatgcaccggcggatggatcgggcaggcaccacccccccgtgcggacgatgcggccggtggcgaaagcgagacatggccgccgcaagcagcccagccagcgcgccaccaccaaccactggatacacaaaaacacttcgcgcgcgcgcgcccggcacgccggcgtgggagacgttcgccgtaaggcgtaacccaggcggtgtcctccgatccggaccttcgattcgacgagcatttgccggatttctcccgtgatatttgcggtgtatacatgcatgtggcgtgtgctcggttcgatcgggagctagttggcgacttgcctaaccccgatcgcattcaaataaattgccgtcgctatcaccaaatgatgcgtgcccatccccaataatcccgagctaatcaagccgcggtcacctttccggaatcgaggtccaggcagtagcagttaagcgttgcctttttgaaaaactcgatgaagttacggccatgtacgcaacgataagcatcagttttcgtactccattcgttagttcggcgtacgaccactgataattttggagtcacatcagatcatcattttgcccgtgcaaaagcgagtaaatccaatccaaaatactcaagtatccaagggatggagtactatttatttttcctactcttcacatctcggtacagtaataaaatgagagtgggtcaagttgattagtagtactcctattttcctactatgaagtactatggtttaaaattctgactgtttgaagcgatacttgtctctggagttttggactgggcacaatttgacgttcgagcatttctttgctctgatttgatttttttccccttatgtatgcttgagttgattgaccaaatgaattacgatgtataggctcccaacaataccaaaaagacagattccttttcgcgtatttcgttgaacgttgattccatactctactatgcaacttgcatttatatacggacccattcgtgcatcgttcctattttattttttgaatatcaaacgcaccggatttgatatgttcttttcttcttcttttgagtacttgttagacaaaaccgaaagcacataataactccatatccgataatgtagaccgagcacagcctctgaattattggagggaaaaagaaaaagcagaaccttttgagttcagtttggtcatgggctaacctcgcatgaaattcagatacatctgctggcattttgcctggcggatgtatctgaattttgcctggcaggaacaggaagaaccaattgcattcggacatcccgtccggcaatctgaatctaaaatttgttcctcagttcaattatctatcttccccaggtgctactgctacatctgctggcatgaaagaaaaagctgtactactgtttgtgatttgtatgaggaattgaggtggtgtttggatccagggacttaactttagtctctatatttaaacactaattttgagtattaaatatagattacttacaaaactaattacataaataaaagctaatttgcgagacaatttttttagcctaattaatctataattagagaatgtttactgtagcatcacataggctaatcatggattaattaggctcaatagattcgtctcgcgaattagtccaagattatagatgtgttttattaatagtctacgtttaatatttataattagtgtccaaacatccgatgtgatagggactaaaagttttagtcccatctaaacaggttctaaggatacttccagggagctgcagagcaaataagaaaaagaatcaaacccaagaagattcccactatttgatattgatattccaattttcctgtttccctagctaagatttctgagctgtcattgatgtgcatgtcccttggtagaccaacaaatggagctgtcatgtcagcttaagaaactagctggagaaaataatatttggacagaatcataagttgttcatgtcatttggccttggccgcgacacgcacggttaaaatatagaggattgggttgcctttgtagctttctcagaagctgttgcatgagaatgctggggttcttttttcgccattgtaagctgaaaccaacaatttggttgcatcagataagtctttgcagtagttgggataacaagatatctcccaagatagtgatctctctttaaaataccatgtactgctaccatctctgtgacgaactcgtgttgtaaatctgcccgtacaattccgtttccatttagtaccaggatctcttcaattattttgtaggatttggtttgtcggtgtgagagacttgagctgagacaagtagagattttagtaatgtgctagtcatgtgtcatgaatggtcatcctgacatctttgcaatgatgcatcaaatattcaaacccgaagctctgctcagagctaagaatgttattttcagtacaccgaattcctgaaacattattattgtagtatacaagtatctgacgcaaggtgccttggattatcaaagatgaagtgatctaagaaacttaatatatagaccaccagaaacaaagtgatctaagaaagccgcgaggaaaggcaggattgtcttttgtgagaacaagcctctctcttattttcttttcttttgttttttcttgagaggatgaacaaagcatttcagctgagcaatatgtgaaccaaaacaatgctgcaatgctactcaatgatcaatattccaaagccattagcttctttcaggacaaaaaaaaaagaaaaaaaaagtgggcaccagatagcacctgcactgcactattcctaaacaaatccgccacagaatacttggggagaagttgaccaacgcatagcaacacaacaaaattaagcactactatttcgtatcatcatcatcatcatttttgcgttaattaatctccaagacgcggttgagaggagtagtggtcatgatcagaacagctagagcgtgtgaccgaaatgagggatacggatttgtgttatcttttggagaaagaaaagaagaaaacaaaagaaaaggcgcgcagatgcagccactcgtgtgacgcactttagttgttcgggaagcaacatccctgcttctcccctcgagcagttgttgagcagtagctgctgcttgtgtcacgaacaagacactccaaactaatccgagggagatagatggagatggagatggagatttgatattagctaggaatttttgtagtggtgggaggaggaaggtgacagtggaaagctgcccggcaactgaggcgaccggtctctcgctctgcagcatgcgatgcatgcacagtgcgtttaacaacaataatggaaatggtttatatctccggcctctgccattaagcacacaccgtagcacggtgcgtttaactgcaatcatagagagtggccatggctgtatgatctatgatctatcagacttttgatcgatcattgtagtttctactgatgaagagagctagtgcatgggaaatgtgatgcactgatgctgatgctttctgatcagttcttggacttgtggtgatggtggtggtagtctccatccatgatttggacaagttaaattgtgtgtgtgtgtgtgctgtaaagtaagtaaagcatgggtgcttcctgttcttcacctcgaggaaatgtggagaaagcaggctagctgctctgttcaggctgtgtttgtcttcgctgccatcgtagtcgtgtcgtttggctctctctttctgagaaattttcaggtcgcgcatcacttcagctgctcctgccgacttccatttccatttcagttttatggttcctgtacgggtacacatttaattgtcctaggagttgtatgatttgatggtgcagacaaatcctctcgtcggctggaatggatgcttctgaaaatggccatctcgattcttggataagcaagcaacttgtgctgtagagcactggtgtattggattctatcgttcagcctgttgcccagccgccatcgagaaggaccaggggtcacatccagccattatcgccagcagattattgtgtggctgtatcagacagcaacttggatctaaccaaaatacttccaaaccttttgacgagcgcctgcaagactatttttcaagcctcggctgcaacgagagaatttcacactgaacagttcgattatagagggagaacggcagaattgccgcgcgtttcgaacttagcccggttacttttggataacaaccagtacggctaacgatctcagaaacttcagtacctttggtgctcactgaagttgctggaagtctgaaacacatttaagaaaggttgatgctgtcttgtgctgaaacatacagtacatgtctcaaaatgatcggagagtatagttgggcctcatctgatttgtgcaagcacttgaattatcagccaatgctcttcttatgcaaggtagagaaggaaatcaagccttgtgttcgggagctcataatcattggcccatcccaggcctttccacgggtgggccaattattatgggcctccaagtgaggccttagagattaaaaaaggaataagttcaccaggcatccctcaactttacgtcaaggttgtttcacatccattatctcgaataccagaatttttcaccactaaactatacaaaactgtgcaattttggtcctatagcagtaggaatctttgatttcgctgatgtggcatcctagtcaacaaaaaaaaaagggccacatgtaagtgagaaggaaaaaaaatatgggttggcatctcatatttcttctcttttctcttctcttctcttcttttcttcagcagttcaacaagtttggggaggccaccgacgacagagggcggagcggcggcgagcgagcgcagcaacaagtgatagaggaggtagacatcgggtgggtcggtggtgggcgatgagcgttggagggggcatgaacggtggaggtggtcggaggaggaacagagcggagccgagcccgccaccgctttgcctgcctgctttgcccgccaccgctccacacccctcctcctccggctagggatgcaagcggggtgggcaaacgggttttttaccccgcttatctcacttctagtttagtttttcttctaaattttgtactaccatatgggaaatgacctaacaagcgggtttttatataggtagcgggactatccacttgcatccctacctccgggcaccttttgccgttgcaacattgaggttgtggcagtggggcttgggcgcattcgagtcggcggacctcgggcgccgggcacgggagaagcttgtccttggggatgcagagcaggtgctcaaggttgagcgcctcctccagcaagcagttcgcctcggcctcgatgaaccacaccccttccccgtgtgcagtatatctagggctccccgaggaccggctccgtgatgtgtcggcgacggggtagtagtggacgagcaccttggcgaaaccctcccacatggcaaagatcgatacggccttgtcctcgacgatttcagcgaatgcgaatggaaagacctggatgaagtcgacaaagacacggacggcggcggtcttgtcaatggaggatagtggaagggagccgcccggggtaggccctggctctatcgattaggaggaggaaggaaacaggggtagttgtcagttgagctcgcgtgcgtgtaatgccaccaccaacgtcgtgtagttgacggggagggttggtaacgcctcaactacacactgacatgtggggcccgatgtatgctaggatccttcaaaacttcaagtttatatgaaactcaagaaaggcgtttatgtaaaatttaaggtgtttatgcaaaggcagggtccgtcccaagtttaagtcaaaatttaagtgagcgaggtcggctggtatctctaacagtctctctatgtctatttggctagttagccaacaaaattaagtagttaaatttacctttcacttcaaaagcctctcctaattacacttttaatacgatggtgggtcctatatgttagcctctcttgttcccctacccttcttcttcacccttctctctcctcttcttttcctctttgtccccactttctttttccaatctccctcgatgttgctgtccctcgtctttttccttgtgccgttgctgcccaatacttcttccacccaaatagagctccccagtgttcggaccgacttctccactggctgaattcgaccttgagtggtggtcttggctgcctgtgatgagcggtgctcgtgaggggagtagcaacggctgcactcaagagctcttcttcggcagaggcaatgacgctcgcggcctacggcggcagctttgtctcacccatcgaatccttgacagttgcggtggcgcttgtgaacggagcagcgacaacaacaacatttgtgggaaggtttgccagcgcgcggcggggggggggggggagggtggagagagagagtggttgggccatggttgacaagtgattttggttggctaaatttggttaccaagtggaaggttggagaggctattagagcataatttttcgctataattgtcaaaatttgtggaaggttggagaggctattaaaacataatttgtcgctacaattgtcaaaatttgacttgagagattactggagcatgatttttcgatataattgtcaaaatttgacataggagactactggagatgctatgacagaatccgtagggtgtgttcgcatacactggttcccaacccggaatagtaacacggaaaatggagcagtctagtagcacgtgattaattaagtatttgctatttttttcaaaaatggattaatgtgatttttaagtaacttttgtatataatctttttacaaaaaatacaccgtttaatagtttaaaaagcgtgcacgcagaaaacgaggctgatgggttgggaaaaggggtgccgaacacacgcgtagaaatgctagagacgtcacggttgggcgtttccttccacgcgttcacagtgttcactggttcagtttagagtttgaaccaaaattttgtgcgatgcgaggccccacgtcgttgcagaatccagtatggaatgctatatgtccattgcgatttgtgtacgatccacgcactcgcattggcataccataccataccaaaggcaaggtcgcccgtagccacgtattactccctctgtccacgtcactagcggctcggccccgcgaaacgtcgcgcaccttcccaccgttccactccaccacgcgcccgtgcgccacacagccgcgtacgagccgttgtgtgagcggaccgccctcgcgcgcaggcgcgcgtcgcgaccagagcaggacggcgcagcggccgtgaaatgaaaaaataaacaaaacaaaacaccgggagcccagctacccgcaccaccggcacacgcgtaacgcatgtttggacttggtgctcgtcgtcgcagtcggtgtgcgccaccacgcgcggaggtgggggcgtggggctcgcgcacggcgcacctgccgcgcgcgtcgcggtacggcgctcgggcagagtggccccgtgtgcctgtggctctgctggagcctacacgggcggttcagccagcacgcaccgaactgccaaaacgtccccacaaaactgatggaactgaagcttgtagagaatatccggtgaacgattcgggcgcagaggtatctcacccatcgaaattcctcgtcagatgccgatccttttgctatttcgtagccaactttgctaatttgatcgattattaattagtaattgattaattctctttgcttagctgctaaagatatatgaagtggctcgcttgaagggaagggcgtactaaacacacgttatctcgtcttcttttcttgcacatatggacacgccaatgagtattgaatagtgcacttgcttttgtgtgaaatggtccaataaacctaagttgctcgtggcaccaatcgcctctctccttttccaattcaaagagataggctcgcactgttgcaattggaatgacgttggtccaagttgctctacaaaacatcggcgacattctacagtaacctgaatgtgactttggcacccattctatcaaacacaaaatacgctctaatgatttaacacaattggattactagttttttttttaaaaaaaactacatactagtttatgtgcttaccgttgacgataacaacacaacaccatataaaaggccactgatttaaggccacacattcttgttgaacgaaaaacacgttcctgtttctccaaagagaaccaaatgtggctaatgaaaatgcagacaagtcacaataaaaaacagaggctactatagaaccaaaataaacgctgttccgctattatccttgtaagcacaacagcgaaaaatgcctaaaataaaccagagaaccaaaagcaaaacgggcaaggaaacaaaaagaacagcttaggtttattttagcaaattagtaaacctaagctagggcaaggaaatagcgcgaaaaagaactaaaaaaatgccaaaaagaagagcacgaaaatgacaaaaagaaattagtaaaaacaaaaaaaaggggaacagaattggagaggaaacagcttccgtgccctagcttcccacccttccagcgagagaacagcgccgcatccatcctccaccgcctctcgtttatatttctgcgaggaaacgaagcgaagcgaagcgaaggcaaaaacatccgccgccgccgccgccgccgccgccgccagttcgtcgtcgtctcgtcccctttccttcctccatccctcgctcgcgagcatcgcacgcgctctccccatcctcacatggcagctctgcgactccacgcacaacccgaacccctcaagaacaacccctgcttctgcttctgctgcttctcctaccccgatcccgactccctctcccgtctcggcctcgccgccgcgcccatccgcgcccaccgcactagctcctgattcgagcccgagtcgagccgagctgaccctccccccgcgtcgcgtctcctcctccgtcttcttgcggccgcctcgcctgttcttgctgtggttggttcttgggatcaggttctctgattcttgctgcgcggcctctttcgccatggggaagagtgagttcctctcttcgagttggttgtttggtggtgttggtgttttttttttttctggttgtgtgatgattttttggtgatttcttcaggtaagaagagcaaggtccgtggcgttggcggcggggacgacctgatcgacagcagcgacgccgacagcgtgggctcgtcgtcgacggcgctgtcggatctatccatgtcgtacgctaccgagcacgtcggctcgcaggagttcgtcctcgacaagtacatcgatgctctctatgagaagaggtgaagtttctgtctcgccatctctagtttctactacccctgttgccatttcggtattgtgtgcgcggtaccttgatttaattcgcgtagaaattgtgtgatcggcttctttccgtaggctttgcttcgatgaatttgtttcttatgcaactatgctgtcagtatggattgttattggcgtggtatgatattaccttgtttgaaatacatgagggcttgacacctgctcttaattggctgagatatttgattccatagatagctttggataatatttataatccgtcaaattatacgttactatgaacttttggattttagtttgcaagttgttcttatagctataaattaatgggatggttggagtttttttgctggattactgaatagtagacttcttaatgttgttctgtttcatgtgtactaaaagcattgtgagttcaagttccctgtatactatacttgtacagttactatggcccattatgataaactaagctagacaaatttattgtgatgtgttgcatcaatttttcagagcaacgtttcgtgacatttttaaaaccaactgtgatttcattggaaacttttgtaactgcaagttaccgatagttgtgcctgacttgctggtttacttacaaccacattatgtctgatgatgcgaagtcctgattgtttactgatgagggctaaggagctctatcgtttgcattcttctcacccttgcatccttctgatcagtgatattgaacagtcttatctatattcaattaatggtcttcacaataattttacgatctatcattgcatgtcttattctacaaaagaggatatttgggggtagaagtacaacatttatggaacttgtcttttgattatctcttgccactttgtatgtgacaaggccaccctgtatcatgtattgtatttagggtgatacttttattttttcgttaattgttgagaacctttgatgttacatgatggtgccaccctatattatggcacaaggtccacaatgcttctgcttacgtcatagttgctttttttccctgaaaaaacttgcttagctccattgttgttgtgaatgttgaatcctgtttatcaaatatggatctgacaaataagtagcaccatcatgttggatgttgaaattatcaagcttgctcttttttattgtacttaatattttaccatttgtgttggtgcagggggtctaccagggaagccgcactctctcaactggttgatgcttttgaaagcttcattcttcatggtcttgtggagaacaagtaagctaatacttccaccagtcaatcttacagttgcatctagagataatagttacttagttgtcagcaatatggatattatatagtactagtgattattgtaaacatgaaagacttatatgacaatcaagtccaacctagtcagatgtcagactaacacacttctcagtgaagatggactatatattaattcattctgttccattgtgaggacgtgttactgactttattttttccctctttcgaagatatgccaccctgctgagtctgttcaacagttcgataaagaagggatctacaaaagaggcttgtttagcatcccgtgccattggtatgtgccctgtaacactaaatactcatttccgttcattgcagctattgtttactcaccctatctattgggtgttttttggacttgtaggtcttttagcccttacagttggtgctgggagcagctcacatgaaataatggaggagtcacatgcacaactttctagggtccttcaaacttggccagatgcttccaagatgatttcggtatgtcaagtattttttttttctttagctttcaaactttctttgcacttccattcaagtgaatctatattgaaatgttgtaggcacttgattgcttggctgtggtgacatttgttggtgctgctgatttagctgaaactgagttatctttgaaagctatgtgggatgtgattcatccaaaatcaggttcaaatgtatgtataggtctcgttgacttttaaaaataatataaagtatttggacaaaggcatattttttttaggacaaactacaatcaaatgtactttggaatttttgtaggtgggaattatccgtaaaccaaggccccctgtgttagcagctgctatatctgcctgggcatttcttcttacaactattggttcatggaggataaatgctgatagttggaaagagtaagtgatacatcccacccaactctgtgtgcttgtgatgtagtaagctattcatgttcgtgaaattatttactttcttttttcttcatttgctaggcctattgcatttctctctactcttcttggtgcggaggatcgtgctgttcgaatggctgcgggtgaagcattagctttgtgctttgagctaaatttgcttgacgtttcctttggagaagatgatgatgttgagaatggaggaactgttggttctaagagtaaacttttcctggatatgcaagctttgaaagccaaaatatcaagtcttgcctccaatctctcaatggaggcagggggtaaaggtgcagataagaaaaatcttactgaccaaagagatctgtttcaacggatcttggattttgttaaggtctgcctcattttttcatgtttatgtttgaatgtttggttccgtttatttgctgccaataatgttgatctttctttccttttcagtatggtgagtgccctgaagaatctgttaagatttcaggaaagcgtgacgttttaagggtgtcatcatggtctgaattgattcaggtgcttacctaaccactttctctactgaattcctgaatttctgcatttttttttgtccctgcctaattttttataatgctatagttgaacttcttgaggcggtttcttgggagaggcttcctcaagcatgtgcaggtactgttttccagagtgaagccatttttgtattgtactaatttatctggtatattaatgtgacaaaagttggttctgtttttgatgcaggagaatggacttcttcaagatgtgtttgacattaagactgacaaagctgaaactctgtcatccactgataaggtgagaaactgagattttagctcccaccaccaattgaaagcccataattgcaaagtgcttttgaactggtaacttgttacatgataaccaaaagtcaatggttggatatatatttaaaaaagaacttgggaagtatggtacataaaatgcagtaaaccatgattgatggtaatccgctttaggtttagggttttgacttgaagctaccaattcagagtaaacaaaactgcaaaagtgggcactctatccttagcagcatttgcttccctgaggacaaggggagaaatgtttttagcattttcatgcacacgagccttgactactcatcaaactgctgaatcagttagtcttcatcttcttaggcccctgcatggatagttattccttttcttgaaaatcaaggggagctgtgtgatttttatcaggtcattaaattgttcaaacatgcacgagcttgcttacacgatcttccatgagcagcccctgctcgtcttttttcaaagtttatcctgcttgttttcacgtttcactggatttgctaattccttttgcgtatttctcatatacttttggattgctgatcacaaacaatcgcaaaacacttgcagaaaatcttcaggtctggtgaagagaaaggaagagctctaaagttgaacaaggaccgccgtttagcccaggtgagctgacctgttgctttctgttaacactagttctgttctgtgtggtgtgtgacccactttgttaccttgtttttcttcagttttgcttaagacatgatcaaaacagggtttgtttagaaagtagcttatttaactgacatgaaaatggatgctaaaagcagtgtctttttgggtccttggaggaaatgagagggagaactatatcctagtgttaatcataaaaggtacgaagaggtatcaagaaatgtttttaaaaaaagaatatataaagagatacctgtacctcaagtaccataaacaaaatcctcaagcgcaaaattaaaatgcttatgtttcttactttaccagtgcaccacaagaacagtggtggtgttacgtgtgtctgactataatagtatatttgatcttctggacttcatttcaggagaggaagaatgccgttatgttggacttggacgagtagcctagtgaaactgcagccgttcgtcctcttctccgtttagctggacttatctgtaacgagtgtttggaagtcgcgatttgttatcacgacgctatgcaaagcaatactgcagaaatactactactatactagatccaaaccagttcgtgtttatcaactcagcagtgcctttacatgtaaaggtctaaaccagtttctgttgtccggtcgctcagagtgcctttacatgtggaaacaaacgtgctgaaatgaaatctgattcctattggggtctatttatgcatgtcgttgctcgtgtttcctgtgattcttaagtactctcttgctcgtgtttcctgtgattcttaagtactatctctccgtctcagaatataagaaatctagtcctgttgagatacgtagctgaactgctcgtgaacgttggccaccgggcaacagctgaactgtctcaactctcaactgcctaccgtcatatggtcggaccggcgcgcagcatgaggacgttggcctcgtgcgctgtgtaccttcacaggctggtcggcgcaggcccgtggatgtggaacctgatatgttttgtggcatggctgtgtgtaattcaatcttttttttcatacggaggaagtaacttctaatatcaccaagtcctttaatagttaaacccggtataaagtgtatcctaacttttaggaccggagcaaaccgagtcctttgacaatattgaggggtccttcgataatttttttttagaactcttcgataatattgagatgtggttctatcggtgttctcatttttagttttacttctagtactacgtaggtgttacatgaaacaaataccgtactatgttattaagccatgtagacatcacaatagttgaacccatctttaataatatcgaggaacttcggtgttaaaatttttgaacttttacggtaacaatgaatgtcatctctccactcagatactttataaaataaatgaaacataaatttctgagccttacagattatgcaaagacaattcatgtacataatgtggatcgatctatattgttataatttagatccatgtttcagcattgttataatttagatctacatttacaaaaattcatgttttacatacaacaatatcgatcaatctatcttagtattataatttagatccatgtgacaatatagtggtgtaaatgtttccttatgtctctgctaatgggaagaaaagacaaagttgcggagtgcaaatgtttctctttttctctaactagcaagaagttggaagtaaaacataatatttgatagttaccatagtctttaatgtattggctttaatggatggtgcagcaaaattgcttgggaattcactcaaacaagccatctgtttcttgttccctaaaaacaggatctaaaggctcattaccgattatctggcctgcagagtgcacagatcctaaagtggttcattcttgcaaaatgaggggaaaagggttattttaacaaaagaaaaactgtgcggatgttcagctataccagcgttgtgaaaacgaccgaaaatctcatgtgacgtccaaccccccaaaagttcccattgctgattgagcttctccttcaccatttagtcactcaatataacatcagtacagaacctgaaactgtcatgatgggaaaaattttaaccgaagagaagacggttacttggtttgcacattcacactagcttcagaaacttgagctggtgcaaactgattatggaatatcaaatatgcatgattatgacatgataatgctactggatgccaaagaaatcatcgattgatcattgatgcttacctaaaagggatttgtggaagataatcattgacagccctgtaaccttgatacccattgtaccattaaacacatcaatatgtcagctatttatgaatatgatcttaatggatcaaatataagatcacaactgacatgtccctcatgaaatgccaagtttctccacgactttgccagcaatctgaattagtccattctcggattctcctggattcatattcaatccctctgtttgagtcagggacctcacgaacaactgtcagaagtcatgctgctgtgaccgcagaaaaaaatattcaccaataattaccacatgaacattctccatccttgaaatgatgaaaccgcctgacatctctaacaacaatttcccgtccaaccgcctttgacatgaacatcattgcagtatgacagtcaccacatattctcaagttttttaaaacagtaactgtagctccaggaggcaactttagaagtccaaatccaactgccagcttctcactatgtgcaaataatatgtattccttttcatgaggctccatatcatgcaacacaaactttgtatcaggaacatatcccagctttctcatcctagcaccaatcacttcaaggaattggtagacttcctgtgcttctggatgttttgtatcaccaacaagaaacacatggattttacttcctacttctatccaactgcacccaggctccttcttgaccccacgatcacgcattagctttctaactcttgcagcatcgacccaacgtccagcagctgaatatgtgttagacagtaggatgtatgttccatcatgctgtggtatcatccgaaacagctggtcagctgcataagcaccaaattccatatctccattagtccgacagccagagagaatcgcctcccaaatggacggggtaggctcaaaaggcattgtcttgatcaaatctctagcttctccaattcttccagagcgaccaagtaaatctatcagccgtgcataatgatcttctccaggactaatgccaaagtccctcttcatggactcaaaataatggaagccttcatctaccaaaccagcatggttacatgctgtcaaaattgtgaggaaagaaattcggtcaggatctatgccttcagcaaccatctggtcaaatagctcaagtgcctctctaccgtgtccatgttgcccaagagctgaaatcatggcattccacgagacagagtctaaattgggcatcacaaggaacacaagacgagcatcgttcacagcgccacatttggcatacattgttagaagtgcatttccggcagaattgcttgcctcaaatccacactgtacaagatgtgcgtggagctgccttccatgcttcagcgctccaagttcaccacaggcagctattgcacccgcataggtgtagtcgcatggtttgacatcctcagctctcatctggttaaacagtttcagagcatcttctgaaagccctccgtggacatatcctgagaccatcaccatccatgacaaatcgtttttatatggcatcaccttaaatacctcaactgctttgtccaaacagccgctgtcaatgtatcccgacaaaatggtgttccaagaaacaacatccttcagattcatagtgtcaaatatcctcttcgcaatcacaatctttccacccttcgagtacaaagtcactaacgcattgttaacaggcaatgctgcctcaggaacgaaattcggctgtaaccgaataatctgaccatggactgacttcccatgcacaaagaatccagcatttgcacacgcactcaggacgctagtaaaagtgaactcatcaagcggaaccttttccgacaccatcctcctgaatagctcaaaggcgtctgcacacattcccgattggacataccctgagatcatcgcattccacacgacatcaaacttaccatcaacctcctcaaaaactgatctagcagcattgacatcgcctctcctgacatagccgacgaccatagtggtccatgtgaggtcatccttatccggcatttcgtcgagcaccttccgtgcgtcccaggaggcctcaggcgtgtcgcacttcatgtacagagcaatgagcgcattggacacagacaagacagccgccgcgccggacttgagcacggagcagtgcagctgcgtgcagtgtggcgcggcgaggttgtgcatctggccgacggcgctgatgagcgcggtgaaggagtaatcgtcggggcggagtgagccggagcccagcagggcgtggaacacggagaccgcgggcgcggcgagggacgccctcgcgaacgcggacatcatggcgttgtggagcacggtgtcgcggcgggcgggcgggacggcgtctaaaaagccgccggcgtcccggagccggccggcggcggcgtgcgcggcgactagggaggtggcggcgacggggcccgggtcggggtccgagcggaagagagccgcgggggtggcgaggtcgggggagagggtgtagaggtggattaggcggagggtgaggtgggggtgggacggggcgtggaggaggtcggcggtgagaaggcgggcgtggaggcagcggagggcgcggaggaaggaggaggaggggcaggtcggggccggcgagtggcgctcggcgaggcggcggaggaggagggagcattggtgggcgagggaggcgacggcggtcggcggcggccgccatggccgcatcgcgcgttggcgtggtggtcggggcaattcggagcgcgcgccgcgcggcccagtgttcaattgggcgtgggcctttggttgggttcaggcgtttggcgggttagcggatttctgaacattactttcaggtgttcaaatgtttctgagcatagcaatgttctatggagtattgaagagcaagaggaggcacctctagcagggtttacattaccggttgaccactaaatttcgagccacatcgatatcacggttttcgataaattttgatcggtttttgataaatttcgactgaatttcgaccaaatctaatgtttaaccttcgaaattctaatcgaaacttaattccaaaccgtgtcaaaacgtcgaaattttgcggaatttgaccggttttcatcggaattgtgaaccctgacctctagagcatttttttttggattacacggtagtacacaagcacatatgttattacacacaacactatacttacacgctcataaatatgtctttagcttaaaagatactacctactttctagaatgtagcaatctagaatgggatgacatgttctaggatgggtcttattcaattataggttaatacgttctgaaatggagggagtagaaaccagcgacacgtttccgacctgatatttaattatgtgttttactgtaccggctcttacgtatctatgacagagaatctcacaattcttctccatgccactttctctcctgtaactggaggtacactgaagatttctaatctactactacctactaacataatatgtttagcctaaacacgatcaccctagaatcagattggcagcgcaccgttgcatccactgcatctactgatctactacgtactaacataatatagtacactgccggtttgattacaaaggagtcactgacgatcaggtgtgacgtggcagcatccctcatccaatcccttcacttgcattgatcaaggactgcactacgaacaccctccaacatttagcttaggatagagatggttaacgttttttggacaagaagaatgtgaagtgatcgctaaaaaaacatgaatactagggaagaacctaatatcaaataattagaatgggtgaggcttcaaatccaggtcgtaatccaccatcttgtgaaactagtcggatgatccctgtgcgtttctctgaagtgattgttaccatgacacggtgttggcatcttttgttaatatcacgttgtggatgtcgaggataataaaaagaaacatcggcgtgaccgatcaatgcacaaaaattgggaaaacatagcgttgattcgcggtgatcgtgtaagcaacgagtggaaacggccctaatgtggttgactcccagttttccatgctgagagtcaattttcccaataatcaccgttttctaaccacctctgaacttccttccaacctcgaaaacctgatgcaacaaagcttgctaaaaggtggggttctttgttgaaattcgttattataggaccatgtttggtttatgattaactaatgtcacagactcacatacagccttaattagttatgttttggcacaaagtgaccaatggaatggtttccacaagttcggaaccacatggctaaggaagtcaaaatagggtcaatgaaccaaataactaaccacctaaaagtgtcaagccacatcataaagaaacatgtgcaattgtcaactttggcattttaatctcgatcggcgtgtcagagcatgtcactggttttatgtcctcctacatgctccaagtcccaaaccgtgatccaacaaagtacagctttataaattgtaagctgaaccgttttaagcaaggaatcgatgccaaagaagcaggatcaaaccctaccaaagaatgtgactttaaaagagtggtacttctgtcaccactaaaccatgtcgtcgaatgcactccatcaatccatatgtagccatgattgatgcccacaggatggaatgtatgtaaaggcaacgcctaaagatgataattatcgcctgaagatcgatcgatcgatcgatctcgctaattaacgggccatctgcccgttattacataccaaatggtactcagatcacactgatctgaccaacacactagctgtcagtctgtcacccgttacaagtgaattattgagctccaggctagtcagaccaacggattctggctagcacaaagaacaaatcttcagcgattccggcggcagcagcagcgagaacctgacgaaacggtcgccatctcccaaccgcaaccatcgcgcgggccgggcatgcgcactcggcgtctgcgtcggcgacgcagctgagctagctgtggacgacaggcatgtggaaatatggaataaaccaaacgacgtatttacaaatgaaaagtaatttgtaaataaaactttcatatacgtgctaataacaaactaaaggaggagtccctccagttgtggtggaccgtcctatcgagccttgagctcctacattgcttcctctctgacgatgtttccttccacgagtggcactgctcttgccaactcaacgttccgcaggagcatcgttatggattcgacacggtcgtgacccttggtgcgcgttccatttggaaggaacggaacaatcgtgtgttcaataactgttctctgccctggtccgatgtggtaataggcatggcgcaagaggccgccctttggtatcttgcccatcccctgtcgccaacactgccttcctagcgtattaggtcttttagtcgtcccattgtaatcgcaagaataggtttaagttctcgtttttctctttttcctccttttattcccaacccctcctcccccaccccttctttttttttcgtcatctgtgtaaattttattcctctgtgtaatccttttacgtattccaaaaagagcaaactaaagcagaatgctaaaaaataaattttgatgaaaaaaatttctaaaatcagctacaaatttaaggttgaaaatttaaaatttggttgataaacataatgaagccggacgcttcagtgtgcgcgctgagacagctagaggatagaaacaaccaagcagcaaagctaccttcctaccgcacactagctacctttgaggcataggtcgcctctcgcctttcagaattttcagggcctcatgattctgccatggatgtaacagcgagacgtcgatcccgatcgatcgacggtgtaacttccgatcaaatctcagcagcacgcattccgttctcgagtagtaggatccgcgagcacggcgacaacggacggacggaagcttgcgttcttgatttccttggcgccattatccttgcttgattagtgagcgtacgtgcgagattagttgcattgcacaatcgcgcatatgcaacgggtgaagcgacaaaaaaaaatctgcgtgtcaaaagcggaatgaattgatcctgaaaagtttcaggttcacacgtgaatcatgaacggcttggccattttcgtatcccactggattgcatgctggcactcgcgcgctcgtccatcacaacgtcagatagcacgctgcatatgctgtccattttctagtacgctggccgctgggccgtcgtcgtactgaagagcgagcacggtagctgatgcttactcgtagacttacctccgtcacattataagtgcagccgtggtttttcgcacccaactttaaccgtccgtcttatttgaaaaaattttgaaaaaaatttaaaaacataagttacgagtaaagtactattcatgttttatcatctcataacaataaaaatacaaattataaaaaatttttaaataagacgaacgattaaagttggatgcggaaacttatggttgcgcttataatgagacggagtgagtacacgccaaggccagcagagaacgtactgtccgtccgtttctcatgccacagtcgcggttccagtcaaagttttttctcgtcacggcgtctgaaatcttctctctgtgtgtcccctatctccggcacggtttatgtcacaattttcatgccagcttgacaatgttggcgatgcgccgatgccacgtttgtgccaaggcccattgtccccaccagagttttccaaaccgccgataatcgcgcagttatagggtactaaggactcgtacaacggtttttattagtggtctttctatttctatacaagtaaatttaataacatagaaaaaagaaaaaagagtatggttgttgtaacaccctaaaaattcgacgacaaaatctaaactctaaaaatacggatcttcaaaaactttttaaataaagttgcatcatgccaattttgttcgattattttattgaattttgatttcggagtttataaatcgcgaataatggataattagttaggaataaaccctgaaaagtaaattgactaagtaaataattaaagtacaatttaaaataatatttagtgaggatagaaatgagtaaaatattattacgactatatttgtatcaattaaattgaaaagtgtcggaataagaattaactctaattaaattcaagaaaattatataaaaataaaatatgggtaaaattaatcaaggatggacccattggatggaataacacaaatattgagtgaacttcatttgtacaaaaattaaggtttatagaatcaattttaaataaataaataggcttaaatcgggtaaatagaaaacggcactattcatcggccgccaggtgttcgacgaggtcccctagcctaaccctgccccgctgccgcgccgacgccgcgcccgcgccccacgcctcgcgccgcgcaccgccgctaccgctgtcgccgtcgccgctcgcccgtcacatcgccttgcaccccgtgtcgccgctgccacgctgtcaccgtcgccgtcgcgacccgcctcgcgccgcgcgccaccgctgccgccctgtcaccacccgtcccgtcacgcgcgtgtcccatcgcccgccgctgcgccgcgcaccgtcgccgtcgccacgtgccattgccgtcgccgcctcgagccctacaccgccgtcgccatcgccgtcacgccgcgccgtcccatcgccgcgcgcgtcccgtcgccgcgcgcgtcccatcgccgcctcgtgccccgcgctgccgcgccgccgtcgctcaccctccttcaccgccccctctctctcctctctctcacaccctataaaaccccccagcccttcttttctcccccacacccattcccctccatcacctccctttttaccgcgccgccgccgtagtgccgccgcaccgccgccttcgtgctgccgcgccgccgttcccgtgccgccgcgccgccgttcccgtgcccccgcaccgccgttctcgtgccgccactcccgcgccgccgtgcgccaccgtcgctgccgccgtcgtcgccgctgctgccgccggtgagccgccctccgttcccctcgcgtccaccgccgccaccgctcgggtgggagagagagccgagagagagagggagaggaaaagagaggctggcagagagagagagggagaggaaaagagaggccggcagagagagagaaaaagaaagagaggaaaagaaaaagagacaaaaaaaggaaattagagggagattagggaagtttagaaaatttaaaataattggaattttataggttaattatagtcatagaattgcaaaatttaatataaattatggattattcttggcaatttctataagaaatcaattcgcggtaataatttagatgtagttaataactaaacaaatagatgaattcttatggattattatagattatttttttgggtaatccctataagtaatcaattcacggtagaaattcggatttaattcctagggattttagccgtgtattatatttaatcatctagtcatagactaaattaaatcatataatatttctaggatttcgtccgatatttagctcgcgatagaaatctctaacctattatatggatataatgctcgggtagattaaattaaaaacttatgacaacaaaacatttatacccgcaaaatagtttgaatcgaaattgggtttgccttagttcgcgaataataaagttaaaataaaggaatcgactttcgcattcgactttcatttggatttatttggattttgtttgaattctaatcgaattcaaattgttctttcgcacataattatagagaccgagggagccgcggatccgggtgaaggccaagacccgcaagaccttgagcaaggcaagtcatcactattccttgaacatgttgatcccaattgcgaagttgttttgtttacaaataaaattgcatgcaattatgaatatcctacttgtaattatgccatgccttgattattgtttaccccttattccttcgtaaccatgtttacgtatgagtctctagtcaattatgacaattgcttagaaatgctattctagaatcatgcatactcatatttatcaaatgctatatgcttgggcaattacctttgggaaggtaattgagatgcggcatgtggagacatgagcgccacattgccatgatattgatgacatgatttgtgaaaggaaaaaaaagttaaacaactgttttcgactggggcggctggaggatttgggtggtgtccggaaaaggctagtgccgtccctggtcaattaaggaacgagccatgaagttaagcatgaaacgaccccccgtacaaccgcacttctcgtatgggtatagacctagcggagtggatagctgagcggaggcagtatccatgcgtagtggtcttcttttagctgtgtgatgtggcagcagtctgctggcagatgcccggttcggatggccaggtgaatggcggatgcctattccggatggtcagaggctggcttggcaatactacatgaggatacccataagagaacaatcatgatggactgggttcaacgacaagaagcaacgtaggagtgtgtgtttttcccttcccgggagcgccagaactcctctcactgctagaaacgtatgacgcctagagtgcatgaggatgtaaagttcatggagcgggtactgccaatgcgaggttatcgaaaagctttgccgtgacgcgtctcatgtgttgggatgaggctcatgtgttgggcagtcgcggagtgcgggtaaagtgtacatccactacagtgtgagtaaaccaaatctattcgaatagccgtgctcgcggttaatgagcactgggacatgtattacacttggctagactctaaattctttaacttgagtgggatggaatattgcatgataatttttatgctgatggagccacttcctgagaggcgggaatgtggacgtcctcagaaaatcataacgactctatggcgggaagctatccttgggatcacaatggatggtggacagaaccgtcattgtttaatatgaacaatggtattaaaacttgattagtctttgctaggtcttaggcttgtgaaaagaattataaaacttgctttgcgcaaatgaaccatagccatcctttgaaatcctctgtcatgtgcatcattgctgtggtggcttgctgagtacggttggtactcacccttgcaaatataaaatttatcagaagcgggagatgaagcttcggaggatccctatgcctactaccaggagggagatgaagacgaaggcgcccaataggtcttagtacggtcgttgcctgtggcaatggcatgccgctgcttaaattctgctgccttacctatttctgcttttggatgtattccggaccgcttggtccgatgatttaagactatgcctgcaggcttatgatgtaataattcgtactagacattcgtgtatgtgtatttggtatttcagctatgaattcgtgtgtaccagactacttgatccagggaaatggtactgtttacacgattgattcctgttataaaaacgggggtccacagttgttatgcatgataacggctcagagtcgactcttagtatttatttgagcaaattttgttgcatggtagtgaaagaaaggaaagaagagtaagaaaaaatatttttgatacattaatgattagagatcatattgtctctatctgctgtagaatgctactctctagataacgtagagcttatatctgactctatctttatacatgtcctaaaagaaaccgcaataacctccttaaatttaactaaatttaaaaattaatttaaaattttgataaattttatacgatttgtcatggttactatgggtaccgcttatcgtcgggacacgataatcccggtccggtggtctgagaaacgctggtcccgcaactcgcgatttgacgatttgtcttgcacagatcaccggctacaattcgcgagctccatcaatcccatacctgtgcaagctacctgccactgtacagactccatacatgttacttctactactagtactagatgctacaccgtgtagcagcgcactgtttcgccgctatgtagagtgaaacggccactccgctttcaggccgcacgtaacatcgcgcggaactcgccacgtcagccggaacccactgatgacacgcacgcaccaacagtgtgtcaccgcagacgacaagaccgtcgcgcaggggacactcccacatctcacgtcgtctcagccccccaaagcatccgctaccttcactgacatatgggacccacctttggtggggtagctggtgccagcggaaggggggaagcaccggcgccagcgtggccgcttcttccccactgggcctccgcgtttggttgtttctggagcccctggaattcctcttcatttattattgttcccccctgaagctgacgtctggggcccacctggggatgtggcccacgtctcattgggtaggtgctgatggccaggcgtttcgcgtgtttttgtgaccgcgccccggttcaacacgccgaagtggcggcttgcggttagtcgctggctggtggggcatgcgagatacccgggcccacgtgtcggtgagaggaggatttctggaagagaggagcgcttcgcttcgcgtgggggggggggggggggggcaaacgctcgcatttgccactcctggcgaggcaaagcctctccaactttctcctaacgaaaaccacgccacgagaaggaagtgagccaacgacgctggaattttttgaaaatttcagagaaaatttaccggaggagttcgaatttctttcgggtatgaggaggagagttgcactgagcacggcgattgcgttgttagtgggtgctcaattatgtgtggcggcggaggtggaggtcgccggcgccggcggtggggttgtgcggcggcggtcgctccaccagccgttcttcccaatcgagtggtcgccgccgccgccgatgtccgggagcgaggccgtcccgccgccgccgcctgcggccgcggcgtcggccaccaccggcggggggcggtcgacgaccaccgtcatgaacaccgtcgccatcgcgctctcggcgggcctcgtggcgctcgcggtggcgtcctactcctgctgcctcctgctgcggcgacgacgacgcgaggaggaggacgacggcgaccgcgccgcgaagcgggcggtgggggcggcattttctgtggcggcgagagtccctagcgatgtcgggagcagcttccgccagcaccggtcgccgtcgccgagcttgacggcgtcggacgcgatatacctcgacccgcttacgacgctggtggaggtgcgccagcacgaaaagagcccggaccttcgcccgctaccgctgctgaagcagccgagccctgacctccggccggtgccgccgctgaagcggccggaatcgcaacccccgactacgacaccgttcacttcgccgttgaccaccacggggtattccaccgacgaggaggaccatgccacgtactacaccgggccgaaaaccgacatggcctcgttcagccggagcacgagccaggacagtacgctggaacaaacagtcatgtcgtccatggacgcgcctgcacccgtcgaaactaataccccacgacctgttagttcagcaccgccgtcgttccctcgaggtaaatgctgatccggccgctcccggcagaattgccggccgtccgccggcttgccaatcttggaactaaccggatcctcctttaaacccgctgctgaag

SEQ ID NO: 5912 - DNA, 84970 bp, Oryza sativa
  unsure (1)..(84970): unsure at all n locations
aggcacgtaaattcaactactatggtagccagtggtgactagcttgtcctcatcggcttggtactaacaaaagataggagttgatgaggatgagggactctctgactagatcacattcgatgtactcctacagttgatgcaaattttggatttttccctatcaatcttctgacttgctaagttgtgattaatgtgaatgctctattgctatctactttctagaatgaaaggagtgcctttcgttcaattcaaagtcacggagacagaaaattcgaaggtcaacaaatcagtcgagtgccaccatcatgtagcagaacacccgttcgatcaggacctcccgtcgtctctcccatttgggtcattggcattcatttcaacccctgctcaagttggtccttcaaactaatctgattaatccttcctcacacccaatgttaaagcatcccatcacatgattccacgtctcctcttcttgtcttacacttccaagatggcactctcaacttccctcctacgtaggcctccgcccactccctcagtcttaaaagtatgccacagtttcgtccctacaatcttctcaccaagggcacattgtaatgcatttgacatgatctgccccgtctaccatgtttcatgtatcaggtatgtgctacatgcaagcacataaataataagtatacttatttgcaataagctacatagcctcattttatacaaaatgagctaatatgattagtatagatgaaattgtctaagttttttttttctattcactggtggctttttcttcactttggcacttgaaccacaatatcaactatttcctgtgggactgtgaggctgtgactacgttatatccaccaaaatgatgcagaccacgttcaacatcacatattccaccatccagaacacggtatgttgttgaacaaagttaaaaaaggggcacttagtagtaacttgtaatgcatgaattgacaaaattataaggatgcaagaatcaaagcaaccaactgggtagatataaaaaaaatgcatcaacacagtaaaatggaagatacgtagggaggtgtacagaccttcaaaagaggtgtatggcgtttcctaacctgcaggaaatagacattatgtgagtaaagagttctaatttcttaagaaatttaggaggtggattccaacaaatataaaggctcgtggtatgccaatgaatactgcaccatagccccccaaaagcattcctactgtcgagaacatattttatacgcaaataatatacgagttacaaattgtttgaaaaagctctagtttgccacagaaataaaatcaaagttccatgtgtcctaactaaaattacaagtacaacaaaaatcgggaacaacagatttactccttgagttatacgaaggatttttagagattttatttttcaaaattgaaacatcgacaagtgattctgaagacaaagatttaaggcaaataacattaaatcatatggcacattggatgcaaggcaatctgaaaataaaagaccatgcacccataaatggaccaaatttccttcagaaacctgaccatcagaattcagaacactataaaagaacattccttactttaacctctaaattgtaaagaattaagaatcaaatgatcctatacattcaagagagaatatgcaattaaatcctgctccaatatatcctaatatttcagaaataagtatagccttattttttaaacctgatgttaagtatcaggaatggatagacagatagtaagaactcaccacataatcccatccatgcttttcagcaaatgcctttgctgaatctgcactgtcaaacgtaagccctgcttcaccaacattagcatatggatctccagtagatgtccatcccattaatgggttctcccacctattattcacacaaatgttagaaggggaaaaagcggcagcaactgaaatagtaatatctaattgtatgctagaatgctatataataaggaggtgatacataaagctaaatgaagtaaatgcatgagacataaaagaaatgaaatagactaagtacacactgtttgaccaaaccaaggtgaccacctcaatgagaggtcaaatgcatcagttgcaaggctttcattgtacaaaaaaaagggggggtaatctcacgttaaaggaaaaaaagaaacagacttcaatcgtcaatgaattcttctgttatgaatgtaaatcaagttttaatatgagactatttgttttcatttgatatattattgaggcagttcaccaaacagcaacacagggtttgaggtaaataattcatgaaaatgaatcaacaataaccaataaaacaaaactggaaacatacttttgggttgacacaaagttgattttccacctcccgactttgcctgaaccctgctgagatgcagtcctagcgggtgaatatattacaacctgcaaatacacaaggataagttgatcatgtcttcccagctaggtagttgaaaagcatacagtgagtcttaaaagaacaaaagtggcagcaacaaaaatcatattttctttacagtataaatatttaaacctatctgaataacacaatcctgtcgtaggccatttagaaggccgtttactgtataaacactaaaaggtgggggagaccacttgttaacagtctaatgatctacaagaacatagatcacaatcaaaatattttctagggctcactctgtataataaatctgcaaaaacataagatctattgatgtgtaggcatcctctctctgcagacaaacataaggttgataataccatgaaaaatgtgactgaagtggtgctatcagcattgggccatatcataagatgcttctaagctctttgaagttaagacggatctttgaaacaacagaagaattgatcatcaaacaatattcgtattaacgagattatgttgtagagaaaactatttcatggaagctctgttcctcagaagtcagaacaagaaactaccactctacaagtaggcctctacatggattttgaggtaattacaagaactatgaaatggtatgaaacagacattagttcatagtccaacaagttatctaaattcaatagctaagcattgctagcaatttcatctttctttgtatgcagttagttctatcaaatgtatttttaagtttgatgtacaccaagaaaatggataaataataagcatcctagcatcatctaaactctggtatgtacagttctctaacaccaatactgtcaactctaatcacaaacaatttgaaaggtaagaacatacacctatatacattcagtcattcacagtacataaaccaaatcaggataatttgatcaaactctgttgcctccagccctccactaacataatctaaagtgggagaacccaacctggagagcagcacattcctcccaagttctaaacgcagttcaaaccacacaagcgtaaaacatcatcaccaaattcgcatttctatccactccacgattcgaacgtctactagcgatagcactgtagtccgtacgacgagttcacgacccgacgcctccaggctctatgcctctatccctaaacacgagtaacgaccaaaacaacccaccaaacctggacatctcgagcgattcccacacggatccgcgagggctagccaatctatcgccactacataaatcagaggtaaggtcagcgaagcaccgcaccttgcggcggaggtgctcctcggggatgccggagaccatgccgatctcgcctggcttgatctcgacgagggcgtcggacgccgccgcggagagcatccgcgcgggcgcgggggacggcgagaggagcgtgcgccccagggaggggaggctccgccggagcggggcggccatctcgtcggagccgtacgccggtgaggcggatggtggaggagagaaggggcggacgagaaggccgaaggggaaacaccgagagagagagagagagagcacttcagaacttgggagaagagacggctggaccgaggatatgttggaagcagctcatgttgggccaatcttctcggcccagtgttgtgggatccgattggtttatgggccgggccttgcggcccagactggtgcgaattcgatttgtttctgtgtgctgggcccagttatggtccagtgggtgatctgcagccttggagttgaaggcccataccgaggttagactagctcgttgggttttggtccagatgaaccactgacttatctgggccggcaatgttatattgggctgcctctggaataattcttgatggcccttttgataatttatagaattcatttttcagttccgttatttcaactacaccgtgatgaagttcatcaagagcataatcacccataataagtgtattcagataatttaatacaccatttggtcgtgaatatttgatggttaggccggacaatatttggatggcaaattttactacaaaacatctaaatttcgtgtaatttgctgatagacatcgaaaaaacattcacaaatgaaagacatctaaaaatactagtaatttgttagagaacaatatcgactcaattaaaaagataaattcttgagaaagacaagaatgcccctagaatcacatgcttcaaacataacgttaaagtacgaatttagaaattatgcaactccaaatttagcatcaccccaagtacatcactagtatacgtgatattttatcttcaccctagtctcagttcaaaatcttttgaccgtgggggcatccttgtcttttttaagaacttttcttttcaattgagccgaaagtgtcatttagcaaattatcagttttttaagagtgtctttcagccgtgacacgtttttatgatttctatcaacaaacacaaattttgagtgtcctatagttaactttacctatttggatcttacttttgaaactttaactatcaatagtctttgaaatgcttagtttaaaaacaaaagacttggtagtatcaatgttttatgcccataatatagactaattaaattttataaacttaatactaattggccgaaacttgttttaaacgttaactatctagaaaacgagggagtaagtcttttgtatttcgcctaagaatgaaaagtgattaacattgtgtaggaggacaaatacgtatgatctatgatcacatgaagttctgaaaaaaaaaagatcacatgaaaatgcaagattacatctctaaatcattttcaatatcgatgccaaagaaatccacaaataagtccacctgaatatagtataaatacaaacgatattcctatcttggatctttttcctagttctagaacagtacattttatttaacaagcaatagctgacgtgtaacactcttataaggtcacgttaatccactattttttcccacgatcatagaggaaatcatgcacaaccctaaaactctcaatccctgtcctcattcatatacagtaagatttttttttccagagagtacaaaatgcaggggagagagggatgcgggcacgggtgatgatgccgaactggccgaggccgccgatcaaggacggcgaagaagaggtcggggtcggcggagggaagaagagggagaaccgagagaggagagagaatgacatgtgaggcccacgtgggccccactattttaaaaatatttttgtgtgtagctcacatgtgggaaacgatttttattattttccgagatataattgccaggtaagcgctacgtcaatgtcatgtgggatggagacctagtcaaaccagccacgttaggcccacgtcagccaaaaccgccttccaaaccactgagagacctcatttgcaccggttttgacagtttaaggactggttgtatctggttttagggttcaagaacgaaaaacggaatcggtgtaaaattaagagacctcagataaacttattccttcgataaattatagacttcatttttcagttccgttatatcaactaccctgtgatgaagttcatcaagagcataaccacccataataagtgtattcagataatttaatacaccatttggtattgaatatttgatgtttaggaaaatatttggatcttattttgaaactttaactatcaatagtttcgcatgcttagtttaaaaacaaaagaattagaagtataagtgtattctgcttataatatagactaattaaattttataaacttatactagttgatcgaaacttgttttaaacgttaaatatctacaaaacgagggagtaaatctctagtatttcgcctaaaaatgaaaggtgattaacattgtgtaggacaaatacgtatgactatgatcacatgaaaatgcaatatgacatctctaaatcactttcaacattgatgccaacgaaatccacaaataagtccacctgaatacagtaataaatacaaacggtattcctatcttggatctttttcctagttctagaacagtgcattttatttaacaagcaacagctgacgtgtaacactcttctaaggtcacgttaatccactatttatttttccacgatcatcgaggaaatcatgcacaaccctaaaatctcaatccctgtcctcattcatatccagtaagattttttccagaaagtacaaaatgtggattttaatgtacgtgctcacgtagaaaaatacataaaagtcttctttgtttgcgttctattagaaaaacattacgataacgacttttttttattggatagttgcggtgcattatgacattctgctatgaaagcatggtcgtaatgatagtcatggatgagcaagtgacagcaacatcctgcgttaattttctgcacgcatggttagacacaatccatccagaaggtttgaaattaatcgagagcttaattagattcacatgttaatttaactggcgtggcagcttatccttgtcaggcgccggccggcggctaactcagtaatactgatgattaatcaattttcaagtcgtacataaatttcttttttaaaaaaaaaaacagagttcaagccgtatatagctgacgcaactgtctgttgattcgtcagtgaattggttaataaaataatatagtacttagctgatctttggctgattttttttacaataaattttgaagagatttatcatactccgtaaactgtgtgaattgtggtgatgttgaatgataatcaattgttttcagccaggtaacgatgatcaattgtgacattgctagtgaagtactatactatataataactgtctcgctgatgtcagtgatgaacttgataagaattagcaggagtaactaactaactagtaggaattggcgatgaattaacttgattgtactgtacgtgaggtacgtgatgcacgtcgtcatatctatctgccgtgttcttgaccacttccgtcgaacattcttcttcagataaagcagatagagatactagaatgccacaggtctttagcccgttgagtcaagcaaattaaatgattacgaactaacgtagtaattaactgcacccaaaaacaagatcagctcccctgccattaactaaaactggttaaactaattacagtaggctaccggattgatttcaaatattatggctgttcttcttcaggttaaaatttacatagttagtttttcaaaaaagaaataatagacatttataatttaagtttgacttatacctgcactcgaaactttgactcgttttcagatgaattaatcacgcagccttttgagttttgatccattcaactgttcaaggttatctgcgcggcgcgagcgataagggctttcagaattcagagtccacgccttgcccagcaatcaaatattaccgcgggccagaagctctcacgctcgcgagaaatcaacgctgcaaaacgcgatgacatcatgatctggcagaaaaatgcaggcaatcatcatctccaaaaccacgaaacgagagaaaccgatgacgtcgaaaaaccaatctcagcgccgttagctcgtgaaaccaacgtgattacccgaaacctgcagcaaaaaaatcgtgctgcagaaacgttgttttctcttttttttttcaagaaaaggaataatagatgcaggaactgtaatgatccgatcccatttgatatggtcaaccaattaaccagcatcttagagctaatctgatccgagctgcacataatcagatcgattctgtgctcgagctgagctcgatatacaatccggcgcagatcgtgagctcgaaccgagctcgatcgacgggtaactgtcattgtcggtagctagcttgatgcagaatcacaagagtaaattaatagtaagattttagttatcatcacatactaaaaagctagtaccggccaaattgctctcggcagattcctctgcattttgttactcgcacaactccaccgggtcaatcgtggcaagcaaggcacgaaattaattttcttttacaaaactgaacagtagtatctttctgaacgaaattgaatacatatttctttcagacatccatacttgaccaagcacacgcataggcaggcagcaatcacgcgccaacatctgaagatcaagtctttgctccagaaagaaaaacacacaaaaaaaataataataacacgtactagaagaagagcaggtcgtcgcggagacccaagaaataaacgagtcgggacagaaacagaggcgatcgcgttgcgttgcgttgcgttggcaaatcctctttaaaaggctcgtgcccgtggcgccagaaatcgttgatccgcacacggtaatatgcaagagatgttgttctgcggcacgggcagtttcaaggacgtcgacggcaaggcggcggcgccggaggcgaagaagaagaagcagggcggcggtggtggtggtgggaagaaggagaacccgtacgcgtcgagggggctcgacaagttctccaccgtgctgtccgagctcgagtcgcggcgggagaagatccttcgccaagtcggcggcgccggcggcggcggcgcaccgggggagggcggcggcggtggtggtggtgagcatgtgctcgtccggttcgtgcagtcggaggggaaagggtgggtgcccatcgtcgtcaagctcccgcctgaggaggaggagcagcagcagcggaagggagggaagaacaagcggaagcagcaggcggccgcgacgtcggcgacctcgtcgcagtcgtccacgccaccgacgtcggagcccgccagccccagggaggacgtgatcaagcccgcgcgccccgccgccgccgcggcggcggcggagccggggagtgcgaagcggaaggccggcgtgaggtggtcgtggtcggacgtgcggccgcgccactacatgccgttcgtggcggtgctgctgctggcgagcctcgtggtgttcggcaaggtgttcgccatctgctgcacctccgtctggtggtacctcgtgccgatcctgacggccagctctaatggcgccggcggcgccggcggggcgcacggcgtgaggagatcgaaggccgccgtcaaggttctcggcaagaaggcgagcgacaagaagatggccgtgacgccattgctgggtccttcgcacggcaagaggggtagctccggtgtccatgagttgatctcgccgagaagtcatccacatgggaagaaagggtagtaattcgcgtggattcattcaccacacgctgtgaaaaaatcaacgccgtgtttgtaaatgtttgtacagtagggtggccaggaagatcagattttttttgttatctttcctaccgtttcgattcagtttggttgcaattgcatccagtgttcatgtagcatcagcccccttcttgtgtggctacccaaaattgttcataaattttacagaattttgtccattaactcgtccctggtgtactggcagtttattttcatctctatgtatgttaactatgccttcgacttctggatctctggttgatttgagagagcgccattcgtttatacgttgtggaaacatgttttttttttttggctctatccgttgaccttgtttttaggtacaatcatcagtaaagaacttctagattcaggcatgtgattgtgtagccacgcatatcacaatgaatagaaagtcaagcatgtttacttctagaagttagagaacttacttgtttgacaatccagaagaaaatgcaattgtacctgcctcgtcaatgtcaattcacattatctgacttttaaccaatacaaacagttatgcttagaatttgcaggcttaggctgatcttagccattgcaatttctcattcagcaaaattgtgagtttgtgattgaacaatgaatgagcatacattgagatgccaacagtgcaaattcttttacaaatcacaagcaagactgtgttgtgatgatctctgggaatcaaccaggacataggctaatagtaataactacgcaatacctaattcagaaagactttactgttagactaatgatgaaacaacagaatgatacagtacaatcattttccctgtccttggaaccaagtaatcccaccatcatgccatgccctatatccatcaatcctgaatcataagggaaataatagatgttagaaaatgttacaaagagaatggtaaaaatgaagtaagcaatacagcattcgggccaagaggaacaaatatatacaattatcaatacagccacaggcaaatcatccatgataactaaatgggatgcggttgatattgcattctatgctcccagccgttcagcactattaaacccccggcaagatgaaaatatgcatcaggatgcacccaatgaagatgaatgcacatcacatcacaaatacttatattagaaagatttgatatgttgtcctaccctaaatctctttctatgatctgactcaattcgcgatgtgtaatgtttcttccttccatgagccgatgaatttctctcttctaaattgctgcgaacaggctcgtattgtgcattgcggaagaaaccttcatgatcccaagttacttcatagtctaccttcaaccgtgatccttccttcaaacagaatagatgagtcagcttccattatgttttctaaaacataaaacataaatgataacaagacattaattgaggctgttctggcatatatagtatacatatgtggatttatccatgtgtaacaaatttatgcagcttaaacttaagttgtggtgccaaggtagtgaatatgagatagtatatatcagtcatcactcatcagagctgtatgtggaaggaaagcaacaaatcctaccaacaattgtggtcctcaatcctcatagaagctgatgcacttctaataatttctaatacctgtaagtatctaataccttagtaattttgtagtcctcttgtctagctaatttagtaatgatctctctagttagtaaacactaatgtggtcactttgctttcaataaacatagccatttatctgaccatggaatgtttatcggcagggttcaccaaacaaggaagcaaccagataaccataagctaacgcatgaaggtactgcctggcactctaaaagtgggttcaacccaacccaacccatcccatcccttgaaacaaacacacgctgatagagggtgatggttaacttcagtggaagatagtgatgtgatatcctgctaactttattggaagactcagaacgcttggatgtatttgaaaaggccaacaggacaaaatatataggatacaagaaacacaatcctacactaccacaaatacctctagcatacaagttcacacatcagaagggcatgtgaaggtctgaaggatgtgtgctatgcaacgtcagtgcatgataattgccagtaggtaatgctaaaacagagctgcacagttgaaacaaaaaacctatatagaaggaaaccagaaaggaaaatctagaggatattgacttcaaaaaaaaaatctagagggtatgctcacaatatcatttatatgtgttatgtgaactaataaaaagttaaggattgagagataactggtaacagaatatgaaaatcttactttttctaatgaacgtccacataatgcctgcattgcactgttgaaatcgtcgtagttctcaaattgcacccacactttgcaatttagtccagatataatctccttattggttccgtcttgttttgctccccattcatcatcactagaaatattaaggttcctgaaaattggcagaagaatgccaaagaaaagggtatgcggagtaagttccccaaaatgtgaagggcagttcataacctgcagaatttaaaagaaattgggtgcagtgttatttaaagaagtcacatgtatacaatagacattactccattattgtgcttgatgcactagggttatgtcgtatgttgttttgtgtgacatggattttatgcgtgcaatatctaatactactaaagaaatttattttacccatgttacttcccaagcttctttattatgaattttgaacatagctaacacattcacctaagctaccacactaacatcagaaactgtatgaactggtttttgctgagtttaattgctatcttggagaatcagatcatagatttcaaaatataagaagcgatatgagtgagaagaaacttatatgtggatgaaaaccaactagacagggcagaccttcaggtttcaggtggtgctaattttaatgcgcatattaagctctcaaaaggtgtgtataccggaatgggaaggcaagtaagaacaaaatatgagtccacaaacaaaataggaaaccaccaggatggacattgaacaaaactgaatcaaacaatttccttatggatgctcatgtcaactaagtttaggactcttttcgcttttattagcttacgtccggcactaatattctgccttgtatcccagagatatgaatgcatttacaatataatgaaccaaacagaagttgagaacaccaaaatgcaccttattttaccaagtgccgagaaaatagtgtgtgtgaccagcgtggaggctttcgatgatatcctcgtctccgcaaaccacctggatggcacaccccggacaagaatggtgtctggccttttcgctatcttcctcacaggattccctgagcaaagcaaacatcaattcaaactccacctagcaagaatcacaactaagagcagcattttcatttaaaaaaatgaatcccatactgctactgaggagctcggaggcgtagaaattctcccaagacttcttcattgccctgaagtcatcggagggcgggatctcgacgctcatccgaaacttaaccccctcgaggttgagctcgatcccggccagcttctcgaccagggagctcctccactggaagtacttctcctcctcctgctcacgggtcatctcctcggcctcctcctcctcatcatccccgttgcggcggcgtgggcggaggaaggagaggtcgcggacgtggaggacgcccgaggcgacgggctcgtcgcggcggcgcttatgcaggtcggggagggtgcgcacggagaggtcggagtcggggaggacggggagggagaggggcgggtcgcggaggaaggcgaggagcgcggtcttgagctgccactcgtcgacggggcggacggagaggtcggcgcggaagaaggtgaggagcagcttgaggcgcggcgcgagggagaggccgctcgggagggggagcggctcggtcggccggagggcggcggcggcggcggacatggcggcgcggtggtggggagagagacggcgggatggcggcggaccggcggcgggttggactcgacgggttgcagatgggccgggtgaatggacaatggagaaccggaggcgagagaactgttgcttcacgcgttgagggccgtccgatgggagatcaacgggtgatcgtaattcaactatcgcctatcggcctatggcgcggatgtgttgttagagaaaaggattatgtcgagattatgttcacgtcatgttcatacggactagcgccgatttgaacatgcaatttcgcacgaaattcatacatacgtgcaatatgggattccgagcataagaaaatcataattcgagttcaaagttcgaacacaactccacatcgaagacaatagatcttactatcatcaaatgattcgtataagattcaatgctaagggaactattctaaataaaattttaaggggatattcactcgttgtttgcagctactcaaatggttataaagaaataaaataaaaaatcgacgagatagattaatatatgatatatcaatccacaaacatacaagttaaatttaacttctacatatcgcaatttaaaaaaacaaatttaattgtcaatatacgttaactagctgtagttttttttgcaacttttagaagttgatttttagcttgcatgtttgtaaagtgatatatcacatgcaaacaacaaggaacatccctttaagagtttaaaatctactctcttcaatactctgtatttatgttgcaacaccttattctctcttactataaagttataacccactaactcttaaagcttaacatgcaaagatgctacatcatcgtcgactaacagttattacatttaaatatcatgcaaacatgctatattatctataattttataatttattaaattttagagctttaaaatacaagcatgttaaatcatcatctcacataatttaaataatatgttaatatatatcttcattatttttaataatatcttatatacctatatagttcatcctcaattagttaatgatatttttatcttctctcattaagccatatcacatcaattgtttttttttgtgcttaaatgatttattaaattttagagctttaaaatgcaagcatgttaaatcatcatctcacataattcacataatatttcaatatatatcttcattatttttaaaaatatcttatgtgcctatatagttcatcctcaattagttaataatatttctctcttctctcatcaagccataccacatcaatttttttttgcttaaatgattaatatatggtcaaattatctccacattttcttctttcattaagctatatcacctcaattgcttttaggtcttagatgattaatctatgattcaaactgtctccctacttttcttctctagtaaagtcgtatcactttacttttatatttgaatcattattttatataccatttaaatttaaattatcataaactacgttaacatactcttatgttgtgtagctattttatatattatttttacttattgttatcataataaactactgcagcaacgcgcgaggtttcacctagtatatgagatgttagctctcaaaaaatgaatatgggctggatttgagatcctactggagatgcaattataacttgcaagtcaatgtagcgataaaattctaaaaaatgcgctaattagacacaaatcaccctttgtaagaccctctttcgctgaaaaaaagttctgagtgtacatgtcgcatttccacttgtgatttttttcaaaacgctcagtgatatcactttaacttagaactattgtaccatattttatccccaaatttcattcgagtgacatatagcaatcccgtttgctttattaccaatctgcacgtgaagtgctatgcaacagccttgcattgcaccgggaaaacagtagagctcatcgccctccgccgccccggcggcacgcctgcctgagcggcaccggcgggtcggagagcttgccgccgacgatcagctcgaagacgaacctgttcgccgcctccgtgaagtgcaccccgtcccagctcacgctcctcgacgggtcgtcgcacgacttccccgccagcaccgacgtgccgttcacctccaccttcccgccgcaccggatgtccctgtcgaagttgtactcgccgccgccgtacccgcagcacaccagcagcgggtccccgaatcctgcaacgaacaatacccaccaatttttcaatcctgcggcgatttcaagtgtttcttctccggctccggtggtcagatcaacgtacgtaccgagctgcttggcctggctgatgagcctgtacttggcggagtagacgtcgacgtaggtgagcgcggcgtccgggagcgccgcccttagccggtccacggtctcgcgcagcctcgcgttgaagaaccgggcggccgcgttgtaggcgacggagcagccggcgtcgtccctcggcgcggcgagcttcggcaggagcaccaccgcgtacgtcaggcagccgagcggcgccgtgttgtgcacccagaagtacctccctccgaggctgtacactttctgcactcaccaagcaagcagagcacgtacagtacacatgagcagtcctatcgttttattcgaacggcatatttacaaaagaaaaataatttataaataaattttttatatacatcttcttggcaatataaaagtataggtcgaaaattaaactttgcgatagaaaagtataggtcgaaaattaaactttgataaaaaaaatcttaaaattagctttaaatataaggttgaaaattcagaatttgactgataagtataaacataagcgaaacaataaggccgctgatcatctgataagccgtggaaaaataaacaaaacaagcaaagattatttcaatacaaaacatttatatctctgttattagtgttttaaaagcaaatgctagaaaaaaaactacgatgaaaagatcctaaaatcatctcgaaaattaagttctaagaagattcaaaatttcttagtttgtcaatcagtcaatgaacctaagtgtactgtaactaggctgtgatcactgcattgagctgcacctggatggctgcactgaacctctccatgagatcagggacgtaggcctcgacctgctcagtgctcatgttgtcgaagtagcccattgtcaggtcgttctggccaatgtcgaacgtgtagagcgccctggagaagtactcagctttcggaagaatctccctgtaaattccacctgcacgaaaacagagtatatatcaacttcacaaaaaaaatggaactgaattttgagctctgaatggcgcatatgcagaggctgatcgaatttgtcttcacctatgttgctataaacgaactggcttctgttgatgaactgttcgaattggctggtctgcacgtccagggagatcgggctgatgccggagacgaagatgctgccattcgctggtctgatcgacgcagcggccgtcgcgaaattggcaccttgactgaagttactcccaactgaatcgaggtatgcactgaggtaacgaatccccaggctctgagctgcagcgtcaggaaaccaaaaaaaaaaacacagtagattcagagttcgttccgagtaattgggacgcactgagtattactgacccatgaagtcgatggtgaggcggccgtcgctgaaccggccggcgggcatgccgaagtaggtccggccgaacggcggcggcaccacggcgatgagggccgagagcccgccggtgtccgagttggagtcgccgaagttgaagatcgccgggaaatcgcatggcgcgtcgctgccgccgtcggagcttgccccctcggagagttgcagcaggagcacgacgaggagcaacacgagcttggcggtggtcggaggagcggcggtgcagcggcggcgacgtcgtgaaggcgccattttttctttccaccttgctcgatcgtagtgtgtgtgtgtgagacttgtgcacttgattattcggagctagcgctgatgtttcatgtttcataggggaggtatgtgtgtacgtgtcgaaccaacgagtcacacgtccacgaagcgttcgaagtccctgtccattctttctcaagatttttctaggtttgggtgttgtttgtattcagaattcacacattgtctcaggtttgcatcaggactggtacaatggggacaagagtttgtgactttttctggaagtctgattggtttctccttgtttgttgcacgtggcgtgaggatgacttatctacacttttctaaagtaacttattctctcttttgttttccacgtgtacgctttctaaactgttaaacgatatattttttaaaaaaatacataaaagttgtttaaaaaattatatcaactagaaagttagcccgcacatatgcgcggacacctatttaatgtgtttgtgataatacaaatgtttatatgtgagtgactttttactgaaatattttttactcaattctaaatctgttctttttttgccaacaattcattttggattgctttgaatgctagttttgattcccttctaattacccttaaagcaaataaagtctaaactaaaattacttgaaaatatgaatttataaaagaatattgtgtcataagaatggagttggttaccatgaaattatatatcatttgtattatgtgtatttactttttaaaatatttagcacatcttatttttggattttctaaactttaattaaggtaaaattttattatgctatatatgtctttatagattttagggcatattaattgaagatattttctattaaaaatatggctaagagactattttatctaactatagatatacctctatttacctctactttctccgtctcataattccaaggattcaaatcatatcccaaaatataaaggttgtaaagtactaactgtcccatcgaaccacccctcatttattttgttcctaatcttacttcaaccatctttattttttatccaattttatctcaaccgccttccctatctctatgtatcctttatttaatgagagttgtcatagttttttttcctccccttaattcctcctaaaatagtatgatcccttacattataggataaagatgatacaaagtatgcaccatttatagatggatttgtttggtttgtttgtgcctatgtagattaatttagccttgcatgtttataataatgtggatacatgaactattgatttagttgtagcgacataatattttactgatatttgaactatccaaaagcaagggtttaaatatggttatttaaagatcgatcaaatatttagcaagtatgctcatgaatttagggtggtcaatgtgcacacaaattgtgctgcccgcgcatatggacatgtgaaaaaacagggtcaggtgctctacgcaaattagttaacattccctaccttccaacaatgcaaatttgtttaaaatatgggtcattaatttaaataaaaaattttaagagctgtatgctttcaaattaatttcattagctagctattctcatgttatcactttttcttcaatcttagagttataacagtaaaggaaatctggatgtaatactttataaagataagctataataatcttcaaaataccacgggaagaaaaacatgccaaattaattggcttggtgaataagataatataccttcgtcccgaagatcaaaatttcaaaagtaccattgttatgggaacaaataacttaaaatatgcataaacatcttcagaaaacctgtaatgttatgaggaggtgattattagtttaacatcaaagagaaaagtaaaaaagaatgtgaaaaaactatactgaaccatattaaattaattaatatttttttataattgtatagctgcaaaaacgattatgatctttgttgcaaaaatatgtcattaatgaaggatattggtattgtatcctctctgcaaaacttatgtcgcatctacaaatcacctaaggagaagaaatatggaatttgcttttagatggatgatgggatggtgtctcgctaagcattgtgaggctgagtttaattttcacatgaagcttcctgctcaattaacggatgcagaccgatgccacgcttgactgcttaccggcctcatctttttcttaagcatcttattagccaaaatttgaatttttaatcttaaatttggagttgattttggggtttttttcatctaaatttatttttcagcttttgcttttaaatcactaagaacacgtatataaaagttttatttacaaattatttttagtttacaaatttattgtttcgaaacgatggagccttgtagatgtatacatgtaggacccacatgattcaatgacaaatttatgtggcatggttcaaattttccatatattgtatacagaccccaaaagagctacagtacaaatgctaccgcacataattctgagagcacctatgtgttccaatctcattcaccgctgttaattatatcggctgcaatgatgatggcatcaaacgaattagaatgcagatgcctcgtggccactcagacgaagtaaatctctattacgattcactaattacttagagaagggactaaacaatgcaattagtcttgagtggcattggaaaaaaaatatatagcaccatggatttacctagatcgatcggaaggggcatcacaacaactcgataggaagggggcatcatgatgatcgatggctcctttcctgacagttagcacctagcgagttgtactcgtattattcaagtgatgcacggagattaatcgcagctcctctttccaatctgttgagagtctcggatcgatacagaaacgtgataaactgcgggcctagctaagacataattacgtggattggaaatttttcttttaccttaaaatttctatgatttttttctaatttatttattaatttccttaatattaggatgccacgtggtggcataggagcgttggtaggagtgccacttggcggcataggagcgtttgtaagaagttttatgtaattttagtatataatagattcatttttttaatttttaagtaatacttaattactcaagtgttttgatgtgcttgtcagaggagaaatgttcccaacatgcaccttcaaacacagactactgtccgattgtaacggaaagtgttatgaactgaaagaatatccgctcatcttatgtataccatctcaatagttaaaaaaaataaaaatttggtaggacatattaatacacaatatataactccacaaacatgcatgcaaattcaaatacgatttcagtaagttgtagcaaaaaaatatatatataactgtgaatatgtatacatactcgtcagaatttaatttgactttttttaattaaaacttatagaactcatatttgaacttacatatatttttaaaaattacacagtacaacgcagacactcacaatgcacgcacactcactcatatgaacgcaagcacgcaaaccctactcctatgagtattttcgaagactggaccggcaaattatggagattgacaaaatcaccacaggtgtctcgttgtcgcctaccactaaaagcacaaagccgttaaatcctgaaaaaatcgctcccatagagagtcgaactcaatcttttcaaatatttattattttttagaattatttagattccccgttaaccttcttttctcaccggagaacatagtgatgagcttgaggctttcatggcggcaaacaccgtcattaacaaaaccaaaggtccaagaccatgcgcataacgccttcacatcgtgccattacggcgcaacggcgtctaaacaaaacttaagatgattcagaatcgtattgtcatcttccagattgtctagaagcatttcatcgctactcgttatgaatctcattctccctttattgcacaaaggaagcagtatatgtactttatatcaaccatatgcctctgcaatattgcacacttacaaagccagaggcagcagcagcagcagaaatggcagtacggcacagccaacctgacgacggctcgatgcacccgcaccggcggcgacgattcactgccctctgctgatctggcaggcctgcctgagaggcaccggcgggtcggagagcttgccgccggcgatctggtcgaacacgaacttgttcgccgcctcggtgaagtgcacgccgtcccagctcacccgcttcagcgggtcgtcgcacgacttccccgccaccacccacgtcccgttcaccttcaccttcccgccgcacccgaccctgtcgtcgaagttgtacctcccgccgccgtagccgcagcacgtcagcatcgggtcatccatccctgcagccacaacacaacacatcacgccaatggcacgggggggattgcacgagctcgctaggcacaactagctaagctttaccgagcttcttggcgtcgctgatcagcttgtacttggcggagtagacgtcgacgtaggtgaacgcggcgtcggcgtgggtcttccggaggtggcccacggtttccttcagcctctggttgaagagctgggcgacctcgttgtaggcgacggagcagccggacccgtccttgacgacggcgaggtcggggcggtgcaccatggcgtaaggcaggcagccgatcggccccgtgttgtgaatccagaagtaccttcctccgagaccgtacacattctgcaggttaccaatcagctcatgtatatgggtgtgtttagttacaaagtttttttttccaaacttccaactttgcatcacattaaacctttcatacgcacataacttttcagtcacaccgtctccaatttcaaccaaattctaaactttgggccaatctaaacacaatcatatgtgtagagttccatatttcagttcgaaattttctttttggcaacttcggtcccccgataggaaactattttagaaaaatattcaaattatttcagactagaatattctgaaatttctgcaatttcaaaaaattaggatcgatcggtacccctgtttttttttctttctgcaatatagaaccctgcatgtatgtgctacactactgctgttattagcggagaagaataatttggtgttcttttgagttttgaagaaaatagtaggagtattgtacaatctctgtacctggattatgttcgtgagcctttccattagatcagggatgtaagctatgacttgttcagaggtcatgtttatgaagaagcctgtggtaatgtcattctggccgatatcgaatgtgtagagcgcctgagagaagtattcagccttgggtaggagctccctgtagattccacctatgtgaagaaatggagcgaaacagaacgtgattgttgggttcaacgtggtactgaattactgacagaaatggattttttggttttcttgtcacctttgttgttatagacgaactggcttctgttgatgaactgttcaaactcccaggactgcacgtccaaggaaatggggctgaaaccagagaggaacaaagatgtgttctgccttctgattgacgacccggccgttgcaaagttagcaccttgtgtgaagttacttcctatcgagttgaggtacgcactgaggtaaggcagtcccaggctttcagctgcagcatcagagagcaagagtgtgtgtttacacagtaagaatctgcatttgatcgttcaaatagcagtaatctcgttgcatttgatgatttccgaagagtgtgagttgaagcctgaagcttttacaaccagcaccaaagctatagcacggactgccatgcatcacaaagttaaggtacatggcgaatggttcaaataagtttcacatgcgtctctgtcagtggtgttggtgacgacaagaacccgagttcagagccatgtgcaaatggttactactccagttcatggtttctactgctgtgtactactcaactattcttgcggtcctctcccaattagccaggacaactttatgctaatgccaccactttataccagaatgcttcaactgcaatcagaatttataaagcaaaacttccacaatctgcagcgaatattgcatagcatggcatatatgataagctcatggctgttttgtctcccagtttttctggccagcgaccactaaaactttctaaaagaccccttagggccaccaaactactatcttaaggtaatgtttctttctgtctctcgtatcaaaagctaaataaaggaggagtatctgatatattccccagctgcaatgcaacatcctctctacaaaatctccccgcgaggatcgcatggctgatagcagtggcgtgaccgtatctagagatgctttgccgcgagttactggccggcctttcgtcggattgtggggaatatatcgagatcgtgtcggcgctcggcagcaacttgttgcagtaacaataataccgtgtaatcgatgccatcgttggcacggacacacgggccgctcgtcaataattatggccatggttgggttggttctttttttttagaactgttgggttgggtcttggctggttgtagccagcttgccggatatcacagcactagcaatcaatcagtacgtgaaaatggtagaccttctctttcttttgcggacatttgttctaaagcaatcgagcaacctgttcagacgttcgtttttacttttaatttgggcttaaccattgcgagacactaaaacactcgagcagcaaacgctgaaacatctcgtgtctgcaacctacacatggaacgaattaaagctgatatttattggttcagagtgggagtaggtttcagttcgatcaagtatatgcagtcaaggctcaagggccctacgtgcagtcgtgcggaagaagaggcagtgaaaagttgataatagaaagaacgagagaaggttaattagctgattaagacgtgcaggggaaagaaaaagactctggttgcagtgattcagagacgtacgtaccgatgaagtcgatgacgaggcggccgtcgcagtagcggccgacgggcatgccgaagaaggtcctgccgttgggcggcggcgcggcgccgaaggtggccgacagcccgcccgtgtcggagttggagtcgccgaagttgaacacggccgggaagcggcagtccgcgccggcggccactgagacctgcgacaccagcaccagcacggcgacggtcgccaccaccaccgcggctgcgtacggaggaggcgccattacccccccaccacgcctcgttcgcgcgcgcggggcactgcgagcgagagcgacgacgagcagagcagcgtgggcggaagacgaggcggagcttagcagcagtggcgttggcgtggcagtgggcggaaatggcgaatggagatggatggttgtggatctgcggatagagataggcgggaggcgggaccgcgcgcgtgcgggagagaacggtgggagaccccaaacgcgacgcggtgccgtggacgacagcgatgggagggggagggcgcggtgggatggccggatgggtcacactgactgacgagatggccgtggtgtggtatggtgtggtgtggtggtgcgcgggcgtgggcgcgggtcgcgagcgatggtggagtggagcacagcgcacggtgtgccggcccggtggcgcggcgcacgggacgttggatttttgttgctgtgggttcgtgggagccgcgtccatgacgccgcgctgcctcgtcgcgcgcgcccggtggtggattcgcgtcgcgtcgcgccgcaccgcacgcgaccacgagccgtaacggagatttttctttgctctacgtgacgctttggaggcggcggtggagtggcgatcggcctatgttacatacatacgcgatctaggcaaagcgtgaaccgggcgcgcgtgtacatcaatgacggtacgtgaagtagaaagcagggaagcatggcccacgtggagggaacagatgggtttgttttgctagagtggagcacatcattgggctcaaatagtagtgtgatgtatgcctgtatgagccttatctctcggtcacttggtgtctggatagtgggtggaataagttcaccagagatccctcaacttaatattgagattttttgaggtcccttaaccataaaaccagaaatatatacccctaaactcactcaaactgttcaaaggaggtcccatgacagtatcgactacccggttttgctgacatggcatcctagtcagcaaaaaataaaaaataaatatgtgggacccacatgtaagtgagaaaaaacgtggggtcaacaatcctagtcagcaatctccttctctttttcttttttctcttcttctctttcagtagcggtgcgcggtcggaggtaggcggagcggcagcagcaggcgagcggtggctccgggctcgggaggtggacgcataccgctctcaacactgatccggtcaaatccagaagcggatgcagcttccgccggtgatgccgatgtgaagccatcatcattctccggcgatttggggttcccctcaccattcaccatggtggtgatcatgctctcccttatgatagaggcgtcatcatcacatcccctatcgacgtcacatccttctgcgatcgcaccgctctccggcttgccgtcctcatctgcgtcggaattgatgcggcttgacgacggagtggaggtaatggagcgtggcggccacgtcgcgagcgacggcaaggcagcggggccactccaccacgagctccgagcagcgccaccccagcagcgcgtcctgcagcgacccattgggtatgcggtcgtacgctagcatcatccgccgcggccgcccctcgccccgcgccgcggacgacatcgagtacgtgaacggaagcagtatggagtcccgccccttcccacccggcttggcggcggcggcggggacaggaggagatcccggtgcggaggacaacgcgagaaggtgggacgcgacggcgaactcgttgtggaactcccgctccccctgcagcgaaccagcggcatcccagcaacccaatccaacgggacgcaccggttgcttcttgagcagttacccaaagaggaggacctgctcgaccgtcgtttcgtgctacgggaggcccgcctcgatggcgcttgcaaggagattgtgttcctctaatgcatcttattagccttccatgcgcacccatcctcgtcctcttccactccgcggtcacgtattgtgaggcgacgatgtgccgacgctcctagatcccatgcctcgtgtcactagtctcgttgttggtcatgctttgggtgttgcggtacaaggagatcgagatagagggtctctccaccaaattgatgggccggtggccggttccctcaccatcagcatccgcctcctcctaatctcagcctcccggtcctatcccctaccgtgaagcttatggtgttgatgcttcgctgcttgctgcctcatatcccctctctccccatgccatggtggcaatcgaggaggccatagggggagtgaggaggcccaggtgagaagctcctcgtcgccttgccgaccaccgctttcaccttcctgtcgaggagctagtaagctcgagctcatcggccactactattgatgatgtccatgttgagataaataggaaaagtagagaaagggaagagatggaagaagggatgaatgttccactgacacgtggggctattgtaatttttttatttattttggtaggagtgccacgttgatgccacattagctaaaaccggacataataatgttttgggatctcaagtgcaccagtattgtaagctgagacaaacactatatctggtataatacggttcaaggatgcaatttaaactcgacataaaaatgagggataagaagtgaatttattccgcatgtatttgtatatggaccaaaattttggcccattaaaacgtggcctcatgaggcatacgagcgacgtggatacacatggcaatctccagctttactgtggtggatcgctctcttggttagtagatttgaaatgtccagaaaaaaaaattactagtgcgaatgcgattttagagcatcggatcaaaacggctatgcgttatttgggtggacatctgcaccgcgatttccgcaacggccgcctcctccttctccgcctccaccctctactgcttcgctagtagcttctctgtctgaggatctgcaagaagctatcagcaaccgcgctggtagggagatcatgattgtgatctgcggtcttaccaagttacaagatgttgcgaaggtctagaggatgctgcatgagaagataagagaagatagatgggttggacagtagaggacacaaatatcaaagtcctcgatgatgcaacagatcgatgtctgagtcttatggttttaggtcgttcattcagttatgtgatgttccaatcgaatcaaggaaggtactggaactacatgtgtttggcaagttgcgaagagagagtaaggtgcctggactatgggaattggttggtgtagatgaggccatggccatcgcaatggagggtcagtccattctcagagaattggatctatcggatgaacaaccattggattctgacaatgattgggggggtgtctgaagaagcacctgatgattatgacagcctgagtgaggatgcacctgatgattatgacagcccgagtgaggatgcacctgatggttacgacagcctgagtgaggatgcagcgaatggttacgacagcctgagtgacgatgcacctgatggttacgacaatccgagtgaaagatgcaccttatggttacgacaacctgagtgaagaagtaatcaaggatgtgcaagttgagccggcatttgtatccaaggctttgacctcattagaagaagcggtccttatgaagagcagaatcaacaacctgaaagagcttatccagaaaatgatcaatggacccattcgttttccacaaaaaagttaggaagcaatccacatgatgaacataatggaatcaacaatatgaaagatcccattcccctctctctcgatcaatagaataaacaatatgaaagacccccctctcgatgagcagcaatatgaaatatcccctttttgataaacagaacataatcaacaatctgaaagatcccatccccactccctcttgatgaatggaatcaacaatctgaaagacccccccctcacgatgagtagcaatatgaaagatcccctccttgatgaacatgacataattaacaatctgaaagatcccccttacagaatcaacaatttaagaaaaataaaactgtaacgatttgttattttcacctttacacttcttacattttataacctttttttttgactatgagactgaccttgctcaattgcaatgatgatgcaatgatatgagatgtagtagcataaataaaagaaatgttatctaggatacaatgctctggagtggatatattgcaaggatatcttcaaaccaattgtaagaaatattgtacatgatagctcaaggggatacaatgtttgtcttgtcgaccccgattttggaaatcggagatcttctgtgtttatcagtaccaatctctggatcagaagttggtacacacatacatagttgaatcacaacacatcacgaatgctttttttttgataacaaagaggcagaagcctcagatttaccaaggaagaactgggtgaacaaccagttttacataaaagcccctaaagatgggcaaattacactggaggatacacttatgcagtgaaggacaaaataaagtttgaaaaaagccatcaggtcctgcacaacaaactgctcacaacagagatgaagaagacgatgctccaggcaacggcgggtactgagcgctcacgataggttgcagaagattgaaccatggcataaacccagttggggcctcacaaaggaggttaaagccttggtttttcacatacaaatacaaccatatcttaaatgcttatattagggccagccatgccaacaactatcagagaacaacagcggaagataaaataatacaagtgcccaattaccatgccacaagcagtcgactgggaacaagacctagaacggaattacactacgatcatcttgttaggtatgcaagcgcactgacaagggtttctcttcaagcactatgctatatatatatatatatatatatatatatatatatatatatatatatatatatatatatatagtaacattgagtacaaaagtactcagcaattcaccacacaaaatgcaacaatgtacaagataatacaaggagtggctatggttattttgcataaagctaagttcacaaatatcatttcacaaacctaaaacttagcattgactactcattcagtttcacatgggttataaggaaacacaacgtcgtcttcttgcagttaccacttgctaactgatgtgtttgacattgtgcttctatttcgacatatagatgaccttttgttgtcttctccagggtgatatatgtggtcattacattacttatcagattagttaggttcagtttaatggtaacatgtcgtgtttatgtatctctttagtactccctccgtttcgaaatataagaagttttagggttggacacagttattaagaaagtaggtagaagtgagtggtggagggttgtgattggatgagtaatggaggtaggtggaaaaaatgaatggttgagggttgtgattggttgggaagagaatgttggtagagaagttgctatattttggaacgaattctgagggctaaaagttgttatattttgggacggatggagtaatattaatctcctttttcttaatattgaaggattactagccaagtttgcgcctttgcggtgctacttaacattgatgcaacacagttgatttgatcctgttccgctagtggcagacggtagtttaaccattcggtgcgtgtgtttaattgctgaggtgtacagatgtataatataccaaaactattttttcccatctaagttttttctactttcaaatgtgtactaaagcaaacttgcatacaacattctgtgcatacgtgttaatggtaattagtactcagcacgtgtcttcaacatgttatagcaatcatgcttaattccacgtttaatttgtaattttttggagccagtttgcgcagttatgtttattctttgttcattggcatcatagaccagcgcaacgcaggtccaaagattaatgagatgcggacgtgtcagtcagtttgatcctgcaactgacaagatatgtaaacagcagatcaaaacagccgatcggctgacaagccgatggagtagttccagccagtagccaataatagccgatgtcgatactagccgatagcgatagggtttaagcaatcggctatatgtccaatgtagataacgatataaaggcaatcagctgatgatgatgcaataaaataacaatataatctagtataaaccaatcgactagcaatgatatgataaataagcatcgatccgaaggttaaagcacacatcggctggaggtccgatgtcatgaaatccacaagattagattaaacagttaaacctttgttgtcatcggcgaaatccagcttatatgtatgtgcaatccttatgagccaatacaacgtcctgataactcaccggctgaaaccccgatgaaacccttattggcaatcaagaagcaggctagagattatggttctaagaacgacttagtagatcaaacttaactgatgcagcactaagtatgaaaagaaacataatatctagacaatcaagctgttgactgatttttagggtggtagatgtctgagctaatctaatctagcaacgcgatttagtcgatatcggtagaaaccctaaaacgagaagcagccgatagagctaaattgatatgctaggactagattaatagagacatatgataaataggtaggcaaatatatcatccaaaccagagcaatccaagaggtcgaatgtactgatgcagctttgaatgacgctgatgtagatgagacaattgcctgggccgacggaacattggacttatcccttcgccggagatcgaagacgatgcagccccgcgtcgggtgccaagttccacagaaacgtaaaaaacaaaagtagaagtaaaaagggtggcgatgcgccgaattgtattgatcgtagattgatagattacaatgaccccgggtatacatatttatacctatagggagatactagtccttgtcggacaagaaagaaactaaaaaggaaaagataaagtccttatcagacactaaacatactttcctaaagataaaaggaaactaacaaactatacctaattaatagataactgtcatgtcgtatccttcttgaactcgaactcttctagataagcttcctttgattgatccgactccaccaagaacacgacatcgtggcgacttgactcccatcggctgattctagaactttgaagccgatactgactctaaaccgatggtaactttgggcttaccaaacataggtgatatatagctcgaagcattatcttttttgataaaaccgtttacacatgtgttttttttaagatattggctacttaagataatcttaaattttaccgataaagtatgtctctagggtctttgatgaaactgtttacacgcgtgtttgtttgagtgaagacattgctattcaaataatcgccagttctatcgacatcgtgcaatcaacctctggctccacgctttatagtctactccctccattctaaaaataatcacttatccaatttcgttgattctttttggataaagggagcaggactcaggtccattctaaaaagagtcacttatccaatttcgttgattctttttggatgaagggagcagtacttaggctgagttcttttgttcactttctcaactcaactctctcattttctgtacgcacgccttttaaactgttaaatggtactgtcggagaatgaactcctccaccagggaactgtgaggcccccctttgtgagttcggccgggggcagcgggtgagattcaagtgagattcgagggcttggtgagcggagctgcgtgatcttgagggggttaggcccctccaagacgatgagacaaaaaagatttatataggtttgggccgctatgaagcgtaataccctattcctgtgcatgattgattgaatatagaacaccagtgcttggggttgcgagacccaagcgccagttcgctcggaagtcccccctctccaccactaggcctagacctccttttatacctcaaggggttaccacatgggcctaacaacctaacctaactccggtggagaagtattataatttttgcattaaatgcatgtcttgtcttttgacttgggaagccaagcacacgtcgtcttgatgatagggcctgtcaaatcttgccgcctgacacggggggtgcccctgtcagtcaccatttaatgggtgaagacttctgggctcctattacactgggaaacgggagccttgctttgaccagagcgggaggatcgactccggctgggataagaggatgagaacctctcaccatcattacattatttgatgggatatgtcgggctgcacgtcgcctgacacacgcgatggtgcgcctgacatcttgggtcccatcagtcattcgaccggtcacagacctgttgagtgcactgcacaccgcattaaatgcggcgtggcgcgaccgctcgggacgccataaatgcaggtaggtgggcacctggaagcggacacctaacccaccgtacgtggtgacctagagagggggtcgggggagcccgacccctagtcacgggagggggcggccaccgcccgacctcgggcccgatcccccctcgggagggggggggagggagccacgtggcgcctggggcggccttctccctctagtctcggccagggagtggtcgccgccctacctcgggcccgacccccctcgggggagggccacgtggcattggagggcagcctcctccatccagtctctgggaaggagtggccgccgccctacctcgggcctgactcccctcgggggagggccacgtggcatcggggggcagcctcctccgactagtctttggggaaggagtggccgccaccccacctcgggcctgactcccctcgggggagggccacgtggcatcgggggcagcctcctccctctaaacctaatactcccgggcccatatcaccgacaggtacgtttttttaaaaatttttctataggacaattgtttttaaaaaacatattaattcattttaaaaaattagttaaaacttatacatcgtttgtatgccctcctctcggctcctcccaaacaaagggcccgtttggggagattaagattatgagaagcagctggttggtagccagtatttgaaaatctgaaaaagctgggcttttcaacttccgacttctaatttattttctggattctataaatacaacctctcaaaatttaaaccaaaaagctgtaccgtctcgaaagcttctaattatgaagaaactaaagcagcaagctcccaaacagacccgatcctcactcgagtcgagtctcggtggggaggcccagaagggtcaagaggtcaaacagccaccggttcgcccaaaaccacgtacctccccgtaggccccaccctccatagaccgcgaaccgcaccgagcacatcccatccgccggtctccatcgccctaccatcccagccggtgggcgtcccctcccgcttccgctccgcctagcccaaagctgcgcagcaccctgaacggcaccacaccacggaacccctcaatttccacgacgcttcctaatcctccctcctcatcaaagccgtcacctcgctcgcgtcggcggcctcgactcccctcccccaaatcggttcccctccaaaaaaaccaaaccctcaaaaccctcgcctccgctctctcgcgcacactcgtgctccctcctccccccatccatggcttcctcccccgcctccgccgcctccgaggaggaggccgtcaaggtgaggtttccgccgctggcgtcgtggggggtgtaggggatctcccggtttgggcgtttttgttggtggagttttggggggactgattcggggggtagttatttggggtgcaggcggcgaaggtgctgatggtcggcgccggaggcataggatgcgagctgctcaagacgctcgcgctctccggattccgcgatattcacatcgtaagttttttttttttttggcttgctacgtgtttgcttcatccccttactcgcggttaaatttgagctgttcctagggttttagccgtgtttcgtgaattgagctctggtatcatctaggtagatgcacgtggattgctgggtgtctccagttaggtagttgcgggatctgtgatagggattggaggatagcgttgaccccagctgacaagtgggcactgtgtagagtatgcgtgggttatccggtgtctatctggagttttttacttagtgctgatgtttcagtatttcttagtttttttgtgaatcagtagctttgtgtattgtctattgtttcaccaattagaaccatgaataaacaatccgtcaggaactttagtattctttgcaaccatgcttggcagggattgttttgtgtaggtcattcttgttagaattcgtcataaaagttagtcgatatagcggaacgacgactaaccttcctgatcacttcagtcattgatcgcccaagacacgccagatgacgacacaggaacacacgatatttgttaacgaggttcagccgaagcctacatccccgaggctctgattatgggcgctcctccccaaccaatatagctcctagccgctacgagtccatggtcacgccgccatcatctccctgcgtgtctacgctacattgtagtcgccatggttacattgtggtgcgcccctctctatttaagagagatgccgggttacagagttcgactctaactccaccccctaacacctattacaactacaagtccaactgtaaccaaatagaactagtatattcgacacctattctaacagaattgttgctaggttcttactcttagatgaactgttatgctgctgcccttgtttcgttcactgctgatatgaaagcctccattcacatgacttcttttgaggttgatgtattgcacttggaccagtttggaaatagacacggtgtattctttgttcaggtatccataactaaatgaaatggtatttgaggcacctaagtttgttatccacacaatgccgacttggctgctattgatttctgatgattttcttttttggactgacgtttgtagttatgtttacaaagaaggaaataaaaccttttctaggaccacatgtcagtatggtactgggagataaattaaatcctcgtctattattttcatttcttttcatattttatctgcttttcgtttttttcttcactgatccgtttcttgcttctgacatactagtttacattacattgtcaaagggtcattttcccttggtgttgatggagctaatgaaaaaaatatcttgatttcctctcaaagtgttgtacacaaggaatttgatctttttctctacagattgacttggacacaattgaggtgagcaatctgaacaggcagtttttatttcggcagagtcatgttggacagtcaaaagcccatgtaagttacatttctatatgttgatatgattaacatagttgtatatgagctttctattatgtatgtatttgttgtattcaccttattattgctgctgcttattctgtttttgtcattgatcttgtcaggttgctcgtgatgctgttctgaaatttaggccaaatatcaatataacatcatatcatgcaaatgtaaaggacgctcaatttaatgttgagttcttcaagcaatttaatgtagtcctgaatggccttgataatttggacgctaggcgtcatgttaatcgcctttgccttgctgctgaagttcctttggtggaaagtgggacaactgggtttttgggacaggtgagttaagaaagtaccactgctctggtccccgtaactcttctgcatgtatgaacggatatataatacactctggcttatcttcttcgtaatctgtatggttaataagatttaccagacatacggccttctagttgagtatgttttgtgcacttaccattgttcactgtgatcatgtgggtccagagggaaagtgtggttgttacttaatcaggccgttttagtgcaaattatctaatgttgatcatagaacaggttttctaccttctccacaaagttcctaaaataatatggtcatttagacattatccagccttatttacaatctaactctttatacagctcaaatcaactcctggtggtagcttggccaatatttggtgcatgttcatataagctgcacaccttttaggtagttacgtacattgcatacagacattacatacttttgaagtgcacatgaatacatgatgtatatcatttgttggcctgtgatgcatgggactctggtaggcaaagctgaagagttcttttgtgtaccttgatgtattgtgtttattatcttgtgcatgatgggttttttgtggtctagaatctagattctgggcttaacaatagtgtcatttaaatcatcttctttatttttttatcacgtatatgtcaacaactaactgaaagaagctaccagtgttcactaaattaactaatggatgaatcgacctcggtcaaattattctgtttattattatattaggccgcaggtggtagaatccctgtctcacgagcaaaacagccaagtaagctaagtctatattttcaagttaattctcttctaaaattatttccattccatattttgcaggttactgttcatgtcaaaggtaaaacagaatgttatgaatgtcaaccaaagcctgtccctaagtcataccctgtctgcacaattacaagcactccatctaaggtttccttttgtcccactttcctcctaattatatccctctactgtgaaaatattagtttggaatgcccttagtcaaagtgcaaacctataaaaatctgaccacttgtgggcatattattagaacttaccacatagggatatttttttatttgtattaataatacggtatttcgtcacatctttttgtattcttttactaatgtatagtctatacagttacaataaactgatgttttggagtatgcgaacaaacttcataaaaaacagctatcagtatctttggattttcagattgggcttacagcaacaaaatgtgcaaatctgtccaaaatgtacctctgtaacattataattttaccttattttataaatataatggagtctattagtcaaagtagttttgaaggatccccccagtgtccaaaggccacctatttgcgactggactggaggaggtaaatagactaagtagttgtcaaggtgtgcattggaaactgtgtcaatatccaaaatggcaggtcacgttgacaaattaataaagaaagaagatgctatctctcctatgctctccatatcttcagttctcccatccaaatctatggacatctcactgttaaaagtgttctaatccatacataacttgaaaatcctcaatatgcagaaggcattcttttaacaagcacacactccgctttatggcattttttgtaattaaaaatctgaacttgacttcttgtgggaatactctgtgaacttgaccatttggaacaagcactgtgctgctctgatcagtttttagtgttagaattcattactgactttttcttttcacagtttgttcactgcattgtttgggcaaaggagttgctttttgcaaaaatgtttggggataaaaaccaggacaatgatcttaatgtccgttcaaatgaaagcggcacttcgaaatcagatgtatttgaaagaaatgcagatgaagatcttgatcaatatgctaggagaatttatgatcatgtctttggttacaacatcgaagtggccttagaaaatgaggaaacttggaagaatcgaagaaggccgaatccaatatacatccgtgatacattacctgaagaagctattcggcaaaatggtagttcacgggacatcaataatgagcaggaagaaccatctgctatggtctctttgggtcttaggaacccacaagaaatttggagccttgctgataattcaagggtatttttggaggcattaaaactattttttgaaaaaagggagaaggttgtattttattcggatctaggttatgtaacctttaaagttacttccatctgagatattttgctcttctggttttcaggaaatagggaatttagtatttgacaaggatgatcagttggctgttgagtttgttactactgcagctaatatcagagcctcctcttttggaatacctctgcatagcctttttgaagctaaaggtgttgctggaaacatagttcatgctgtggcaacaacaaatgctataatagctggtttgattgttattgaagcaataaaagtcctccatggtgattacaaaaaatataggtgactaggctctttgtttgtttcatgtcattgttgtagcatgtacttcttttttttcctaaagatagtaaacttaagctaaaatacctgctctctggtcttctggatatggtaatgtccagagagttctaaggtgctgccaattttctggaatttaatggcacttcattggctaacaattttacagaatgacatattgtcttgaacacccttcaaggaagatgcttttgatgcctatcgagccatttgagcctaataaatcatgttatgtctgctcagaggtatttttgcactttcttgggctatgatattcgtatgtttgttcgctttctttcaagtctgacccaaaactgctactgaatgcatcagacccctcttcttctggaggttaacacaaagacaacaaagctgagggaggtcatcgagaagattataaaaagcaaacttgggatgaacctcccattggtaatgattggctccactcttgtttttgaggatggtgagggcttagaggaagatgaggctgcaaattatgctctaaaccttgaaaaggtactaaccttcccccttcaaagcagtgaaattatatcctccatggaatttctttctttctaagctatggcccttgcagttgcaacattgttaaaatactattcattttttgccaactgagctttgtctggttattacaggtcttggctgaacttccagctccagttgttaatgacacaaagcttactgttgaggattttcagcaggaattgtcatgcagcattaacattaaacacaggtaacctatgaaccatgtatgctgatctgtttgcatatgggaggtctttctaaatgatacttatctatatgtttttcacatatatttcaatgaagagaaatcctttgccgtccaactatcttctcaaaaggttgggatcttgccagatgtaaactaaaaacagacaattttgcacaagtgaaaatgagctgctactaatttgctatacatggaccagtggtttttcacctttttcactaaagttatcatttgcagagtattatgatgtcacaacttttagtttcataaaatgtcctctacgtataactttgttctaacatgtaaggttgtttggctcattccattacatggatatacagtagcttataatgctgtgctatgtagatttggaagctatatgttatgatagtgtcgtagtgtacacatacagttgcctactctttcaagggggtagactgatttttcagtgattattacagggacgagtttgatgaagaaaaagagcctgatggaatggttctatctggatggtctgctccagtggagaagcaagttacgagtaatgggggaaaccagtcggttgcttcttcatctggtgcagattatgctgacggtattgttgaggacatatccactaaacctggaatgaagcgcaagctggatgaggttttagagttgaaggagaattgcgatgcatccagtagtgctcaagttgtcgaagatgacgatgacgacgatcttgttatgcttgatgagaacccaaagttagccaagaaaaagagattgcaatagcaacccctacggtatctgttccagggataacagcggttgacttccgctattatggctaacacattgttccaacgtaacatcttttgtaacttaatgatgtttagggctgataacactgaggtatcagtaagcgtactcagggtcatttttttgctttagatacggtactttaggaatgtaatttgtagcgtttaggcacaggagtgactaatgccctgctgacagtcagctgtaaggctgcacctgtgtttgtctagactggagcaatggtgatgttcttgtctactttctcgtttctgctatgcggtgatatatcttctgattgttttcatggttccgttgccctgatacgaggaatatattggtggatttagacttctatatagtgctcaaagcctcaaacgtcacaagaaagcagttcccacctgtgctacgtgttataagcaacagcaattttctcctgctgagttttctcccgttaagagatgcatatcgttcattaggtcttgagagatgcagatccggcccagttcttttccgcttaatgcatcaattgactctggtgtaagaactttatatataaataaatactgttacctcttcatcccttgtctatcactaacatccatatgattttagatgcatatgggttcaggtaaaaatctatttaaaatccaaaatatcttataatgtgaaaaacatcttataatgcggaatagaggggtataatagttaatccatgtattacactcgaataggtacatctcctcagccatccatcatagaacacaattaaagttgattagtaggataagcatctatattaggttcaagtagaggttgatcctaagatgaattcctttcagatgaaatgtggatgaaatctgagtgatgatctccttatatttgtaaggtaaaattaaatatcactcctatgttatgagtggtagtaatgttgatggataaagtttatttttcagaaattgtatttttggaagtgttgtgcaaaggcaactgatccacagataagctgaaagtagacctatggagtacttgagacaaacgaagatgaaatcacaaacacaagggaacacagtagggctcaattttttaataggaattgatcaaacctgagtataaggaaactagaattattttcaactagaaatcgaccaaacctgagtataaggaaactaaaaccgaattgcgataaaaaacagatatatcaaaaattgaattgaatctctacgaagtatactagtattccaacatctctcgttttctatcttccattcagcaatgcgatcatcatatcacagttgaattgaatcaatattccaagaacactaccccatccacaagaggaaacctacaactctgacgccgcaattccccaattcagggcaaaacactcgtctcacgaattcgaaacaacaaatcaatcaatcaatcaacaaaaaaatcaatgcaggaaaatccgcgctagtttccggccaccggccgtcctcgcgaggccgtcgacgagcgcggcgcccctcaaatggcagacgagggcgcagaaggcgatcccgagcagcagcgccgcgagccgccggagcccgccgcctcgcctcctcctccctcctcctctcctccacaccgccgcccacacgccgagcgcctcgccgaggcccgacgcgttccagtagtcggcgaggacggccagcttgtcgccgagcgccagggagagcgccagcgccgcgagctcttccgccggtgttgccctcctcctcccccttccccccatcccgaaccatcccccaccgccgccgccgccgccgaggaagaggacggtgagggggcgcggccgcgggaggaggcggcggagggaggacgagacgaggcggcgcagcggcggcggcgggaacgcgacgggcttgggcttgggcttcgatcggcggccgcggccgcgctgggcggcggcgcgcggggtgaagctaacggccgtggaggcggcgagggggaggtgcggcggcggcgtcggcgtcggcggcagcatcatgtcgttgcgtgcgaattgggtggagcggatcgagcgggagggggaggaggaaggcgttcgcgtgctcctctcccccgaccaatttggatttggaggacacgaattgcgaaatcgacgtgtccactgctgctactgtcgcgctctcctatgggtgaaggttcattctctgctcagaaattcatggctcgctttttaaactgctaaacggtaagttatgtgagaaaattttatataaagaagtttctctaaaatattagataaagggtgtagctatatttatggcgctatattttttatcaaaaaatagtcggcatgtatttacattgtaagtccctaaattacatatgtaattttagtgtatttacaatgtaagtctcaaaattacatatgtaagtactaaaattacatatgtaaattcgaaaattacatactaattacaattagtatgtaaatttgtaaatgaggtgtaactactgtgtaagtggctgaaaaaaaatcgactgtagcatatggcgccatatttctagcaactccgtagataaatatattttcaagtttgtaataattaaaactcaattcatcatacgttattaacaactcgttttgcgtaaaacatttaatcttcatcttcatctacattagtttcaaacaccagcattgtatgaaattctacaatcttgcttgaagtacaaaatcaaataatcatgaaattgattggaatttggaagagtgtatctctttgcactttgaaagcacaagtttataaccaatgccctatggtgcattagatggcaaatgcgcgatgttcaggtaatagaggttgagtccctaaaaaaagttgtatcaagttacatggtttgtttgactgtctattttggtttacaagcagcaacgaataaccaatcaaaactcggggcaagaaaacagctttctttggtttacttttccttactgaaaatgctattacaacaaatgactgaatgaacgtaagcaattgagcatcactcatatcatgtctgctcagtcgattgagggggtccgacatgctctttggcctttatgcatcgcgcatctctttctccctgcaattggctgattcttacaaggagaaccatccgaagctcgagcaccacagattgatggccatcctgagcttccggaaaacggtacagaggaagcatcggtgacctttattccttcatgcgcatcgcatctttctcttcctgccattggtattgtttcacggcatctgttgtccgtcaacgcttcacagatagctgcgacattgcctgtcactcttttctgacgtccctggcctttggatgacagtgtgctggtaggattctgcaatttgatcagctcaaaccacattcttccggaaggctgattctcttgggactgatatttaccatgagaaatctcctccccactgagcttgtcaactgtcatgcttttgaccttttcttcattctggagcaaatcaatgactcgagatgaaacaaactcttctgctttgcaaccattatgcagctgacattttttacttcctgaaattactttgttggtgcaggcagagttgtcactctttttggcttcacagatatcaatgacctcagaggtttcctgttttccatcttctataggagcttctccagtttttatttctttcgcttcaaagctataccatggtcttgatgattttttcactgttgctggcaaaaatttggagaggagttcactggtttgctgtgcttgatctgactcgctttcattttcagttagtggagatatggattcaacaactggaatctcaacttggcaagaatagctacaagaggagcctttaggattgactgtgattcttcctagtcttctacctttgtgtaattcacacctcttccttccttgtactggatggtcaagacaagaggagccatcttccagcatcactccacaaacatcgttagaatcttgttctggcatagttcttcgttttataacattgactcttttgactttgtatccttcagaacttcgacgtgcttgtttgccataactgttaccttcagatgtatttttccagcgaatgccaatttccttgtcaacattgtcaccagagttaactagctgaggtctgaagccaacaaatgttcgaattcttgggagcatatttttcataatgccagatgagacatcaacagacccatttctgcttatctttatacctgctttctctctgaacacttcctgtttgaagtgccgtactctgctaagcagagatgatctattgttgactgccccttgttctaacttgataagtatttcttcacggcgaagaccaccgttctgaagcttgttccatgcgtaatcaaacactctaagcagccgagcctcagtcttctcagcttcttgtttgttacccatctgtttatttgcacattaaagacacattagaaaagaaaaacgaaatccagtgctaattgctaaaagtggaattatgccataagattcataacttttttagggcacataatattcatagttgaccccgttgcttttgcaaaagctactaaagatatagtacttatacactccatccatcatagatactctgatagaccaaagatcttaactagttattaaaagtgataagatgaatctgagtgtccaaacatttgtcatgagcaaagcgtaacaaatcggatagctgttcgtgtagactacatgatagacaatgctggtgctgaagacaaaatgcatttttcagttcttcaaacttcagacttgggcatggtataatctcaaaatttgtggcaattgaccatcaacttctatttatttcactcaacaatttattcggacacgaagccattattgatctccacatgaacggtacagttcaactgttcaaggatccatttcttatctgaagaaacaaaaaacgagcatggaaagcagttttgcacttaccagagcacatcggaacaccaaggagtagcctctgacgaaaacttccctgaacaacccattccccgtcgcccgcgtattcgtctccgcttcgccggcggacggcggtgggttcccggcgtccaagtgcgatcccgtccggccgtactgctggagcctcgccctgacgctgtcggcctgcccgaggtacacgacgacgacgccaccaccaccggatccattccaccgccgagccgccctgataccctcgtcggaggccctcgcgacgcccagctcgtagaggccagggaagttctccggcaggttgagcaccctgtacctctggatcccttccttgccggcggcgtggtcctcccagtccgacggcccgacaagaacctgcaaccaggttggggaattcgatcgaggagcaaaaatcagatccaaatcaattcaagaactggcaacgaaatcggaggcggtagatggcaacccggggagttcaactcgactccaccggatcagatctcgtcagctctgcgccggtggcgggttggcaaggggcacctaaccttccatggggagaagagggagtcgtgcttggtgcgtgggtagtcctcccgcttcagcctcgctgggacggcggcggaggccgcaggcatcgtcgatccggtccgcctgtggctgcggagtggtgcgctctcagtctcagcgccgccggagccgccggcgccgctgcggccgcatcggcgccgggagcgggggctcgtcgctttttgaaaatctcgggttctcttttgggctgggtttgggccgtgagcccgcggctcgatccgacccgggcctgggcgctgtttggttggggttggggaaacagcttttgccgtgtgcgctcggccgttggattgacgatccgatggtctggatgagggtttacctaaccgtatggttattgtgattatcacatgtggtaacttttcagttttggaaaccacgatatacctcgtgataaccgcgcggtaatcgccaaactgcggggtgacggtaaccccacctcaaacggtttggtaaatcctagtccagatcaagagtggtggaaaaacaaagggggtttcatttgtcaggtactctaactgtccaagccattcgagctatagtgtgactgtgtacaactcgtgcggtaataattgtggtagattttcactatatattattagagaaaaatatgtagtgaaaacttaaaacttttgtaggatgtaaaaatatatgtatgagatttgtctacgtcgatatgaataaaagttttactcataatgacataaataatccgagacatttatttttctatgctatgatagtttttagtttttttccactataatgtggttttcattacatattttcctcgcaggggaattaaagggggcacattctcttcttttgcctcagattgagggagaaacatgttgagaaaaaattggtgacatgaattccccatgtccctcatatagcactttgaagtttgaaatgatagtttgtctctccctccccattttgcatggaagacatgcatgatgtagcatgttttctgtaaccagcgacggacatgaatttcctagttccgaacttacacatatatatatatagcttgtttggttcgtggccaatctcaatcaattaaaaaaattgtttatttctactagtagaatctgggtgagtggacgatttacattttatttactcttcgatattatcttccactatgatttaacgtcaatcattgatggtgatgtacgcgaaattcgatcggcacaataatcggtcgctgatttaagatattttaatttgtttccttggtgttttcaggagaagacaataactgttttgcaacccgttgaggcaacaatggttatgcatattttgtcaaacatatatggatatttaacaatatgtgctatctatgcctttaagttggtgttctaaatagttttcttgttgtctatgctttcaagttacgattttgtaattcgcagttgttcgacctgcaaggttgtaacatctgtaataattgttgtagcttttgtgaaataaagatagaaatgaatattgttgtttaaaaataatatagccatgatggggaggcctggcgatgagtctaggcaatcaatgtgttcaggtcttaggtccaagccatgtccacaacaggattttctctctttaccttgggtcctatagagacttttattgctttacttgaattggtaagcatcttcagcaatagctcctattttagagtccctaaaggttaaatgggggctgccctcatttcctcaggactctaagaatggttctaactccagcaacaacgtctatttcttagcccctatttctttttctcctctatttcatcttataatccatattttatgtttagtttaatattacaataatgtaaatattaatatttccaacgcatagaatttaatcaaatttaaattaataatttcaaacaacacaattcaattgaaatttgaatttttttttctaatatcacactgatatgtgcatatacgtacactagtgtgagtgcatggatgactcactagaatgctcgattagtgcatctgttgcggctagtagcagtagcagttcatccatcctacactcagtatccaatgatatacatgcatatatggatgcatataatcatatatgagctggacaatattaataagatatattatatccagtgcatacacaaaactgcatgcatatatgcaaggagatatagtagtagctccttctagatcagcatcaaatctcagttggccactggcggcagatggctgttcacacttaacaggaaccaaaccacgtctcatcgatatgtggaaaaatccatgcatacgtgcatccatgcaggtgaccaatactatagcagggcgatggccggattagagcagaaacacccgcaacaagacagtcggcagcgtgcaagcaatcgcacgggaaggagcacgcgtcgtggaagcattcccccgcgccaaagaaaactggataggggctggggatagagcccccaggcctaggggctgtaggagggaatttgggagccttcctactttagggccttaagtaggggccctgttgtactttatttttttagtctcaacctctcaaagttgtttaaggactgtatttaggggttttactgaagatgttctaagcattcgtggaaattgtactgcgaggaattttttttggttcattcctattcttaaccttgccattttttttttggcaacggtaagagttggtcattgcttttttttttggcaaaaaatagttagcctttcgcttagtttgctaccaaagtaagcaattagttgagcagtgtcaattttctttggctacaaaccaaataaatgactaatatttttgcactgtcaaatttactttagctagattgaatttggctacaaacttaaacagacccgagaactcaaactttcaaggaatttttgcactgcatgatgtatcaattttcccgtcattcgatttttatatacaacctaattctaaagcacaatataaaatctacagctgtacaatcgctgataccatgcaaaccgtgtcacatcagcatttcgtcaaccaggcagcaacagcaaagcgccatgaagctgcatgatcacgtaagaaaaatgtcatgaggataaaaattctacacgaaattcatagccccaagaaaacgaatttctagcatcttacaatcctgcgatgaatccacatttgggctgaggatgctccggcggcgcgggctcgtcgtacgccgccgacggcggcgccattggccctaaaaaattgcaaaccacaaaattaaggcgatcgattgaacgaaattttgccaaagcacacgctaattaatcagccaaatggcattcaaaaaaaagaaggcattcaaaaaaaaattaatcagccaaatcctctttttgccaaaggcggaatgcaatttaatagacgtttgccgaaacagcatatatctgagatttgtagaattactaattaattacctggtgctccatcgtgatgcaagctgctcgcccggtgctgcatatcgccgtttgctttgcgacgaagcgacggatcaaacgaaacgagagagagagagagagaacacaaacacaacacaacagagatgctttctttctgaacgaagagagaatctatttgttcagagcaaggaggcccaagaaaaggttaatcatgctgtgtgctgttgcgatgaacaggccacgcaggagagaacacagctggtttaaggttaggaagcctgcacaacgacaacgtagaggcaggcaggcagggtatccatctcttttcccccccggccgttaatgttagtattattgtgagccattgtttgcccgtctccagctgtatctctctctctctctctctctctctctcaggctcagctttttcttcctttctttctttctttcacctgttggatctaatcttggctttgcgagacaggaggtggtgaagtggcagttcgctttgccttgcgacgtacaggcaggaagcatacaatgcatgcacaaccccaacatagttgggtgcctttgctgtcagtggtgtggtggtggtggcatgcgttgcgtttttcaccgtcaattgtgcgtccccgtgtgcgtccttgcagttgccggtacggatacagccgggttagggcatgttgtcgtacagcagtgttacagtacaatcatgtaatataatctcgaactgcggaattgaatttttgtctctcgagggacactcgttttgtgcatgtcattgaaaaagtcatcaaaaattttaaaaatatttatcaagatagatcaatatatataatatattttcaaaaacatgcaagttaaaattcgactaatacaattcgaaataaaatataataaacttgacaatgaattacgtattctattcataattaaatttgttattgtttttctacctgttaaatttgaatattcatgctttgtgaagtaagatattacttttttttaaaaaaaagtttgatactttttaagtgacatgtaaaaacgacgagacatcctatttaagggatgaatagagttttcccttgtactcaacaattaggtgtgattatattttatcattgtattctcttacaacctacgacttcctctttttcaaagaaaaaacaatcttccaattacagtactggacatatgctatatctaaaattcgtacctagaagttttttttttcatctcttgtttggacaccagctgcctgcaatcacctcattcgaccaatcgaccactgtcatcttgttgtcatcgtgttatgatcgccataatgttctcaagcttgttggtcgaccactccagctgttgtattcacacttagacttcgtgggtccctagatcctacgctgctcactttgctggtggccaaaacgattgttgccagcctcagactatggaaatgcaattgttgtcctccatgatcacctgatttggcatcattgtgtcaccaatcgttagatttggcgcctccaacctttgggcggatttggaatgatcgagcttgttgatgaccgtatacagtactccctccgtttttaaaaatataacactgttaatatatattaaaaatatatatattaacggttttattgttactttgatttatcgttaaatgttatttaagtatgacttattattttatatttgcaaaaatatatataacacagtaatccctccgttgatcattcatcttactttaaaaaaattatgtaattatcatttattttattgttactttctttaagtatgacttatttttttatatttacaaaaatattagaataagagaaataatcaaatatttgttttaaaaaaatcaacgttatcacgcactaaaaatggaggtagtatctctgaccttgccagcagtactcgattagtcctgtttggagccatagtgctagctagcgaggcccttatctaggtctactctatctaccagcaagggccttggggagcgaggctacaccatcgcctttgtccgcataatattctcggccaaaacacaagtcaaccacaaagagacctcttttatatctctcccccatcttatatttttgctaagttatgagctatttttattccgtaaaaaccaagctagtacgggatgtacttggttttctatgagatggagaaaatatgtgttaaatatgcacttagcccattaacccaatctctcataactaatggttcaatatgcatctattttgtagtcaaaattacacatctatacaccgtactagtaaaaaaatgaactagagtgggtttgcaagttaacctacatgctctacttggttcatgctcctttattaaatcataagaatttcatggaaatttcataggatttagttcaactcgtctaaaattcctttaaatttcctccatttcaaaggttttagttcaacacatctatacaccgtactagcatacacgacttaattaactgagaaagatgattctcaaaccgttcatgcatgcgtagagatctattgaacatttgaactagttaacatgcatggaactgggcaaagtcaacaggccatgacaaaaagaacagtagtagctagataattcacaattagcaaaagcgtttttaacatttacagagcaagcaagcatgcagggcagcctaaaccgtgcatcctcgtgtgccagatgctttttattgttctcctcgaattgaattcctccatggggatgatcagatgatggatagctaggtacacgtatcattcgtcgtcgtcttcgtggtcgatctctctcacaacctcctgctgctctcgagcctcgtgtagccgaggatgcagttggcgtaggccacgttcttgagcgccttgccgtgccaccggccgacggcggcgacgccggtgcgcaccgccttgagcaggcagtcggccgtcttgacgacgctcctgacgcccatgggcagcgacaggtagggcgcgttgaagaggtggaactcgagcgacgccgcggcggcgtggtggtggtggcgcggcgacggcggcgaggaggaggaggcgagcatcctggcgacctggcgggcgaagccggcgccgagggagtggccgcagaggcagacgttctccgacccgaacctctcgatggtcgccctgagcgcctggagcgcgccggcgagccgcgccgagccgcggaggctgttgcgcgccagcaggcggagctcgtcctcgacgtcgcgccggatggtcggcccccgcagcagcgtgccgcggaacgcgatcaccgcccgcggcgcctcgccgtcgaccgcggccgccggctggtggtcccgctcgaagatggcgccgaacacggagccgtccctctcgtcgaccagctcgtgcgccagcctgtacctgaacggcttccaccactgctgcgccaccgccgccgcgtccctcctctcctgcctctccagctccagcaggtacaccgcctctatcaagcacgccatcaccatcctcctgtagtcgtcgtccctccacaccgacacgttcacctgcgccgccgccgccattgccatcgcaagctaagctaagctcagctcagctctcacactactcactcgatgacgccctcgatgtcgtagggaaggcgaggcaggggtggcgggaaatatatacgcggagtccggaaggcaagctggatggatcgatcaagccgaattcatttcgctttttactaattaatggcgggaataaagccaccgaatcgggagctaagctaccgacggatcggccgatcttttcacggttcctgcgacttgactggatcgacggatcacaacgatccgaccgatggatggcaacgtgcagcccgtgggtcgtaagctcactctctcacaagttcacaatagtcgcctccagctagccgtctggtttgatggatcgatcggatggtgtacgtcgttcgcgagctttatttaggggagggagcatatattcgccacggctaagcactggaccatggcttatagttcgttcgttcgtctcggtgtagtttaattgccctaaattaacatggctaaggatcgaatctgacagcctcagggtacgtgtgggtgacaggtggggcacgcgtttgcgccttggggattgtgcggggacaggtaggaggagtggggttgcttttgtcaggaggaagggtggttggttggttcgtcgtcctccggttgattagtgccgaagattgggtcgtttactttttctttgttagagcaagtttaatagtatagcctactgctagctttaatttatctatagctaatttaatagcatattcatataatagttgcttactatactattaacatatatagtccatctgtcatatacacattgcgtcttgaagtccgtgctgcagctggctacagattcgtagtctgctgcttttctctcttatcttttatcttattaaaatatgtttatagttagctaatagctcgttattgtacctgctcttatgtttccgttttcttttgggttttgggtggtttcggcgagaggatgggagagaaaaaaattagtgattaggaggtgatttgtggcacgtttaacactaaaccgaggggaatttgttccatctgatgacgttgggggaaggggggttaattcggtcgcgctccgcgtgtgttgattcgttcacacgctggcttgtgggcggtttcttctcgttcgtaatggttagacgcgggagtcaagctgcttatacgggcttggttttcttgttttcttaagaaaaaggggggccttggttttctttggaaaaagttacggggaatatgcatatttcgttcacacgcaagtgcgtggaaacatgacattggctacttcagtccttttccatcacatcaacatgtcatacacacaaattttcagtcacatcatctccaatttcaatcaaaatctaaactttgcgctgaactaaacacatccattgttctaagagaaggagagcgtttgataaatcacatagcaccttcatcaaaaaatagtttcagatttttttttcacatttgaatgtgaacatgctaatcatgtgactgaggctgcgttaacttttaattcttggatgttcaccgacaatttatcctattttaatcttgataaaaatctttatttatctttggatggtggcctcttccgttatttccccctactatttcaaagacgtgtgtacagggtttacatttcaatgaaatattaatgcgaatatggtatcgcaatatgccaataacaaataaggactcatcggttttattttccaaataagttaatacttattatacatagaacatgagaatacacaaatctactttaaaccctagtgtaatgcagagcaagaccatctcaagcccgcatggctacttaactacgagctttaggttagacttacaattttacaatatactatatatgttttaaaatatatggcattgttgaattttagacatgatgtttgactattcaccttattgaaaaaaactatgtaagtatttaccatgacttattttattattaaagctaggtactttacgggaatgctactgggcgagcgatccgctcgctcgcccagggcgatcagttttgcacacccccctccctccctccacatctccaccttgtttccttttttggcaccgcattacttttctattttagtaaatttatacacctaaagtttacacatctaaagtttagagacaaaaaatttataagtcaaaagtttatatatccgattcaaatttgaatttgaattcaaatatatatatatatatatatatagtatttctatacatctaaagtttatacacctaaagtttatagacctaaagtttataagacagtttatatacccgtttcaaatttgaatttaaattcaaatatccgattcaaatttgaatttgaattcaaatatttttcatatatagtatttctatacatctaaagtttatagacctaaagtttatatacccgattcaaatttgaatttgaattatatctgattcaaatttgaatttgaattcaaatattttctatatatagtatttctatacatctaaagtttatacacctaaaatttatagacccaaagtttataagtcaaaagtttacatacctgattcaaatttgtatttgaattcaaattttttatatatagtatttctatacataattttttctaacttttgtttttcaaaaaaatttgtgtggtctactgtagtagaaagagaaggggaggaggaataggggagaggagggaggagtatagggggaggggggccggatccgattgcctgggcgatcgcctggcgatcgatcgcccattaaggccccccggtactttatatataacttataatcaaaccttgtatccaaaagtcactactttacagacaaatagtactatttcataccgggcatagaaaaaccaccattttgtgtttctttatgaagtttttactatctagtctacttaattagcagagcacaggttattttttgtttgtacctgttcagctgctgtcttacggctgtggcacaaccggcaccaatagtgcacacgcatacggcatggccacagccacaaccagcttgccgaacgggacctttgtttgggcttggactggtcctgaatgctcaaaagggcccgagccgcccggttgacccagctattgttgcttacataaacaggccgggttcgggctgctgaagcttgcagagccaagctgggttgagtggttgaggcgttgagccacacactacatgatgttgaactgggccacgtctcacgttagatgacacgaactaattaacaacactagcaggaatctagtaattaatcaaggcaattttatttcctggagcgtgtgtttcatatatatatttccaatgagctccatgttgtttttacatcagaattgttataaccactgctccttaaatattatattacttcacattattagcaccttttgtatccatcaaacagatcggcatattaatcctgaaacccactgggaatgagaatcttgttgggctttggttctagcctacggtcgatctgcagcccttaggtgctatataaacataaagtactaatctataactcattatttttgcattgccagcttgtgatcaccagacggtacactgggcattaaaaactgaaagcatgatcacgaatcatataagtgtgatttggacccatgaaacttcaatagaatacattatcaatcttatgcttatctcttgctagactctgtgtgttcacttcctccttagagtgtcagtggagtggtcctttgtagttggcatcggtttttttttctttcaagaaagatgaaccaaaagttattatgccttcgtacgcaagtggtaaggaagaatctgcctgaaacaaaatctgaaattgttggattggatgtttgggatatcagatttcccctaatgagagggcactgttgtgacattggtgtcaaggtctcaaagttgtctagctactcttgtctatgaaatgcgtattcgatcgatcagcatgatgatgttgatgagatgttcggctaagaagaaaacgagtagaaatgcagtagcatttagggatggtagaaagtaatctctggtagtataggtgtgctagtgcaacaagcttggactaatcaggagcaagtataagtctaggtagctttctaatgctgtaaagataagattaaactaaattaaagtgaaacaaagtgagatgaatgtaaagtggtaacagtactttgatcttcaggtgcaaccgtccaaggagaatatttatcttggcgaggaatatgtctggagaatattgacgatgactgatcgatccaagctgcaatggcttatctgaaactcatccaaaaatggagactcgactactaactcataaaccctgatccgacgaggagtttcgcgtgccttcgaagcagtgtgttttcttgtgctggaaagataagtttaattttttttatgacaatgaagataagattaagttaaagtgatatcaatgtaaagtattaaagttgtaatgcttcctgtttatccccaggtgcatgcaactatataaaaggagaatatttgttttcgtgaggaatatgtgtggagaatattggtgatgcctgatcgagtttgagatggcttatccgcagaacaatggagttcagactcatgcaacactctgttatgccagaagtttgtacgcctcttagagcaagtaaaatgtgttagatgttggatgggtcagaattaggccttctccggtacaccaataccatccaactcaactaagtatgtgaactatgaaatataagtccacttgctatccctcaactttgcgtcgagtttgtttgacatcaatctccaataccagaaaccttcaaccctaaactatataaaaccgtgtaatttgggtcccatagtagtatggatgtctcgtttcgctgacgtgggatcctagtcagcaaaaagaaaataaaaaatatgtgaggcccacatataagtgagaggaaaaatatatgtggggtttacatgctctccttttccccctgctacttgcttgcttcccagacggcgtggtgtggcctcggacgagtcgatggtggccttgtggacgctgtcgcacgggaggcgggggatcacggaacctaaacctgtgcttgtccatgtctttgcagatatggaaaattttgcgtgcctccaatcactgtcggcgtcaccatccccaccccccaaccccccctcctccgatgtgcatggtggatggcaccgccacagagatgcctctcctcctttcccaaccacgacgcgagcaagtgcacggcgtgtggccgtggcgtgggccccacatatatttttttcttttcactaacatgtgggcaccacatattttattattttctttttgctggctacgatgtcactttagcaaactcagacatccatatttctattggatccaaattacacggtttttgtatagttttagggtgaagatttatgatattggagaaaagaaatgttaaacaaactcgacggaaagttgaggtggggggggggggggggctcaagtggacttattcctaggggaccagtgcagttatgtatttgaggccttgttctaaatgtttattgggccaacattattcgcatattatttatgccaagctttcaaaagtatgatttctcaaaaaaaaaaaaacatcaatattgtttagtccatccattctaagctatttacaaggttgatgatagtactacttcctataaacaagttgatcatctattagccttcatccacattattagaaagaacgggtctccaattggaaagaatgaagttcacacattttttttaagaaactgtgcatggataaattattgtttttttttgaaaaccgaagtcagcaaagctggtgttattttaagtaggggagaaaaaagtatttacaagattaccaaaacggtgaaagagaaagagagaggaaacaagaagctactaaacaatgaatacatcctaggccaataatctcacaatatttgtagctccacatatcttccatagcttgatttcatcatgtatcttgtctagaagctgcggcagggatttttcctgatttcggaatactcgtctgttccgctcacaccattttcccatgctactagcatgtaaactttttttttctttggctatgtctttttcaccttgagatgcccttctgatccaccattccaacagcggctcatctatatcacgtctggtcaatttcgttacagttcagtctacttaggattctctcccaaatcatttttcataagaatccgaaacattctggagttctttctgaataaaaggaaattccagtcttccaaacttggtgagccggtgagcaatgttgtcaccttagggagtatttagtttacgttaaaattgaaagtttggttgaaattggaatgatgtgacagaaaaattggaaatttatatgtgtatgaaagttttgatgtgatggaaaaattggaagtttgaagaaaaaatttgcaactaaacacggccttatatgaactagtgcctgcagaaacttcaatacaggggatgtgttcaccaaatcaataccaactcaatgcatatggtacgtccgtacatgaatgtactagactcctgcaggtggcattgcaataaatcaaagcaaacgaatctctttaattaatatgccaccaatactttcctttctgttctttaatttgcttctgttggtgttggatgggccaccaatccaccatacatgtgatatctggcaccctaaaaaagatgaagagaagttgtaaagacgtacgagagatggatttgagatcagttgctgctaaatcaagcaaggctggttagttataaattatgcaggcattgcactgttatcatgcaaaaagtcccctgttcaaattaggcaaatattttggagatgccatttcgaccatgtaaagtatgtgatcagattacacatatggttggataaatagttcactaatgttcaatttttatacccacgaatattacgtatatggtgtgttttcaatagaaatttagtgaggttgacctccatctcattgagaccgtgttaggaaacacatttgcaggtgtgtgtggtgcgcatgtgcgtcttccttccataaaaatcgttaagaaaattctgacttatcataagctagcactggtcagccatcatatgatcccatttcaggtttccccctcccctgagaaaacacaaatcacaccttttgagtttttgaccagtgaccaatccatcattccaaatttctccagctaagctatgacgcattgtccccaattaatacacacactgttggccgcctgacaaccgaaaatggccaacaacaatttgctaccaacagtggcaacagaataatttgggcatatgcattcagcgttcatgcaggaacaggggcgtgaggtgacacgaaagaaagctcagctagcaaagcaaccaattgcatggcaatgctcgctgtctgcagatgagccgcatcatgggaggcatggccagggccaggccgggaatagtgttgttttcagctagctgcagctttgagctggctatcactaaccacagctcgagagtgtggctgcactgcaccaggatttacaaaaccaaccgatttttgtaaaaccgctatgtcttggtttatagaaacatatcggttttagctggttttcatatgacattgaaagaaagtcttcggtttttgttggtttttgataaaccggtgaggatcggtttttatttctaaaacgaaaaggcaaaaccctgcactgctctatggggggctagcttgacgcatcatggcccattacaccaccaccttgttgtagatcttggaccatggcacaagggaagaagctgggggaggaggaaatgtaggggatcatgtcccattttgcaaggacagatgggggatcatggatatcttttttccaggtctagactattttgattggacagtaaattctgcctttttctgtttggagaagatgaaataatgagttgactaatgcatcacgaagcaccgtcattggaatatctaccaacaaaaagtttgtcacaagtagtttgcagctgataaggaatagtaatactttaataattcatacaaatgaaaaaaaacatgttagaaattcttataaaaacatggatctcttagctgtaaaggctttgatttggtgggtactctgtacatcagcagttaaaatgaaaatgagaatgagttcttttttagcatagcaccgaagatgactgagattgtcaagccccacttgtaatgaaaagagtaaattgcactcacggtacatcaactttgtaagtgggtgcaatttagtgcaagaacttgagaaatgagcgatctagtgcaataacttgacatgtaggtgcaatttagtataaaaactttataagtgatcacataaatacaacaactagcataaggtaatatccgtaggattactatgtaatggcataatgatatcgtgcgaccaggaaaaaaggtattactttactgaactgaccccgggcgtgttaatatcagttgaaacacgctttggtccctcatccgtgaatcaatccctagcgggtcttgtctcgcgtgattcagtttgagcaacagatcctgacgtaatacatcttcgaaaaaaaattcacctaccatacttagccaagttgatgcaccaaaatactaaattatcaagttcctgtactagaacgcaccaatttatcaagttgttgcacttgactgttcaattctcaagttattgcactatatcgcatccacctatcaagttgttgtaccttgggtgtaatttactctaatgaaaatatagtaaaatatggatattttggaggctataaatcctataagaaattttggcaagggacgatagatatatacctctaaagtctgaaaaaaaaacagtcgactgtaagagcaagtttaatagtatagcccactaatagctccaattcatctatagctaatttaatagctaattcatataatagttgcttactatactattaatatatggtcccacctgtcatacacacattgtgtcttggagtccgcgctgcagctggctacagatatgtagtacgctgcttttctctctcatcttttatcttattaaaatatgtttacagctggctgatagcctgctattgtacctgctctaacacccaactcgtttggagtccgtagtggttcttgtgttggtccacgtggcccagttacggtgtaatggtggtggtttaatatcaccttgaaagtttaagtagtttagggttcctaccaatttttcaaaaacataaacacaccattgttccaagcaaggatgacctcggaacaaaagattattgggttacacaaactgtatcgaaattcttatgaaaatgggctggcgctttggagaagttttaattgagttcatgttttttcataccatggcgagtaaactaccccaaaattccttagaaaaaaaattgtgttgatgagttgtttggtttgttgcctatgttaaccataccaaaggaaacaaaaatggcaatatcaatccccatctagttgttggcctatcagttgtgaccaaaattaaaattttgaaagacaattttagagttaattttgggtttttttattgtggtctagattatcaatccttgacttttacaatgctaatagcatagatataaaagtttattcgtaaattatttttagtttgcttcgtttattttttttcacggcttatcagcttcagctcaaattaatgtccaaagtgtaaatttatcattaccaagaatcatggtcatctttacgacggtctcaatccgaacaagctctagttaattgtgtaggtcttttgcccgcatgagcgcgggtttacggccggtggtaggaaaggcgatggatggtgtcgttgaacatcgaagaacggggagacgacaaaccagagaaaaagacagtgatgaacagcggccgtttttttatatgtgcatgcgtgattgctttgagtcctgagacgagtgcagaatcatgatgtcgccgtactttggcctcctgcttgttcgatcgattcaaatgaggagaaggaagaatgaaagaaagaaagaaaaaaaagaagttcccggcatacatggcagcacaaagctacaagtacttatgactgcgtcgtcgcgtcgagaagagagaaaaagaaaggcaaattctgagcctcccggatgaatccacttcagagattctcttcatcattggggttgcaaagctggttaatttagttttccgacttttccccaagaaagatgcatctcgttcaaacatgcgattttttttttctgaaactggacgaaaaaacagggtgtttagataagaaactacagctactgcaacagtggcaactctgagatgttatggatgtatttcttctgccattttttcagtccattttgttggcttgcgaaatttttctggcaaaccaaactgggcatatatggatgctagctggggcacactgatcatcattggactgaaaattctatttgttgagggtatatacctgtacatacatgccatgtgctgcagtattatcgtgccataccgggggtgcaaaacgaaatcaggccaaattcattcacatggcatccatgctatgcactgcacgctgctacggaagcgtacaaagtatgagaattttgtcacttttgctgctccatctacggcggcagtacagtagttggtacagggtaccccatgtcgaccccatgcatgatctgaatatacatacattcacacagatatattgcacatttacagcatgagtgcaatttaatattgctttcttggcctaaattattgatggtcacacccccttcgtttgtgacacggcgctacctacgcagagagatggttgtttcgttctgcgacacatgacacatgagatcgatcgcagtttcggtttcagattttttcttttcgaaaatatacaaaagaattacatatctttatattaagaccgagatacttatacacaagcaaaggctatgtaaatgtatggctagatcttgcgatatatatggttttgtgaccacgacagggccatcggttggcacaaggctagcatccctgaggactcccgtagaggagaggggaaacccgcttagatagggcgtaaacgtgttacttcctctgcagctgcgccaaccacctttctccgagttttgtgttggttgttaaagatcctattgttaccttctttccaaattaacgtggctaggatgacaattgtattatatcctttcctcggggttttgataaccaacttcctactgttgtaccgccacagtgagaacgattgtggattggataggaagcaccaagattggccaatggtgtttatgataatccacccaaaaaggtctctgggtaaccaatctagatgtagttgatcgtttcctcttgctagtcgcagaagacacatttgctctgatgaggcaattaagccatgcttgcttagcctgtatgccgtccaacaacggcgataagcaaccaataggaaaaatacagcacggcggcacgtgtttttttttcttttcaaaatggcttggatgggcagatttcacgaccaaaaaagaggattatgtaagctgacttggtggagtattgccctgaagcttcccacttccaaatgagttgctcgccgtctaaggtgattgcacctgaactcagagatttagactttttttacaggagaacagtaagggaggacccccacggtaaatatcaaattaaggaatatttacagggtttatgtgaggcatgaaaattacatagcgccaatccatgattgaaacaaaggtctatctcaaattctgagccttaacgtcaactcatcaatcttttaagcatagctttccaagttacaggagaaggatcaatatagagatcatcctattcaagcatgctttgatccagatattcagtttcagattttgtatatgtacatgttaatttgttttatatctggctgcatacgttaactagaatacgaaatgaaattgtacgtattaccatatgtctgcaattctcgaagtactgctcggttcatccagccgtctagctgcgtaatatatttcagggtgtagctgtagtagtattcagagaaccaccatatggagccacatgaacacgtttaatttccgagataacagttcgtcaacatttgtgactgacaggacaagctggaaccgttatacaaaacttaaaaaaaaggtaacatgtgagatgtgagcatggaccatggatatgaaagagagacactagctagtgttctaattggaggtacgctctgcaagaatggtgccaagttgccggggttcagataattctcagaagttttcccaatcaaagttcagtagtgatcagctaccgatcgatctatcaatcaacaaacggaccaggcctagcttctcccctctctttcaaacccctgatcatggccgaaaccatcagctgccgctgccgctgcacgtactgcatgctttgctacagctcaacagtcaaataccgccaactcacaacacaacttctctatcagtcagtacagtgctcgtctgctcgacctacccggccggacagtgcaaaggtccccctgcgtttccacgaccccatcactgcacgatctagcatatgatattaggtaaagagagagaagagctagcagtagcaacagctgctagctaaacctgcatgcagctgtgtgcagcagcagcagcagcggtagcactgcatagcaagaaagagacacgagcacatttctctcttttggagcaacaaagcttaagctatagactagctacagtgccggccggccggccggcgtccatcccaactagtacgtgatataataattatatatgttaatcaaacgatatgttagacaggttcttgttcttcagaaaagagaaaaggaaagttggtggtataatagtcactcactatagtcatatgtgcatgcagggccctgtctttttggccttccaaaaggagagaattgaaaccgggcgataaattcgtggcaaaatccaaaagaaggccgtgtatctaggacctttctctactatccaaaagggagatctcacaaagaatgtactagtccagtatatagttgtatatgggttgggttgcagtagtggtggtggccggccggccttgacgacgaacgatgatggccaccgcgtgcacgccgtgctctcggtgcgagctccagcttttttgcttgctagctaagccccttttgtttttcagccgtgctagttgctagctgctgcatcacactgctgcttgctgcttgctgctgctgctgcctttgcttgcttcgatctgatctccatattcttttagcctttctttcatgtgtcgcgcatgtgtacagcctactgatgggctcgccagtgtacgtactactacgtagcagtacgtactgcgtgctgctgctgctgctgctgctgctgctgctgctgttgtgtagagagtataattccttcttcacaagtcacaactggagggcaaatgggcaatgcgatgggagattgggagcaatataatggcatgcagcaagcaagggaataatttttctttcctctcaactcatatcagcatgcagctgatgcctgacaaagcctccaaggtaggttgctgtcgtcctggcctgaacggtcatttcaggcgcgcactagctggtctttgatgtatcccaggattgttggggcgacgggggaatcgcttttgtccagaaattggaacggccaaaatgtgcggtgttagtttttgatcagatgttggagttgcgctgcttaagagagcatgattagtgagattaaaggccctgttttcaacgtggggttcttacaggaattttggagagtttggaacagagagaagacataaatttctgagaagatctatatacgatactaccttcgtttcataacatatggatcaatacaaacagtacattttattagtatgaatgatcagatggtgtagattaactggcctaccaacttaaattaattgtagtataaaattgaaaaggggataattgtctttctaaatgtttgcttgcagacaactgttgtacataaatgcacaatgctagacgtgttcctcacttgatttcattccccagtcccgtagttgtcgtccatcataggccataccgccatagagagacgccacacgcactgcaagttcacgcgcaccacgctattgtgcctgcctgcctgtaaattaattcgaattgcctttctttcgtcttctcaatttccgacccacccaaaaccctagctagttcctctacctggaggaggcagcagcaatgatgcccaactccccactctccaccatgctcacgcgaacttgtacatggaaattcctagtgtatctttgtatatgccaaaaatatatattgctagtgtattgtaccgtagaagtccttcaatttctttaatcaatcccttccaaaattctacttgttctcaacagaattttcataggattctcctagggtctattggctaacaccacaatctgattagccaacccagctcacatccctcctatcttaagggtttattcgattgaaggggtgtgggattaatctccttaatctcatgtgaaattaattgattgcccaataccctccaattgccatgtgaaaaggattaatcgaacaacatgtaaatagggtatatggggaataagtcttgttcatatgtactaatttgatcaagattttagtgacatttcaagatttgcgactcatatcccaaatgccgtagcacatgactacatgagcaataaatcctgatttttttcccttttaaaacaaccttaatttcatatatgaaacacgtctctttagtagaaacaattaattttaccattctagataaaaatgggtaaatggttttgtagttgttttcttacgttaaaaaattagaaatgtaacagtttttacgattgtgtgcaatattaggtctggcatggagtatagaggcacgaagcatatgttcacgcactccattctagagggagtataagagcagggttcgtgtttccaaagggaacgggtcaaaacccatgaaattatgaggtttccacgtaggataaagtatattgtgattgaaaatttgaatggtcttttataaattcaaatttcaaacaatatatatgagcaaaatttcatcaaaatttgacaaaaccattgcaccgccgaggttgggatccaacaatccatcgaaaaaataaaccatgtactagagtaaatgttacaacatttcttaataatctattacataggattttgatttgtacttctaccataggactatcacattgagtaaaaaaaacaaaaggaaaagacataagtcaaacctaaccaaagcaagcaagaggagttcatccaaaagagaaaaaaaaaagaattaggatacaagataatattggatgcttgaaatgtgttttacactagattcttacacatggtaaaagacaaatgctctagctaaatgtccgtcatagttgtgagagagccacaaccaataaactttttatagattgcgtgtttaatggatttattgtctctattactttagtcctacagaagactatttctctaggtctagatcatgtagcggtggggccaaaaaaaatttagagagtatttgttatgaaaatcttattccctatagtaacagtaacataacgattttataatgtgttcgtcgatgggtcaggtagccgcctagggttatcgagcggtggctccaccactgagatcatgtacgctcgcatagtaactcgcggtatttgaatcgattggacactattgtgtctctctcttccactaactaaaggcgataaattgaatttttaaaacaatggtgataaattgaattgagagtggtggggaaataataaacagtgctcctacttgcagggtgacagtaccggtccacctccaccatccatcccctacactgtcgcgagcgctctctctctctctctctctctgagttcgttagcaaagccaaccaaaaaaaacctaaaagcaaggcgagcctcggcagtgagatcgagatggagaaagcaagcaaagcaaaggcagaggcagcaaaaggcgcccacacccactgccgctgcctgctgctgctgcccccggtaaatttaaagaacccctccaatcagagcgaggcatcatcgatccccctccctctcatcctctccctctccaccctcctctccttctctcatcgatccggccaaaagctactcaaatgttatcgatctcaccaaaagagaagcaaagagaaagagagcatcaaaagcacaaacaccaagccactcaccacacctcgcaatttacatggctcctactaggttgtgtagctgctactagctagctcagctcggctcggctcggctcgccattaaaatccccttgttaccgcgcgttgtttggttgtaccgcgccatatgttgccgcctcctcctcgtcgccgttgcttagatggatacgctgtttaggttggttagcctccaagccgcctccgagcagcagcagcagcagcagcagtcggcgtcctacaactcgaggagcacgacgtcgagcgggtccaggtcgtcgtcgcaccagacgaacgcgtcctacagctactaccaccacagcagcaacagcggcggcggcggcggaggcggcggagggtactactacggcggccagcagccgccgccgtcgcagtactactacctggagccgtaccaagaagaatgcggcaacgccccacaccaccagctttacatggatgaagacttctcctcctcgtcgtcgtcgaggcacttccaccacggcgcgcgggtgcagcagcagcagccgccggcgtcgtccacgcccacggggacggcgccgacgccgccgctgtcgacctcgtccaccgcggcgggcgccgggcacggcctgttcgaggcggcggacctgtcgttcccgccggacctcaacctcgacttctcgtccccggcgtcgtcgtccggcggcgggacagcgtcgtcgggcgcggttgggggcggcggcggcgggaggtgggctagccagctgctgctggagtgcgcgcggtcggtggccgcccgcgacagccagcgcgtgcagcagctcatgtggatgctcaacgagctcgcgtcgccgtacggcgacgtggagcagaagctggcttcctacttcttgcaggggctgttcgctcggctcacggcgtccgggccgcgcacgctgcgcacgctcgccgcggcgtccgaccggaacacgtcgttcgactcgacgcggcgcacggcgctgcggttccaggagctcagcccctggtcctcgtttgggcacgtcgccgccaatggcgccatcctcgagtccttcctggaggtcgccgccgcggcgtcgtcggagacgcagcggttccacatcctcgacctgagcaacacgttctgcacgcagtggccgacgctgctggaggcgctggccacgcggtccgccgacgagacgccgcacctctcgatcaccaccgtggtgtccgccgcgccgtccgcgcccacggcggcggtgcagcgcgtcatgcgggagatcgggcagcgcatggagaagttcgcgcggctcatgggcgtgcccttccgcttccgcgccgtgcaccactccggggacctcgcggagctcgacctcgacgcgctcgacctccgcgagggcggcgccaccaccgcgctcgccgtcaactgcgtcaactcgctgcgcggcgtggttcccggcagggcccgccggcgcgacgcgttcgcggcgtcgctccgccggctggacccgcgggtcgtcaccgtcgtcgaggaggaggcggacctggtggcgtccgatcccgacgcgtcgtcggcgacggaggaaggcggcgacacggaggcggcgttcctcaaggtgttcggcgagggcttgcgcttcttctcggcgtacatggattcgctcgaggagagcttccccaagacgagcaacgagaggctggcattggagaggggagcagggcgcgccatcgtcgacttggtctcgtgcccggcgtcggagtcgatggagcggcgggagacggcggcgtcgtgggcgcggcgcatgcggtcggccgggttctctccggtggcattcagcgaggacgtcgccgacgacgtgcgatcgctgctgcgccggtacagggaagggtggtcgatgcgcgaggccggcacggacgactcggcggccggagccggcgtcttcctcgcgtggaaggagcagcctctggtgtgggcaagcgcgtggcggccatgatcggatcgtcgtgatcgatggatcaaagctcaccggtgagtggaacagcatggaagaaaagagctccatagctaagcaagcacgcatgcatatccaccatgcatggggtaagctagcaagctctctcgtgtgtgtcacgatcgacattaatggcggctcacacaaaggcatgtagggttttgaaacagcgtaggaagctacagaaatggatcacgtacgtacgtacacattgggttgcagcgatcgaggagggagatgatagttttagttcctagatttgcatccatttttattcatcgatcgccaacaagttcttggcgagaagatgattttgatttgcttgcttccatcttcttgtttatttttccccctttcgtttgtgtttcttcttaatttgtaagggttaacgacatttttcttcactctggagaaattttacgtgcatggtttttatcatgcgtacctgcatcgatctgatcatacctatatatattcatctagctagtagctagcatcttgcaaacattcatgctttcttgcatggttgttgagatgttacttcttgtcatcttgatgggagaaagtttagggcagacatttgcacggcctagtacttctagctagtcatcaaacatgaaagcactaattaaagtttgctactttgctagtgatagaccatagatatgtgcttacattatagtatttctttatgtacatgcattgtggttaaattaattaattaatcatccctttttcatcattctatcccatttgtaatatcactgcgctcaaaccacaccactaggcgtatatatatagtttggtcatagaagattatgcatgcatggcatggcatggatgtttatttaagttgtaaaatgactccccccgttcaaattattatggtttggatccttatttataggatatgtgatacatcaagttgatactaaaatactactactagtagtagaattcaagttctagccgaatatatattaaataacccctgatcctacacaggcgttgatcgatatatacatctgacttatttatatatgccaaattaagtagttggagcaaattgacctgcgggcctgctgtaagcattggttaaacttgacaaatggccggccttatgttgatttggttaagctaaagctagggaccatttattttctccatatatactactctctccgtttcataatataagtcattctagcattttccacattcatatagaggttagtgaatctagacatatatatctatatagattcactaacctccatatgaatatgggaaatgctaaaataacttacattatgaaacggatggagtactaatatctgatatggagtagtgaaaagatctgtcaatagttttgtgttcatgtacgtagttggtccaagaaaccagatcaagttttgttgactattgcaggctaagacctttgctatcttttgaaggaatgaccggcctgtcgttgacagattagtttctctcctcattaactactacttaatcagctaattaaatacttagagctttgatgctgtacagtataggacaacaagagttgttaagagaaactaatcagtggcgcactatgaaaacatatttataacaggttgacgaataacacaagagaaggatgaggaatgccagttctctcagaggattaggtgatggggtgatatcatgagctcagaaaccatttctagaaaaatcataagcttgcacactttctccttgtccttttcatgcagaagctgcagccgtcccactatagcagattacaatcttattttgactgcgtgcttgataatcctgctgcactttactttgtcctcagctttgtgtatatatttattattactctgtatcactaatgtctgacttgcctgttagagcacgcacttgctgtaaaaaaacgaaaggaaatggagtagttcataatcatcgtggaaaataaaacaaaaactttagtaattaaattaaattaaatgctaccagcaggagtatgtcgcaaacggcacgcagacaggatcacaggagctcacatatacctgaagaaaatgctagaaactgtagctctgaccgaatccgattcctgatctaattccttccgctggacacatcacacacatcggtgagatttcatgtgcagcatctctcccattttactggctgtggttggtatgatatgcacgctagccgtcacacgtacgctgaacaactgtgtatatgagattgtcctttttcctttaaccgaacggccggcgatcgaggcatgcatgggtgtacatgccgcctgctgcctacatgcacgtcagcatatagtagtacatgcatacaccgaagagaggaaggatcatatcgaaggtgctcttcgttgttccgatccgctcgaccgtttcccgcggcgatcgcgcaagccgctaggctacaaaaccggccgcgcaccgtgatgggaaacgtacgtcgtcatgggggcgcggggggtcgttatcgcgcgcgtcggcgccgcggccggttggggggatcgcgggttacgtacggggcgcggcgcgcgtatgcgtgagagatccccgtgtcgtcgctgggccggtgtgggggcgtgcggggcggacgggggggatgcggacgggggcgggagggaggcgaatctcgtggcggggcgcggggtggaatctaacaggagaaggtggtggtggacttggagtggacgggacgggacggacggccggctggttggcgggttggctggatggctagtggagtgcgtgcgtacgtgcgcctgcctcctgcgcgtcgcgtacgtagtacgtgccgggacccccacgatctttttcgcctttccgtccgttttctcccgcggaattattacgccgatcgacccatatgcaccccgcgcccgcgcgcgcgcgcgtcatcgccgcgctccatctcgcgacacggatcgctgtccgccgcgacggcacgtactacgtacgtaccggccggggacagcatcttggccccctctgctgcccggccgctgcgcccagcttagcttgcatgctacttcttctcgtgtacgtacatgcatatgtgtgatctagtactggccggccgatcgatcgagatcgatccaggcttgtctcgtcctatagtatatggatctgttgatcaccagccacaactaagggcatgttctaaacagctaattgaaaattgctactcctcgttttctgttatcatattttttaaactgttaaacggtgttttatgcccaaactttttatataggatatgctttaaaaatcaaataaaatcatttttcaaaatttaaataattgatactcattaatcatatgctaataattgtgtttcttgtttttacatacagccaaaacctgcagccgaaaagaacacgcctaacaacggaggcaatcgagttagtattatctattatatactaaaagtcctttaaacttcctagaaacactcttaagccgtcacttgtcacttctacaaacgtttctaagtcgtcacatggcactatctaatctcaccgttgatttttacactgatggacctgttattttacaccattagattagatttattatttaaaaaataataacttcctcatgtttatatcataccagcgctactactgttgtgccgtacgtacgtactaagttaataccatacaaacgttaatgttgttcttccggtacgtacatccatacacgattgaacgtacctacgtacgtacacaattgaaaacaaaataataaagcttgctaatgtctgccggaagaaaaaaaacatacgcatgtacataaaaaacgacagaaaaaaacatacatccataaaaatcgacagtctcttaaaatttgataatctacaatgtaaagttaaaatatattacttcacaaatataaatatatttagttaaataaatatttataataaatatccaatcaatgttccttaaaccatcttctaaatctatctattatataccaaaagtacattaaactttgtacaaacgctcttacgccgctgcctacgtgtctctctaataaattagataaattctaaaaatctattatatattaaaagtccaataaatatcgtacatatgttcttacgttgtcacatggcgctctaatttattagagaaatcctagaaatcgagagaacaaaaagaaaagcatccgatcttcaaatttcactgaaactggtggacctattattttaaatattagattagatctattaaaaatctcatgatactaatctctataaaaaaaacataatgtgcgtatgtgcgtacttcgtatgatcgccctcctcccgaaaaaaaaaaaacaaaacttaaatacctacaccatttacgataaaaaaagataaagcaaaaaaataaaaataaaataaaacacgcacacgtacatagtagaattggaaagaaacactaaccatcagtgccaacactgatgtgttgtcaacggtctttaatctacgattttattaaaatctttattactatacgagacacacttactgattctaagaatgtatttattttattttcacaaactaatttacactaactaattcgcctgattgcacttagtgttgggttcaatagtgtataacatttgtccatcaactatattcggcatataaatttctatcaaccataaaaaataggaaaaagcacgaattacctcctcaccctctgaaccatcgtgttcgaccgaattacccctgaatccgaaaaccagacattacccaccctgaattttcaatactggacgtataactctccttgacccaatccgaagcggttttgttctgcgtggcatacgtgtggtaatccagaggtcgagtcgccgagtgagctcgagacggcggcgaataaatttattaaatcgactaagcttaataaattataataaattagtcggggataccgtaagaacgcgtatcagctatgggacaccgaaaaaactggtatttagttgctggacacccgtgacattattttataatatccaaaggaaatggagagagaaacaaaaacaaaagtatgattgtgccccttgcctaccaagtccggctcgcatacacctccgacactgcaactgcacccgttgccggtgaggtgactgtctagaggggggagggggtttcgagatatggtattttgtagatttttatggtggtacgtctctttagctatatttttttaaggacgtgactacacagctagtggtagctggtttagacaaaccacctaccactccacatatgatagacactatccacctatacttcaaatacaattttctcttaaactactaatccaatttacgatatgattacaccgttgtgttcgtaacaattaaatctttataacaagatctcacatgattatattttgatgaaaaaatataaattacttttataatatatctaaattacttttagatttcactaagttacttcttaggcatataaaagtaattcaataaagcctaaaagtaatttacatatactatagaagtaacttataacaaaaagaaagtaacttctataatatatgttaattactttaaaactttattgaatttacttttatatgtttaagaagtaacttagtaaaatctaaaagtaatttagatatattataaaagtaatttgtgatttttttatcaaaatataatcatttgagatcttgttgtaaagatttaattgttacgaacacaacggtataatcggattgtaaatcggatgtgtaatttaagaaaaaaaaattatttgaagcatagatggttggaatattttttctacttgcttgatcaattagtactatagtaaagtaagattattcaagacacatatctggacaatggctgatcgtatctggacaatggctaatagcgtcgctcgttatgactaaatcgagagagctctcgatttagattgtgcgtatatgttactattgtcccttgaccgaccagaccggccagtacaccccctcatctatgttattgctatcattatgtggttataacatgtaaacacaagcagtttatgttttcgacccggtccgaaaagtatggaattcgctttaaatcggatcggttttgatatgttgtgtaaatcttggttcggaccattctgttttgcctctccctaaatttgctgtagtagcacgctagcacctcctcgatgtaatttgtactgaactcaattgcccacttattttctaattagtaaggttgtacgttttcaattaaaactaaaggagggtgtgatggattatggtaaattaattaagtcgctatcaccttgatgtatagaactgcgtggagtaccatcacctcgacacaccagaaagttttcgctttctgagatgtgggtcaaaatgggccaccagcagttccaattttcaacccaattctgagcaaatcatgatactagcggtccttttgcagcctttgtaatagttgggtatgcatgcttttggttttatccaatgagaaaaaaaataaagggctactaagctttttgtgcagtccagtggaggcttctcttctttccggtcatatatattttgtaatacaagaaaacatacacatatactgctgagaactgatcccttcagaagttgctcataaactacgaagcaagttgctgtggaccttgtggtttcacagccttacgactgtttgatcaacatccaaaaaaaaaaaggagaagaaacggagaaaggtatatagtgatcaaccactcaactcatagctagaagacccaaattaaagctggacagactgctaataataagaattgtttgaaccacacaatgtttgtgctattatattagtttacacccaaaaaatcaagaatcatgcatcagctggtacttactccatcaattccaattccaagtccatgtttcctggtctgttctgaacgtgtaaagtggtttttatttttaggctagcaaaattttcagtgtctttcaaccatgacatgtttttactatgtttacaaatagatactcccgacgttttgactttggacaaaatcaaactgctttaaatttaaccaaatttgtagaagtaataataatattttcaactcaacacgaatttattatgaaactatattcaattattgatttaatgaaattaatttggtattataaatattattatatttgtgcataaacttagtcaaattcaaagtagtttgactttgacccaagtcaaaatatcttataacctgaaacggaggaagtaatacaaattttgaatgttctacagcaacatattaagatcaattttactactaaattaacactcaaagtttgtgtagcttgctggtgggccgtgtatatggaggatatcaaaaattagtaatttgttcaaggacattttcagcctaaattgaagagagaaatttttgaaaagatgacaatgtccttagagtcaaaagcttctacgaccctagcaatgcacttggttgattgcagatttagagtggcataattctaaattttcacttcaacgtccatgttacgtacaatcctgtggtcttaggggcattctcgtctattgaagaatttctctctttaattggactgaaagtgtcttgtagcaaattactaaatttttaggtgtcgtttagtcatgtaattaacaatctttgatgtcctgtaacaatatgatttttaacattatgtaagtcaccactaaaagcaattaatcacaaggtgaagtttatctggttttgaaggtttagagtgaaaaataattagtttgtgttcagaatgaaaatggacttggatgaaagtttggggtccaaaattggactacccttatttaaaaaacaagtacacgacctcagcaaattaagtactacgttctatatatctaatgaagagttagcaaccaacttattcagcaagtaacaagggatcagttgtctcttggtatccatggtggcatggatgcttattagttttctcttggcaagaacttccatattatcccatgtgcttcactatatgatacactcaaattaatatgttgactaacaagtgatcagcaaatgacacactttcatgttgcattgtacctagtactatagcatatgcaagcaataagtgagggaatattgttttctttaatttgtgaggtttaacttgcagtggcaggagtagtctttcaccttattgttgctgaaccgaagtgtactggacaagcctaagagctagctatgcattggaccaagggaaaattgtaaccatgccattataaggagggtgagtgaggatcaaatagtgggagctcctttttaggggggtggaggtgaaggtgcgggcatggagagacatggcccttctttttctgcccccggcaataacccctttgcacaggtcctcttttagggcatggggttaatactagtttctccttgcctgtacagtcgcatgtctcttattgttatgatatgcagcaattggtgtttgttctttgcaggttcccctccatatgcaaactccctctctctacatatagagtatatgtacatgtttttttttcccatagcacttgttttatactatttttctcctgtcttgttcttgtataggagtactattttttccctgaaggtgttactgttccaaggagcgcgtggtagaaagacaatcattccaaacttctgcatatatatgttcgcgaggttacctagagaacgatgatgttttgctgcatttttagttcattctccttgggaacaacgttaatcctctatccagtgatgacaggaagcatctcgcgcatgtacatgtacttgtaatccttccctaccaacctcttagcgacagattcgaggaaatggaatgcttcttgaatcttgagcttaattgccactgtcatatggcaaatagtttcagataatgcagcagtacagttccatgatataattgtacccatgcaatgaaccaagctatagctagcaaaaagactgatttttttttgctcgagaaacgatgcaattaggtcgtgtatgagagaaagcaaaaacttttggtccgttcgctctcgcttgctcgatcatgcatggtggccatgacaaattggcaatggccctcagttttaagtggtgatcgccttgaaaaaagcctggagttcttcgcggtgtgcagcatgcgtgtatgcgagccctttttgtcaggcgacttgcacaagcctgaccccagaaagaccgacaaccatccaggcacgaaaattcatgcaatgctccaacattgcatccattggcagctagctcgccggtagcctctctcccctgccactactacacacattttatgcatttgccccatatccatcaccattattctagctaccactacatgcttacctctagtcctagtactagctagccacttcgccaagaaaatgcaatgcaaccgcacattccgtcacataaaaaaataaatctagtagctgatattggtatatcctactactacgaatataaacaaatattatggtctgttttggtttaatgccaagacttgccctaccaaatatttggcaatttaaatagtgttttgtagatgtttggattgatgcgaatatttgccaactcatatagtccaactctactaaaacattggtagtgccaaaacatgtctaagatttggcactaccaatagtttgataaggattaaggaatcaaaccacataaacccatccagattggtggtactataatatatcaacatccgatcctaaattgattttttgtgggacggatgaagtatgcaagtactccctcccatatgtctcgtgatagatttatttttaatggaatggatggagtggtagcttggtatctgctacctcctttgtaaaatgtagttgtttttagcacaataatttgtctcaaaataaagctaattcttgatttattcacatacctccttctctcaaccaatgaaaactattctctttcatatattttttcttctcaaccaatcacacattttctttaatcattctcacctattttcttaatactcgtgccaaccataaaaatgattaaattttgtactgaggaagccgtgaaggtgcagtgatggagacacccatattgccagtgagatactatatatgctagtacttgtgacttgtcctactcctactactactcctcccgtcctccgatccattgcttgcatggatcgatcgatcggtcactggttcacccacacactgttgagagtgcaacatcgtgatgggatcacatccacatctctatggactctatccccaaaggaggagtactttgcgaatggaatcatgcagaggaggaaagcaaccacgcattgttgcagttgcatatatatacatactccatggagaagagaagagggcgattgctgtgcaaaagtagtacgtgcacattgcccgcgctggggcctggttttgcagaatgattccatgcaaaagcggctaaactgctcgcgccattgacatatgcacatgtcctccgtccgccgtgtgcatcggcctttcagatgaaattcagaatttcaactgttgagagtagcagtaatacgcatgcagtcatgcagagtacgtcttgtctgaattggacgttgataccggcggaattaatggctgaagttctctgaaatgtatctgccagatcgatggtggcggatttatctgaaatgaatttatgtaacttacagtgattgcatggtactactactaattgattataagctctatatttgcttattgcagtgtgtacgtagtacggctatatatagttctattgagaatttcagtcgatgaaagaaagagaaaaaaaaaagaactgtgatctatatactgatgcatgatcatcgatggagagcgttggatggcgaaatggcgatgggggaagtggcatcgaaacggagagagtggtttcccccttttttctgcagattctctctggtttttgatgggagaaagataatggcacgtactgtgagcgtaaactgtgtggcagtttgtcgtgcctgcttgaacgtagcggcgaatggccagaacaaaaacatgtccaagatggcagacaacgacgcttgctcgccacgcacgtgccagtgctgcgttgcacagctcgacacattcgcagaaagctacccctttttaatattcatcttcagatacaagtattttgtcctaagatatactgatatagtatgtgtatattcaccggggaggaactataaacttttggtacaagttcaccacacacattcacccgaaaaaaaaaaaagagtttaccacacgcattcaccgtcaactcatccaaataatgacatactccatgcatcatctgcagagatcagtcatcagatgatcagatcaatatgcatcatctgcagcgatcagtcgatcatcagatgatcagtggtcagtcatctgctagctgctaatcaacggatgagccggaggccgtctggccgtgcgtacgaacgtcaccccatgaccccatgacccagctagctcctgctaacgatcgatatgattaggcgtattcacgagctcgaccaaacggaaataaacgcatgcatgcatgcagacgcagtgctttcaaatcgatcagctactagtatatacgtgtagtacgcgtactcctactgatcagcgtctcgatcgggcccaaataattaactggccggctgggctccggctgcagcgtgtgtcacgccccggcccgaccggccgggccagcgagatcgatgcatctagcttggtgtatatcctagtatagtcccgttgctagtccagttgccgagtgccgaccgtttgccaagagtacggaacatgtgtacatgtttgatggctaattgaaacgacgtgagaacagcagaactcatcgtcgtcacagattgatcaactgtctagcgatcgatacgcacatgtgcaaaagctgcagggcctgtgtacaaattaagctagcgctagctgttgttttaattgagagcttatcctcatttggtggatcaacaacaaccagctacttcctccgtcctaaaaataaaacaactaattatcataattcatcttagaaagttgttttttaaacagtggatatatatctagattcattctttaaaattagttttttaggatttatagaggggtatgactaggggtgaaaacgatcgagtaaattcctgatcgatcaagcgttattttcatataaggggtaccgtttccgaccataccgtttttagctatttataatttttgttttttctaatttctttctatattatattaatattgacaccaagtagtttaaatgataaatatggtcaattaccggccgatcgagcgtcattgtcaaagagacattaccatttccgaccgttttcacccctcaggtatatctagagatggtgtactgtagctaactacgtacgcactgataactgattgctgctgcgtaattgattcagcgattcagtggatgattagtagttgtccatatctaccccagcagatgctgaatgtacgttaatctacctccccccccccccccatnntcatnntntaaaacacttccggtaaaacatttacgcattctttttcttttccactttccaataattataagccgccccaaacagaggttataaatatacgctcagaaatccagaaggtggccaatctgtgttgacacataatttaagtccattggacttataagtccccggtcctaatccttctgctacccaaattgatattatggcaggtactatgcctatat

SEQ ID NO: 5913 - DNA, 13076 bp, Oryza sativa
cgttgtcagtagcacacgcatctaggcggcggcggccggtgcgcgccgcggtggcggccaccggcggcgatcgaggtgagcgtaacgtggcggacgagggtggccgcagggatcgttggatgggggatcgatggacctatttatagccctcgatggatttagtgtgttaaatatagtacggagtagttagcaacagaactaacagaccgacgtacggatcggttcatcatatccaccgactcaaacacgtcacagtggacgccgatacttcgtttcgtggtacgtacgtttagacacgatcagtttcgttcccaattataggaaaggttttcctttaaaaaaaaattagtataggagagcacgtaccatgccgtcttttaaggttcagttttattttatttttctgataaataatccctctatacaattatcaataaaatcaggtcatatctttgttcgttgaaaagatatctcctgactttgtgtagtttacagttataccacggaccccactttactatagtccacatgttacgcgctggaaagcgatctcctgattttgtgtagtttacagttataccaccaacctcacctacatgttactgcaagtcggccggtctcttcattcgtctccgttcggtttttggttttgtcgccgtttttcttttcaatccttttttttttttgcacgtggaagggtttttatgggtggacccgctttactcccgttttttttaccatccggtagttctttcgtcgctggtttttccttcgatctccagccgccgtggagccgaaccttactgcaacttcgatttgcctctcgatgtttcttcctccaattaattaaaaaatcgattatccactcatttctcattattttctccatgattttgtctttcaattcgacttaaatttggaaaattatatccctatttaaccgttagtggccgtctttttcccgagttttttcaattcggctttaaatcttccctgatttccccttttaattcgggaaattcaattcctatctagagcaagtacaatagcaggttacaagtcaactataagcacatatatgaagtagaagagaggagagtcacggctttaattcggggaattcaattcctatttagagcaagtacaatagcagaatacaagtcaacaagtaaactataacaccatatgaaagagagaggagagagaaagcgtgctacagattggtagcgagctactacacggattccaaaagttatatgtgtataagaggtgagactatatattaataatatagtaagcaactattgtatgagttgactattaaattggttataaatgatttggatttagtagttagctatactattaaacttttgctcttataagtaactatttgatagaatgagctattagattgactatagatgatttggagccagtggttggctatactattaaacttcctctcaaccatttggagccggtggttagctatactattaaaacttgggagaatttgaaccatgccacacaaaattttgtaaaatttgtgatatgccaccctgacccacatgtcattgactcatgtgggtcctacatgtcattgagatacgggtggcatatctcaaattttgcaaatataggttggcatggttccaacaaacccaatccgtggtagatgatgtccggcaagcgagcttcctggccatctttattcccgagttttacatattttgattttggaaaaaaaaagggaaagagatgattgagtggatcaaaagccctaaaccaattttaaattttaataaataaagaaagatcagaggtgattgagtggataaaaaccctcaaccaatttaaaaagatcaagaatgatccaattttaaaacatctttgccgaatttgatgggaatgatggcatcggcatcggcatcttatggacagtatgtgcgagctgagccggcttctctcgtggactggccgtaaagagactgaaaatcgtggactgggccgtaaagagactgaaaaggaagaaaagattgggctttagtccaaaccgggactgaaaatgaagaatttattagctttcagtaaaaaaaatatttttcaatttatttctcacctcccaacaactatatattctatttctgaaaaaatatctttacttattacaacgactgacatttttcatagcattagagaaaaaaaaccatgcatgattatgtgttgcaaatgctccttactcccgtagcacggatgaatgatttacgggattcagttttatctaatttttctcattttatctgatttttgtatcgagttcttgtttatcgtaagaggatttagtatgaataatttcacattataataggtgtgaaataaattctctaaatcaccctgagattaactgaacaaaatcacccctggtgtgaaattaccctcaattattttttgtgtgagagattaaccgagcaaaatcaccccaatccttttgtgtgagagattaaccgaactaaaatcacccctcgtgtgatagattaaccgaacaatgcaaaatagaaaaatatccccaaccatatatactccctctatttcaaaatgtttgacaccgttgactttttaacacatgatcgttcgtcttattaaaaaaatttgtgaaatatgtaaaactatatgtatacatcaaagtatatttaacaataaatcaaatgatataaaaagaataaataattacttaaattttttgaataagacgaatggtcaaatatgtacttaaaaaatcaacggtgtcaaacattttgaaatggaaatggagggagtatggattaagaaagacacgttaaggatacaaggaaccctaacaaacattgtgtctcaaaacggcagcaaccaatcgtagacgcgatgatggcccacgtaatctgatttggttatacaaacgtgttgccacactgtggcagcctcctcctccgtgtacttgtgaacgctccagctaattttgtcatacacgcctagcacactagagtcagtgtcataacgcaagctaccacacgtagctgataagtccgatcgtcgccgcgcgccgcgccatggtgccgtcgttcccgcagccggccagtgcggcggcggcgacgcggccaataccggggagctacggcccgccgctgctcggcccgctccgcgaccgcctcgactacttctggttccagggccccgacgacttcttccgccgccgcgccgccgaccacaagagcaccgtgttccgcgccaacatcccgcccaccttccccttcttcctcggcgtcgacccgcgcgtcgtcgccgtcgttgatgccgccgccttcaccgcgctcttcgacccggccctcgtcgacaagcgcgacgtcctcatcggcccctacgtccccagcctcgccttcacccgcggcacccgcgtcggcgtctacctcgacacccaggaccccgaccacgcccgcaccaaggccttctccatcgacctcctccgccgcgccgcccgcaactgggccgccgagctccgcgccgccgtcgacgacatgctcgccgccgtcgaggaagacctcaacagggcccctgaccccgccgccgcctccgccagctacctcatcccgctccagaagtgcatcttccgcttcctctgcaaggcgctcgtcggcgccgacccggcggcggacggcctcgtcgaccgcttcggcgtgtacatcctcgacgtgtggctggcgttgcagctggtgccgacgcagaaggtgggcgtcatcccgcagccgctggaggagctcctgctccactccttcccgctgccgtcgttcgtcgtcaagcccgggtacgacctcctctaccgcttcgtggagaagcacggcgccgccgccgtgtccatcgctgagaaggagcacggcatcagcaaggaggaggccatcaacaacatcctcttcgtgctcggcttcaacgcgttcggcggcttctcggtgttcctgccgttcctggtcatggaggtcggcaagcccggccgggacgacctgcggcggcggctgcgggaggaggtgcgccgcgtgctgggcggcggcgacggcggcgaggccgggttcgcggcggtgagggagatggcgctggtgcggtcgacggtgtacgaggtgctccggatgcagccgccggtgccgctgcagttcgggcgggcgcggcgagacttcgtgctgcggtcgcacggcggcgcggcgtacgaggtgggcaagggcgagctgctgtgcgggtaccagccgctggccatgcgcgacccggcggtgttcgaccggccggaggagttcgtgccggagaggttcctcggcgacgacggcgaggcgctgctgcagtacgtgtactggtccaacgggccggagaccggcgagccgtcgccggggaacaaacagtgtgccgccaaggaggtggtcgtcgccaccgcgtgcatgctcgtcgccgagcttttccggcggtacgacgacttcgaatgcgacggcacctccttcaccaagctcgacaagcgggagctcactcccagctaagctttgctgccgccattctctcactcgatctccatgcacatatgcatgaagaaattaattaaattcaagttgctagctccattttttctctttgagctgctgataaaaaaaacatctctattcttctgtgcaataagccaataattaagcattaatcagagcgtacaagtaaaaattgttttcactgttttatgtggatatatatatgtacagggatccaccaaaattaatttgatactacgtagtacgacatttgtttagggatcaacgattcacgtttcacttttttttacagcgtcaacatatataaacacatagatatgagagtatttaatatacttattactgacatactcgcttcgtcccataaaaaaaaaccaaatcctatgtatgaatggagtattctagtagtacagtagtgtaaaaaaccgccaatagattgatcctgaatttcaggtcaaggagacaaagcaactactccatagaatcatagtattaggatatgtttcatccagtaaaaaaatatatttgaagatggggagtaagaaacacgaaacggaaaaacgagtgaagaagagaagacatttcagggtctgcttgtttctgatgccaaaagcatttttttagataatgccaaatgcgtggacagaatgcttgttctaataccaaatgcatggacagaatggttgataggtatctgcttgtatcttgctcgatggaaaccgcatggacagcgacgcatttcttctccttttgcatgttactactgaacggttgacacaggatatattactggcgaaaaagtacatgttaacatgggttcaaacagtaacacgcatttcaatcaagtgtgcaagtgcaaacacaaaatgatcgtctgtaaccgtagcgcgtaaacaacaagacgtacagttatactacctccattccaaaattttgacgccgttgacttttttaaaaatgtttgtccgttcgtcttattcaaaaaatttaagtaattgttaattctttttctatcatttgatttattgttaaatatacttttatgtatacgtatagttttacacattttacaaatttttttaaataagacgaacggttaaatatatttaaaaaaagttaacggcgtcaaacatttagggaaggagggagtatatgccaaacatatccctgtatggctatattgattggcaacaaatacagtactattgatcccgtgttgtgccaaccacaacagcgacaagtatcctgtcaatttgtggtgctaacaacttgccattgataagtccagattaactagaatagacgcaccaaggcacatacatgtaaatgctagctcctggataggcaaaattgatccaaagaccagctaaactgccaaatcgttgggaaagtttacataaatgtgtctcccttgcaggtaaacaaaaacatatagtgagctgaagaaggctagttcttcgtgcaagagatcagctgtgcaatcctcataaaagggatcggctgatcatagctgatgaagaaaatgaatttgttgatttcatgaataacagtggcactaaaaggcattctgaatataaatgaaaaatacagtgttagaaagacaccaaaaacaaacaaacaaagacttgcaaggaaaacagtacaagacaaacagtcaccatagttctacttctttcacatgtgaaacatggctaggaaaggaaaatgaaaacctagacatgtaggaattgagtatacgagaattgccatggtttgtaatttgtactctgtagtttgtaccataggcattgcatttattcatttactatggcaagagaagaacagagaaccaagagcagttcaagaatagatagcagtctgttagaggagcgagttcaatgcagaagagaagttataatcaattggtatggaaacaatggatgtatcaaatggcatcggaaaatgtcgttgctgcactcacatatctagctacaaaaaggacagatggcttgaaggaggagctagctacgtacatcatgatggtattattccaaatacaatctgaaacaggtttgtagcctgagtttaaatgataaaaaaaggagtaactgaatataattttaaatggttggtttgccaagtcagtaagctatacaagcacagcaatgtacaaggttatgaatatattaccaacaataatctgtctcaatgcagaaaacatgtcgaaataacaaagcacgaatgaacagagcaacgtctgtcatacaaaaaactaaaatttcttgtgtggtcttagcagagccacttatagccaacccaagtacagcgaaacgtagtcatggcagcttaatttctcaatgaaattcataacaagcacatgttcattgattattaattaaacatgttttcttttgctaaggcaggtaaatgtacctgcccatgtttgcctctatattggaattaatttgtttgttttctttccatataaaaaagtgctgggaagcttctattgcatttgtatacacttcttatatattctgtaaattagttaacttattattattattattatctcttacttatggaagaaaagtaattaaccaatgttgcgtgtcctcacaaggatgtgtttgttctagttctcgtaaaaagaaaagaaaagaaaaggaaaggaaagagaggaggtgggtttggcccaactagaaaggcatctcgtacgtaagcccacttagcccaactagagaacgttgtaggggttgcgggaatcaacagccgccgggagaggttaattagggttccaaacttgcatggagcgagagatcgagatgagcgagatggagacgggtaaggcgatcgagttggtgttgaagcggttggatgaggtgcgtacgcgcatggatggggtggagaagctgttgcgtatactcatctgcagggaggagaagcgagcgaaggttgggaggaggaggaggaggtcgacaagatgcagatggtgacggcggcggcaggtggcggtagcagcagcaggaggaggaaagccatcaagagaaactttaaggctaaagaagcagaccgcaaggagacggaagaggagggcaatcaggtgaagaagatcaccagccagcagctgtaagtgtatttaagtactccctccatattttaatgtaggatgccgttgactttttaacaccactcgtcttatttaaaaattatatgtaaatataaaaatacttatgtcaaaaattttatgcaaatataaaaatacttatgtcatgcttaaagaatatttgatgataaattaagtcgcaataaaataaattataattacataatttttttaataagacgaaaggttaaacgtttgtaaaaaaatcaacagcgtcatacattaaaatacggatacggatagagttttatctgtaccgatggatgatccgatccagctattatccatcatccattctgagtttattggtaatgatgatactactgatatggtcaatttaaccctaactagttagtataccaatgttactatgtgatatatctgggcctcccaaaaggaagaggaagaggaagaaggaagaagacgccagcgagaagaagaagaagaagaagcggcagacggaggaagcagaagcggagaagaagattgaggcgaggaaagccaaaaaagaggcgtacgagcggtacctggcgaatttctttgattttgagcccttcccacgcacacccgaccacattctcaacgagatgcccgaggaagagcgtgccggagaaaatcaacttgctgccttcgctgatagtattatggaacgtcgcaggctcctataccagagatgcatcaaggactacatggacaaggacaaggacgatcacgaatagcaagtgtcttcgtctgtctgtgatcaaagctactactactggagtatcctattctgagttggactgtatcgtatcgtctcacttcattatataataatgactatgtcatgatcgatgtaatcggcactgagatatattaatattaactactccctccgtttcaaaatgtttgacaccgttgactttttagcacatgtttggccgttcgtcttattcaaaaaatttaagtaattattaattcttttcctatcatttgattcattattaaatatatttttatgtaggcatataattttacatatttaacaaaagcttttgaataagacgaacggtcaaacatgtgcctaaaaagtcacggtgtcaaatatttcgaaacagaggagtatatattagtactaatatcagattcttctactgctgacttcctgaatgagacgaacattcgatgcaaaattagagaatggttggtagtacgactgagatagtcagatagatgatcacgttgggtgtgtgtgtttgtcttggagggctgaaaacgacagttaagcttagacctgctggccgccagctagactccattgtttcgcttatttgcaaacagaaaataatttgcaaataaaacttttatatatgtgttcttagtgataaaatgcaaaggctgaaaaaactacgattaaaaaaaacctcaaaatcaacttaaggttgttcaattttggtttataagcatacgcataagtcaaaagatgaggctgttagtgttaatttcccagtggccaacaaactgtttttgatcagtgaagaaattaattcaaatgaatgaatgacggagtattggagcttgcacacttaagtatcttagttacataaatgtacgagcatctccctcacagctaaacaaaaacaacgcaaggctagtccttcagttctcatgcaggaaatcagctacgtaatcctcgtagaaaggatcgagtttgaaccaacgtaatccttataaccaacgtaatcataactaagaacagtggcactaaatgaccacactctgaatataaatgaaaaaaaaaagcaccaaaaaagatcaagaagaagaagctgctgctttcaaggaaaacaatacacgacaaatagtcaccatagttctttcacatgttaggaaaaaagaaaatgaaaacccaaacatgtaggaattgagtatacggattgccatggtttgtaatttgtattatgtaccatagacattacatttactatagccagagaacagagaagcaagagcagttaaggaatagagaaactatcaatgggtaattcctacatgtttttatattagaggagcgagttctatgcagaagagaaactatcaatgggtaattcggtattggaaacaaacatgtataaattgacatcgaaaaagctacaaagaggacagatggctttaagaaggagctacaagatgcattccagccaaacttgaaacaagtttatcacctgagtttaaatgacaaaaaagcagtaactgttcctcgagttgaatgttcacaccaaaagttggttgactggatcacggcaaatgatggatatgaaaaaaaaaaaaaagggtgcagaaataccatcaaaatgacttatctttaccatggaacctggaggcaggtcgagctaaaaaacatacatatctaacaaaaatagtacaacagatacacatcatgtaactgaataaaattttaaatggtcagtttgccaagtcagtaagctatacaggcacagcaaagtacaaggttgtgaatatattaccatcaacaatctgtctcaattcagagaacatgtcgaaataacaaagcacgaatgaacagagcaacatttgtcatacaaaaactgaaatttcttgtgtggtcttagcagagccacttataaccaacccaagtacaggaaattgtagtcatggcagctcaatttctcaatgaaattcatagcaagtacatcttcattgattattaaacatgttttcttttgctaaggcatggtacataactaaatgtggggtttctaaaaaaagaaaaggtaaatgtacctgcccatgttgtctcccaggctaaaaaagaccacttggccaatagctcagcaagcaaaaacaaaagaaataaaacactgctcttcaattcaaaaggaagatagtactatcttctcatgaatggataaaccgctacgcacccatggcaacccgtttgcccctcttggatgttgatgatgcattctctgccaatatcctagacaaaatgtctgcttgctttgagtaccctccagcttttaagctgtccatcagggcatcgcaacccttttgatccacgacacctcctttgttcttgatcttgcaaagcatggagtatgcaggcaatgtcttctcctcagtgtacagggcctccaagactctgtcataggttgagaagctgacatcaaagtccctgtccaatgcaaaatcagccaacttatgtgcctccatcactttgtcattctcgcagagggcaatcagcaacttatctagatcaggcaagcatccattttccaccatcagattgacacggccgattgcttcctccacatggcccctcatgaagagagcttccagaatcttatgagccatgtccatgttctctgtaacccccttctcaatcatactcttcataaccctgctagcagtctgaacccggccactgttgaaaagcgctaccatgacagacatgaacagggatgggctcggtacatgcccttgttccatcatactgtcaagtgccgtctttgcatcagctggctcattcttcttcaggaagctatcaacaagcagtgcatgcgattcagggtcagtacggacaccacggcgtgtcataatggcaagaatctcctgtgctgcttctggcacaccttcctttgcatgcccacggataagactgttaaaagcagccttgtcatcaacgcctttcttcatcagctgcctgaagaaagtctcagccttgctggtgttcccattgctgcacaaatactcaatcactggattataagctggcccttcaagcacagggctctttgggctcaacagtgtccccttctcaagaagctcatccatcacctcaacagcaccatcacactttccacccgcgcacaagctctccatcagcaccccatactgtcttggatccacaagaacatgcttgaactgcccactcttctggtgcacatccaacgcaccatccaagtcacccgctcggcatagcgtcgtcacaagcctcaaaaacactgacttgtcctttggagtgagccgccgctccgccatgtcatccattgccttccgggcctccacaacccttccctcatcatcacagagccctggcatcagagcagcaaacgtcttctcgctcaacctcaaccccttctcccccatttccgagaacagccccactgcctcctccaccttacctgcttcaacatatcccttgatcatgacattgtacgacaccgagttttgtgcaaaaccagctcctggcatttcgtcaaacactttgcgggcactctccagatcacccgcccgaacccaagcattgagaagagtgttgtacgtcgtcacatccggtgtcaccccgtgatccttcatgtccccgaacaccctcaaggctgcctccatcttcttgcacaggccgaacccccagatcaatgtgttgtaggtggacaggtcaggggtgacggcgtcggcgatcatggcgttgtagatccgcctggccatggcctctcggccgcggcagaggatggccttgaggacggcgttgtaggagagcgcggtgcgggcgatgccgaggtcgggcatcaagcggaagagcttaacggattcctgcgggatgttggccttgccgtaggcggcgatgagggcggcgacggtggcctcctcgggggcgatggagaaggagggcatggtgtcgaggaggatgcagcgggcgtggttgagcatgcggtgggaggcgaggatcgggatgaggagggagaaggtggctggctcggggctgaagccggcgcgacggtaggcgaagcggaagaactggagggcgaggtcggcgcggccggcggcggcggccccggagatgacgccgtggacgagcggcgcggcgagcgtcggggagagcaggcggatggagttctcgaggcgggtggtccacgggcggcggcggatcatgtagaggatggtctcgtggaggggctcctcgcggcggggcgggttgggggtcgccgccgccgcctccgccggcgtcacctccggcacagcctcggcctcggcctcggtctccgggggaggtggttccggcgtgtcgagggtggagaaggcatggcggaagagaggcgcggaggggttgttgcgggagaggaggcggagggggaggtggaggtggtggcggcgcgacatggctgcggcggcgtggaggagtggagctcggggagaagagtcgagggtttaggaggaggaggaagaggctcgacaccacccacgctaaagagcgtgatgggcccatatttaattgggccattaagtgacttgtggttctgggccttttagaacccagcccaacacggcagtgtagaaacaagggattcatacgggccgggctcaacagtcaatac

SEQ ID NO: 5914 - DNA, 94484 bp, Oryza sativa
taaaccgagcagtatatcttacagaagtcacacaggacataataagagacacccacctatcatcaaaacccaattttaacataatcttttccaagaaaacccattcaactctgtcatacgccttatgcacatccaatttaatcgcacataacccccttttcccttgtttcctcttgatagtatgaatacattcatacgcaatcagaatattatctgtaattaatctacctggaacaaaagcactgatcacttataacctcaggaaggatgctcttcatcctgcgagagagcatttttgaaataactttatacaccacattgcaaagactgatagggcggaattgagccaccatatctgggttagacacctttggtatcataataatagtggtatcattccagccctcaggaattgttgcagtatttaccgctgttaaaacttcctttatcagatcatctcctagcattgaccaaaaccgtttaaagaaaatggcgtgcaaaccgtctggcccgggagctttcagatctccaatatcaaaaagtgcctttttgacctcttcagctgtaaatggagctaaaaggctccgattcatttcaggcgtgaccttgaccttaactgaatccaaaactgattcatcaagctcctgcatttcagactgaaacagatgggaaaaataattttgcaccatagaacacatagtgtcgctattctcttgtctcaccccctgttcatcaaccaacccagtaatcatgtttcttttccttcgactagaggcaaattgttgaaaaaatttggtatttcggtcaacatgctttagccaatttgcacgggcgcgctgtaaccaaatcagttcctcctgctccattaggagttccaggcggatcaacaactccttttgggcagcgatgctatcatcagtgaggggccccttctaatctcttcaagttttttttgcagcttttttatttgattaacaggtcccttcaacacctttttatcccagacgtggagctcttcatgtacttgcttggttttttgcgagaaatttggcacatctcctctggccgcagcactaccgtctcttccttgagccaacgtgcttcgaagcatttaggacctcgccttgtattggcatcagaatctgcccgcacaacagtttcaacaatcagcggactatggtccgaattgagcataccaccattctccagtcgtgcagtagggaaaagagcattccactgcgcgtttgagacacctcgatcaagcctttctcttattctccccctttgccaagtaaaaatgtcaccactatagcccatatccgagagagcacaatcagccaaagaatcactaaaagcttgcaaaagacgttgttctctcggtctccctccctccttctcatgatggaaaagaatctcattgaaatctcctaactccatccatggcctatccatcatcccatgaagatatctcaaggcctcccatgttttgcctttgtgctcccaacgcgactcaccataaattccagtaagtctccattcccttccatcatcaacaattacatcaatgaaatattcagagacatcttgcacataacataagcagtccaccacttggcccgtcactctcgaaaatgctgagatggtcaaaatttctgccttagctgttcccaaatgtgtttcagacaggaacaacacatcgggtctctcacgcctctgtaaatccagaagcgctcgcactgcccgccgcagttccatgctagtattttcattgtgcccggtcactctcctcaaaggagagcgccgattgtgcattagagttgtttgttgcaatcacgccatcttcacttctcctcaaagggctcatattactaccgagttgggaagagtgttccagcaagttgatttgctgagcaacctgacctcattagtatctcttttcccggactcaggggccaggccaccatcttcccctaaggccaatagcagtgcgggtaacacacatgccgtaaagaaccacacttcacagtgcacaatacatgtttgtgggtcccacccatgttagtaggtcccaccatctctcttttcacattcatctctccctctctatctctatccattcttctcgcatgccactgaccaggacggcaagcggcaagggcgaggacggcgggcaagaaggcacagacgccggcgagctcggacgcggcctcaacctccggtgagcttctccgacgaggacagtggcggcggcgcggaccgaagcggcgtggcaacgagctccccggcgacaccgaggtcggcgacgcggagcggagagcgtggacgacgacgaggccctccctcactcggctccacggcggcgcacgacggcgaaccgcccgccccctcctctccttgtcgggccggacggcagtgacctcgacggtgggacggctgcgcgcatggcgaggtagcgggtcctgtggcggcggcgtcctcggggccgagtggcgccggctgtcccctcctccctccgccggcgccgactcccctaatcccgaagcggaagaagccggcgagggtggcagtggcgccgaacgatgccggggacgcggcggacgggaagccccggggcgaggacggcgggcaagaaggcatggacgccggcgtggcggcgcctctcatcgttggggccggaggccacagacgccggcgcctccctccccctaccccgctccgcagcaacgggctctcggtggggtcttcctcgcggaggtcgccgcgcgacctcgtcttcctcgcggacgacgagcggcggcacggtcgtcgtcgaccggagccacgcgaccttgtcttcctctcaaagccgggtggagcggcggcccgagcggcgacggcgacgacgctgggctgagcggccagatccggcctaggcccactggatcaaggcgacgacggcgaggtcggacgcggcatcgacctcgagctcctctccttctccgcgctttccccatcgagccggcgagcttctccgacgaggacggtggcggcggcacggatcgaagcggcgcagcgacgagctccccggcgacatcgaggtcagtgacgcggagcgggagacggcaacgaggtcgacgctggagagggcgcgaggggacgacgagttggaggcacgccctccacagcgcgagctctaggcgttccctctgcctcgcgcgagcgaggaatcgcgtttccttgcttgggagcgagcggctcaacaaggacgtggtgctacgcgacacgtcggcgaaattcctagctagcacaacaaggcaacgctctacctaggagcactgtgaagggcctaagggatggttaagggggttaaatatactttttcctaaaaaggataggagcgagacagacggcgctgggggacgaggcttgttgggccggccttagcccagactcacgacgcggttgtgcgctttctaggtggacggatggatctgctcgactgctctctgccgtcgtgagggctgaagtcagacgtcacgagctgattccgcctcccctcgcccctgccatctcaagcgccgccgttgtttgctccatccctcccacgccaaccgcagcgcagccgctgctgccgtcgattccgacgcccagccttcgccaccggcacccctccccgctgatcgcctccagaccgacgccgcccctccccaccgaccgcatcgcccccacctcaccctggatcacgacgggatctcctccccttcctctcacccggtgccagaccgccgtggcttctcgctgctctgcctcttccttgtgcctcatcaccctggtgttgaaaggaagaaggtgttagaagtagtgatagttcagagatatgcatgcatgcatatgcagggagtccggtgcatgtgatatgaatgagattgatttggttgagataaaaccggatcacaacagattttgtttcctgattgtaagccacgttggaggctatttccaactgagatcaatatattcgtgcggcctcgacaagaggtgataacgcttcctaaaaaccttttatggtatcagagcccgaaatcgccagaatcagatcgcatctgttatggcgagttcctccatcagcgccggcaatcccttctctggccatgccgtccctaagaagctaaccaggacgaatttccttttatggaaagggcaaatcctcccggtgatccgcggtgcgcgtttggaaggttacctcacaggtgcaacacaagccccgtcggctgtgattgacgccaaggaaggagaagccactgtcaagaaatccaatccggcatttgaaacctggattgcggcagatcagcaggtgttggggtttcttctctcaaccctatccaaggaaattttgactcaagtcatccacatggaaactgcggctcaagtttggaaggcaatcaacgagatgctgtcctcccagtcgcgtgcgcggtctctgaacacgcgcctggcgctagcgacgacccagaaggtcgatctcagcgtctcggactacatcaacaaaatgaagatcctcgccgacgagatgacgtccgccggcaagccaatggatgatgaggaattgatgtcctacatccttgccggtcttgatgatgattgggaaccagtggtgtcttccctcgtcgggagaccagatgcagtttccttctccgagttctactctcaacttctgagcttcgaatcaaggcagaaacttcgccatgcagcagcgcatcagtcctccgccaacagcgccaaatgtggtggtggaaggggcggctacacccccttcaaccgcggcggacacagcggcaacaatggtgggcgcggcaacagcaacaatggcgggcgtggtggtggtcgcggcaacaacaatggaggccgtggcggcaaaccgcgccctgtttgtcagctctgtggaaaaacggggcacgtcgtcgctgactgtttgtataggtatgatgagaactttgtttctgataataagatggcagctgcagcctcctatggtgtggacacaaattggtatgttgacaccggagctacggatcacataactagagagttggacaaattgacgacccgggagaagtacaatgggaaggatcaaatctacatggcaagtggtgcaggtatggacattaaacatattggccattccgttattcatacccctactcgcaatttatatcttaagaatattttacatgttcctaaggccaagaaaaatctcctttctgcacgtcgtttagcccttgataatcatgcctttgttgaagttcactctcgtttctttgccattaaggatcaggtcacgaggaatcttcttcttagagggccttgccgcaatggtctctatcccattccacagtcgtcgctatcttcatccaagcaagtttttggagccatcaaacccactatttcgaagtggcatagtcgtttgggtcatccatctttgtctatcgttcaaaaagttgtgaacaataataatctcccatgtttaggagatattaatgaattaggtgtgtgtgatgcttgtcaaaggggtaagagtcatcaactcccctatcctaagtctttcagtgtgtccaataatcctttagagcttgtgttttctgatgtttggggtcctgcccctgactctgttggtggcagaaaatattatgtcagtttcatagatgatttcagcaagtttacttggatctatttgcttaagaaaaaatctgaggttattcataagtttcatgagttccaacaacttgttgagaggatgtttaatcgcaaaattattgctatgcaatctgactgggggggagaatatgaaaaacttcattccttttttactaagataggaattactcatcatgtctcatgtccccatgctcaccaacaaaatggctccgcagaacgtaaacatagacacattgtggaagttgggctttctttacttgctcacgcttctatgcctcttaaattttgggatgaggcttttcttgcagctacatatctcatcaatcgcacacctagcaaagttatacaatactccacgcctttagagcgtctcttgcatcaaaaaccaaattactcctctttgagaacttttggatgtgcttgttggcctaatcttagaccctacaacactcgcaaacttcagtttcgctccaagcaatgtgtgtttcttggctatagcaatattcataaaggattcaagtgtctagatgttgcaactggcagagtttatatttctagagatgttgttttttatgaaaatatttttcctttctctaatctccactccaatgctggagttaggctcaaatctgaaattttactcttgccctcaacactgttgaatcctgaagttgctagtaggggtatacaagaaaatggttatatgtttaatagtcctcctgttgagtctaatatttttgatgagcaagtatctgaacagggagaagaaggagagcaaaattcatatgctgcacatgatacagaaaatcctgatgatggtggcaatgatttctctgttgcttctgatgctgaaaatagtactaaggctgtgtttagttcagcgcaaagtttggattttggttgaaattggagatgatgtgactgaaaagttatgtgtgtatgacaggttgatgtgatggaaaaagactagagtttggatccaaactttgaatctaaacacaggctaatgcaagtggttcagctgaaaatagtactaatgcaggtggttcagaacctgcagcaaatacacacggcgcagaaaatgaaaacagtgctactgctgctggaagtaccacagccgaacctgcaaatggcagtggtggtggcaagtctgcgagtcgcagtagcagcagtacagcaataggtagcagtgttactgctaatcagtcggttgatgactctgtgcaggtacaacagcagcaaactagacctaccactaggctgcagagggggatacgtaaggagaaagtctataccgatggtacagtgaggtacagttttcttgcttcctctagtgaagagccacagagtttaaatgaagctttagctgattctaattggaaacaagccatggatactgaatttacagccttgattcataataaaacttggcatttagttccaccacaacatggtaggaatgttactgattgtaagtgggtatataaaattaaaagaaaagctgatggtagcctggatagatataaagctcggctggttgcaaagggttttaaacagcggtatggtattgactatgaggatacttttagtccggtggttaaggctgctactattagagctattttgtctattgctatatctaggggttggtgccttcgacaacttgatgtgcagaatgcttttcaacatggtttgcttgaagaagaggtttacatgagataaccgcctggatatgagaataagagtaagtctagttatgtttgcaagttagacaaggctttatatggactgaaacatgcactacgggcatggtattctagactaagtagtaaatgatgtgatcttggttttaagtcatcaaaggctgacacttcattatttttctatagtaaagggagtgtgactatttttgtccttatatatgtggatgacataattgtggctagttcaactcaagatgcagctgaagcgttgctaagagatttaaaacaagattttgcccttaaagatctaggtgatctgcactattttatgggtatagaggttaacaaggtaagcgatggtattttgttaacccaagaaaagtatgcatctgatctgttaaaaagggtaggtatgtcaggatgtaaacctgttgccacacctatgtctacctcagagaagttgtcagctcataatggtactgaactaggagaacatgatgccactagatataagagtattgttggggctttgcagaacttgactttgactagaccagatatttcttttgcagtaaataaggtctgtcagtttttacatgctcctactttacaacattggatggcagttaagaggatactgagatatgttaagtcctctgttgatcttggcctaaagattaacagatcttcttctactcttgttagtgctttttctgatgcagattgggcaggatctgtagatgacagaagatctacaggaggtttttgcagtatttcttggatcaaatctagtgtcatggagtgctaggaaacaggctacagtatccaggtcaagtactgaggctgagtataaagcagtagcaaatgctacagcagaggtaatgtgggttcaaactcttaaagaaattggagttcaagttcctcctatggcaaggttatggtgtgataatttgagagctacatatttgtcagtcaattctgtgtttcatgctagaacaaaacatatagaagttgattatcattttgtaagagagagagttgctaggaagcaactagagataaagtttatagcttcaggagatcaagttgcagatggttttactaaaccaattactgtttaacagcttagagattttagacacaatcttaacttagataagttatgattgaggggggctgttagaagtagcgatagtttagagatatgcatgcatgcatatgcagggagtccggtgcatgtgatatgaatgagattgatttggttgagataaaaccggatcacaacagattttgtttcctgattgtaagccacgttggaggctatttccaactgagatcaatatattcgtgcggcctcgacaagaggtgataatgcttcctaaaaaccttttagaaggaagtagcaagcaccagcggcagcgaagtcgacggttgggagaccctaaaccctagaaccaagctccagaatcgatccccttttgcctaccggtaatgggcgacccagttctagcctacaggtacggactccttcctccctctctcccagacaatcacgacatcgatttatttatcccattgctcctgttaacttggtgcgttgtttgattcccagcacttgtttcagaatgacgtgtgaaattgcaagtacagagcccagtcagtcatctcctcatcagcacggcggtacgagaagtctgggcacagcaagcaagcaggaggctagcaaaggtttgtcagctctaatccaaaaacagcacctcattgcacatattttccctgtatgtgaaagaccatataagctgtgcagacaacaggtgagtttgatctccctgtgtgtgaaaaccatctatcgtgcagacaacatgtgttattatcctgtcgtttatatgcaaactatattgatagttcgagtgactgaataatcaaaatgagtcattgtcagtgagtagtattttcatcaggtgaagaaaaatggtagataatattactatatgtcaatgtcacgcagggtttcattcagtccctacacacagattccctatgaaaaaattcattagccaggttgtggtagtgtggtcttatctgccaccagtaatgcaaaatactaatctgagtgtaaccaaatccttgaaattttcaaatattcaaatagaattgggagaactgatgaaatttcattttagaatcctgcagtgtgtgaaggtgtgaaaatgagctttctggtatctccttttccaattatgaaattatttttctttatttatgatacatctcataggtagattgaagaaattactatgacagagtgagttctagatcccaccaaaaactcagattcaattttacctccagcatagtgacatattcaatttctatctcgaatggtgcttcaatatcaatgtggggttttttttggcccttttttttaaatcttccttcctctattctttgtgtaaaaatataagatgcagtttgaaatgtattgttttttatatggtcatcggcatattcttgtttgctaaaggaagtatgtttgataaatagtatgtttcatatcagagctttttcctccaatatcttgtcatgtatggcatttccaatagcttttcatggtgtcatctcgatggcttgcatgtataagagatagacgggaagggcttgtaactataggggtaccatgattgtgtcagattgctttgacctttacggaacattatttttcaacaaaaaggaataatactgtgtttcgatatcctcttttcttgtatttcagattctgtattatgtaactcgtcgcatttggtgcctacgtttgtactatatcttactgatttacagtaggacctaagtggtgttcaatttttcatttcattcctacccctaaagataggtactgtggcatggaagatgtatgtttctgtgcaagctaaatcgcacttatgcataaacgcatggttaattactttatctcctcagttaatctacacaacttgatttccaaaaacttgatagtatcaagtgaagtctcaagggattaatacatgattatgctttgaagggctttagaaaaaaaatgctgggcttaagtacaacatgctggatcactaattatccctcttctcaaattgatcaaatagtactgcccatctcgaactatgtatattctaatatccataactgcctactctttatgatcatatagtattgtctctaataaatttgatactgtgattttatatcatgatttcttgtatagcatttttcattgaatgctttgttgttaatgctatccctcaactatcagtaggaccagttggatctgtcgagtctcataaagaagagatgcttgtgcttgtgcttgctggttcatcaaacagctcgggaaaggccttggcctctccagtcggagctccgacaaaggccgcagcgcatgcatctaggcaacattaggacctgctttgtgctaggagctactgctctactaccatcgtcaccgctcaaaacatcgtaggtaggtagcctgatttcgtctatttctcttcaatttctgcaccctgtctgaatgtctggctttttagggttcttccgctcctgtacgcccacaatctttcaagtaattgccaccagcagacctccctgcaggacatcagcgagctgcaggttgcaacacgccagcaggtatttcttaatttggatattttaattgttataatgtgaaggaatcagtggatagatctagcttgaatatttgactatctgtcattaatttacacagaaatgagaaacacatatgtagccattaatgtatatgatgtttataggtcaagctatatgtgattagttttcttaaggaagataatagctcaaagtattttcttcctcagaggagattttacaaaaagtactgtcaccggcattgcggatccccgatctccaccgccagagctgcgtcgctagactcggtgacgcccatctccgtgccggctccgatctccacttgatctccaccgccaaataccgtcgcccgcctcggttgtctcgtcccgtcctccgtgccacccctgatctccaccacccgaacaccgtcgcccgccctgtcacccgcctccacacagccacggatctctgattcgcacaaaggtacataaatcctcctctcgtttcatcatacggttcttaatattttccagaatcaaccaaaatacaacgaccaaaacaatcattatggtatattatttgtgtccaagttctgatgaatataatgatgtttactatattaattgcaccactaaaatatgggatgtcatcagtattttattttttaagctttctgcctgaattggtttcatctgtcagcgtaaggaattgcttgagtataagactcagctgtcaagagggccgtctcgccgtcgtctcaggctagggggccgccgccaattatctattcccatagagggctgctatataccggtatcccgacgaaaaagggataattctgaaaccaacacaatatcgtgcgcgtgcgtcaacaaaaacaggaatagaaacgtatcgtaccagtgctcgctgccccgcctgaatcctcccgacgaatcctcctccagaatcgcgctcccgcgtgcgattcctcgccggcgcgagctcctccgcaacccgacgaatcgcgattcctcaccggcgcgagctcctccgcatcccgacgaatcagcctcggaatcgcgcgtcctcgccggcgcgagctcctccgcaacccaacgaatcctcctcggaatcgcgcgcgattccgagtcggcgcgaactcctccacaacccgacgaatcctcctcggaatcgcgcgcctccgtgcgtgattcctcaccggcgcaagctcctccgcatcccgaagattcattcgcggaatcgcgtgcctccatgctcgtttcctcgactgattccattggcgcacacgttgtctgccaatttcctctgcaatccggcgtcttatgtgattgctgaaatttttcacacaagtagcacatgattcttgtggttttcaaagatgatactctattaggatcatgtgatactcttgaggatcacatggtactcttgttatcttgtaggatcatgtgatacctctgtagcatcacatggttctcctcaaaaaagtatcattaagtgtgatacatttgaggtatcacatatgatcttacttaggtatcatgtcttctaacatgatccctatgggtttcacagatggtacttaatggtgtgatactttacaggtatcacacatgatcctactaaaaaaaatatcattaagtgtgatacatgtgaggtaccacacatgatcctacttagggatcttgtcttttaacataatcctacttgggtatcatgtatcctacttaggtatcatgtcttctaacatgatcccaataggtttcacaaatgctacttaatggcgtgatacttatcacacatgatcctactaaaaaaagtatcattaagtgtgatacatgtgaggtatcacacatgatcctacttaggtatcatgtcttctaacatgaacctacttaggtatcatgtcctctaacatgatcctacttaggtatcatgtcctctaacatgatccctatgggtttcacagatgatacttagtaggatggtgtgatactttacaggtatcacacatgattctacttgggtatcatctctggtaacatgatccctgtgaggtttcagatatgatactttagtaggatggtgtgatacctgtgaagtatcatacatgatcctacccaggaaaatcatctatcatgatacatgggtaggtaggatcatgtgatacatgagtttcattatgattgatacatgtgaagtatcacatgatcctatctagtatcatgtcttgtaaagtggttccctactggtttcacatatgatacttgagtaggatcatgtgaaccctgggaggtatcatgatcctcctcagtatcatttcctcaggtttcatatgatactgaactcggtttcattgtgtacaacgtactcaaactatatatagtccacagaaaaggtctacgcaatataatccacttctttaccaacatatatgtacatgaaaacagtagccacatacagagttcatgtctttgattgttgtgccccttgcaaccttccagttcaagacaaaaacagtagccacatacacaattctgaaacttgacttgttacatatgttggttgggggagagggagggagggagctacaaaaatggcctaagcacacatccgacactgcttgaaccgaatgagcatattggttctgaagcttagaaacgacgttttggatgtaagtcgttaaagcgatggtacaacaaccttttgcatagctcactacgatattctttcatgtagtcctgcatagatgacaagaatgagcagtgttagatttgtcaaagtggggtgaagctgagccgttgttcaaccttggagagcaccttgtcttctttgaaacatgcatgaaatcggattcgcttgaagcaggtggcaacgccatttcaactctgtgcacatgtgtgaacggataaagaaaatatcatttcaatggtgattcatcctcgattgaacaaaagtatctaatcattttaaaacagaaaacacccatgtagccactaagatatgcaaaacatcaacagaaaaaaaaatccaaatcatctgcatctatgactcagctgcatctgccatctctgtcgccacgcactgccctctatgacaaagaggataacaattgacaagcaaagcgtgcccggaactagaagccaacaaccgactgatgcggatttctctgattttgtttacacttcagttcacccaaaaaaaaatcctactagttgaatggagatttctctgtttcaaaacagtgtgtacttgttaacggcaaaattgcttgctccaagcaatatttgccttcccatcaatatacagctagaagcatttcaagcgatctattccaattcgaacattttgctgcaagtatcatatgattcagcacatacacacatccctcacctctgctacaaacacccccagtgaatgaacaaaaacacacagaaaaaagagagagagtattaacttactttgatttcaatttggatgtgatatgatgagccccatccacaaattagtgattcaacaaaccctagaaaatgcaaaaatgaagagatgttaaatcaaaatcaggaaatcgatgaaaaaagaggaatgagagaaaggggtatcgtgcgcaccggctctgccgcagcagcagccaccggctccgccgcagacgccaccggcttcgccgtagacgccgccgccacagccgccaccaccacgctcacgccactctccctctctggcactactgaccttgtgcgcatcggcgccgctgaagaggaggagccgcaagcaggctccgccgccggctccgcccgccgccgactccgccaccgccgccggctccgccgccgcagccatgctcgtgacgatttgggagctgtaggtgtctgtttgggagtgactcagggccgttttggattgctaccaaaacttagccttaccaatattttggtagtttaaatagtacatgtgcttgtttggattgagaccaatttattggtaatgcccatgctagatttgccatcaatctagaacaatcttcactagaagtcacatgttggctttatattggtaccaaaccaaatataatcttatcctaccaaaaaattggtaggaccaaaatttatctaagatttggcactactaaaaatttggcatggtagcaatccaaataggccctcaatgtttctcgagtgtgtgtatctgatccgtgagggtgtgtgtttgatccgtgggaaattgtcccgtccggggctgactccaaacggtataccggtgactagcatttctgattcccatatcactatgaacaggtgttttgcgctcgcaaaacctccttccctgaattgaaggtacaagcaatttcaagtttttataattttcataatgggaaacctgtttagattgtcgagttttcagattatttagaatggggtgcctgtttagattgcagcataggtaaaaaataaaaataatatactcaatgcagttctaacccctcgatgcattatttcagttgaagttcagcatctaaaaacgtatatcgcctctccaaacatgatgtgtactaaaactaatgagaaatgcttcctcttgattgagcagatattcattgtgaaacagcactataaaccatgtttcttctatcatcattaaaaggctgaatgaaaaatgccagagcgagcgttcctctgaatatttctgaatttggcgatatcatttctgggttgttcttagtgaattttgaatataatcatttttattttaatcatgattgatttgcacactaatgtcgtcatctggcaggagcacaagctacccattcaaaaatcggtgttgggcaaccagccgcttctcttcttgggaccccttgctgtttcccgtcgacgtcgggctttttctgacttgtgggttctactattttattcccctgttttccttgtgtgatcgatacgattggttaattaatgatgcagaactagccttttgtttttccgtggtaccaaaattgacctttggtagctatgaacgacatatgtcttggcatatttcttgcggtaaaaaggttaaattttattgtacataggatccgtgccctttacagttcctaaatcctactgggcagatatgttcactcgagctttgctcaatgcgatcattcacactatatgtttctctgcttattttctgaataagctggtaagtagtattatgccacctatgagaaaaaaaaagttattatctgcatgtgtgagaaaataacttattaattatctgcatatgcttccctaattcaaatagcaggcttaatcttttgtcaagccaggaaaaatgctaactgtctcagcattactgcagagtgtgtttgggctgcaactaatttttgaagtgcagtgagtctcagaccttggagataaattactgaagaactggactctaatgtgagtacctgtttaatatctgttctattaaccttcaaggatttctttgtaacaagttttaaattcagtcaacattgcttaagacttaagataattcagtatattttgttataaattatgtgccgctatggctcttttcaatgcgcattcgctgtttggaatgcgagtatgttcaaacttaagaggagcatttggatcttgctgttttaaaaccatattggtgaatatgcagatttctgaattgctctttcaacaaaaataaactataatatacacacattacttcagcaaacatgactttagcagcttagcttttctgaaacttgatgggtgtgtgtttagtatgtttgttgaagtctgatttcagagataaacttagaggtacaattgctcagctgccaagatctgttttgtagaggtacaagtacaatggcagaatttatctcaccatgattcctttttatatggtgaaagaataaaggaacaaaacaaaacaatgataacttgctcagtagcactttgagacaatcttatcctcactttagaactccatgaagtgtgtgatatgagtttctgaccatattttctgaatttggcttatgttgtattttaattttgtagtcttgggaaaccattttaagcctctgaattgttgtagggttgatcactttttctaggccttttgtttttcacctggcgatctggcatcagatcagactaattatttgtctagcccttaattgttgtatatttgaacaatttgcacaattatttgagaaaaaaaggaattacctcaggattgattagtcgcacagaaacccatcctttattttcacatggcctggaaacataaggtgcagatattatcaccttccatgaaaataaagtgtactatttagtactgtatagtgcacaacatatgctatttcacaaactgtttttagattatcataagttgtcatgattccttataagtttctaattatgaaaatgaaagtgttgtaagcatgtctgcttgttttccattgccagacagactccattttggattttattaaccaatgtggtatgtattgtcctggttatttctcaaattgctcctctaccagattggctgaatctggaaaaaaaattatgagattgtttactacatactaagatttaccggtaaattatccaattactctcttgcgtccttgattcctcaactattaattaatcttttgcaccttgtattttccaatattgttattccttcgacaaaataagtttttactcttactacgattcactggtcaaataagggcatctcataattaatgtggtgtcaatgtatatattatacaatacatgtgcgacatatttaattgcaattaggaattttacatgtcaagttgttgaaggaatcaaacagtagatgatatcttgccaaatcggactttgctctaccaattgatataaatataaagtaagcctctattgaaacctatggtgctgaagttaatctttgccaatcagtactatctatctatctattatataatatataattaaatgaatagaaaaaaggagcctccacgttcgctctcatggcctagaaattctcacattaatcggagaaaaagaagaaaaagaaaaagcagagtccatatagaaatacaatttaaaaatagaagaggagactagagtccatatagaaatacaattaggaaataactgaaattcggaattaaaatataaggaatattagaagaggagactagagtccatatagaaatacaattagaaaataactgaaattcggaattaaaatataaggaatattagaagaggagactagagtctatatagaaatacaattaggaaataactgaaattcggaattaaaaataaggaatattagaagtagagtatatagttcatatagaaatacaattaggaaatgaaagaaatttggagttaaaaataaggaatattagaaatagagtatagagtccatatagaaatacaattaagaaaaaaaatacaaattcggaattaaaaaataaggattattagaagtagagtatagagtccatataggaatttaaaactaactaaaatttggaataaacgagtccatatagaaatacaattaggaaataactgaaattcggaaataaaatataaggaatattagaagaggagactagagtccatatagaaatacaattaggaaataactgaaattcggaattaaaatataaggaatattagaagaggagactagagtctatatagaaatacaattaggaaataactgaaattcagaattaaaaataaggaatattagaagtagaatatatagttcatatagaaatacaattaggaaatgaaagaaatttggagttaaaaataaggaatattagaaatagagtatagagtccatatagaaatacaattaagaaaaaaaatagaataactaaaatttgatattaaaagaaatattaaaagacgagtctagagtccatataagaatatatataatttacaaataactaaaatttgatattaaaaataattaataactaacacgtatataaaatataatataaaaattcagaaataaaaataaataatataaaaatatataataatgctagccgcgcaatctgcgcgggccaccatgctagttttctgtatatgtactatggtttctaacaacaggtagcggctttggtgaggtgtgatctgattgctcacatacatgtttatgctttatacttccaagttgcaaaaaaaataaataaatgataccaacgtcctcttgttttatacagcacatcatcacaatttaattggaataatgtgtaattatcttctccatactattgcgttctagatgtgtcagtttgcaccgggctgataatatgactatatgttaacacttgtatttctttaaatttgtactttagcatcggcaaattttcgttgtcgttccatgtagatcttaaaagaagacgttaacgagatgaccaacaattgttatcttgttttacatggtaaaactattaatttgatatatgtatcatatcaaactgttatttgagtttatattcacgatcttatgctaacacaaaaaatattttttttgttaacatgaaattttattgagcttatattcaagtcttatgctaacacaaaaaatatttttttgttaacatgaaattttattgaggttatattcatgtcttatgctaacacaaaaaaaaaattttgccaacatgaaattttaaactttattaaagacaaatagaaatacagtgtagcgtttagcactgacatattactagtaatgactggttattcattgccaatttaaaaccaccattattttcgccgtggggaaatgcagatgggccagtccaattaggcctaatgtatgcatatatgatggttcccatcatcacaaaaatagtccgcaaagagattttaatcatatgaaaatataaaacgaccgacatatatacgagcagtgttgtggaaaacggtgttaacggccgttaatacgtccgataatacggatacggagatcagtccatcacgtcacgccgatccggtcattattagtcggtaacgaacccataaatccgatcattaccgattaaatcgtccgtctccgtctaatcagacgtataatcggcgtgatgacaaaggtcgattccacaatccagctcattagctgtgccctttggattcggatcaagtgcagtcacagtagtgactgcaactttggcagtacctaatcatccaaccatccagcacatgagggatggtccagatttaactgtgtcatgcatcattttagctatttgaacaagcacagaacagcttcagttcagattttgcctgcaatttctctccttttgatctgaattttcttgaactttcagaaaacccaaatattgttaaagaaaagtagacacagacttcatttcattatattgaacttcataatatcttgcacgcataattgacaaaatgagctagagtttaactattttcgctgaaattgggtgtcatgcatccactgagacaaaagctttcaaaatcaactagccatgctactgctagattaacccagtaacaaaagctttcatgatccaaaagtagatcatcatctgcttcccaaatcagcacgatgccttctaagttctattgacctcttcaaatgaacttttgagataagatgacatcttcaacgtcaatagaaccctagggaaaaaaaaataatatccaaattaaaataatttgttagcacatatatttatctttgaagaaactggtcagcataccagtagaagttgggcatagctgctaattgcttcacattcttgatgttcttccacatcagtttgcatgttttcctcctctgccttttcttcaggctgcataacagatttgagaagtggctcaatatatagttctcaatatatatagctgcataacagatttgagtagtcgctcaaatatatttacctttctcttttttgttttttgcagtttatcaatccaatttgttttccgttttgttacacgtttccggctctcctttttcttcagaccagagacatgtgccaagttctgagctaactgggatgttgactgatcattcgactttgcaatgccatcactgtaagtttgttttattttgtcctcaacttttttactaacggcatgaagtgcttcttccacaagcaagtaacattcttcaaagtctgcagctctggaagccaaaggaagaaattgctggtacagatatctgtacctaagagtagtactcagcttggggtcttccactatttgtctgccatgcatatcttgaatagctccacattttgcttctcgagtccaacgcttcaatacatatttttcaggcaacaatttaatgttcactaaatcaagagctttcaaggcatgtctacacagtagacctattctctcaaacaatcgacaactacacgacacggtctgatcaaaagggttggcagtcaacttgtgctcatcttcaagtatgaactgatcatcaagtgagccaattgcaattatgaaatcattacttccatttgatcctttcgtataggcagccatggatttcttttttttcgccgggccggcgaatagccggccgatgtatattaagagtaagaaagggaatgtacaaggtagcgcggtgcgtcaatgcaccaccatttcagacataaaatgaaagctaaaatctcacagaatgagttgctacagagtgacacatggggctaacaagacctgcagctatccaagtctcccattcatcccccatggcggaacagccatggatttctcatattcggcttggaagacttcaaataaagcaggtgtgtaaagcttacttgcctgtaccaaaataggtgtcatcatcataattcttggcaaattctttcttgattcatattcagattgcaattccttctctctcttttcttcaacaacacgctctacacgattaaggaacctgccgatgtcaagatctgatttctaatgacctttcaagttactattcaaactttcacttaattgtgtgcttcgcatccctattgtgaaaacatctgacatgtagcactcagcccacttttcttttaaattgtatatgctatccaaccaagtcactttacgcaccttttgtctcatggcatcaaatacttcttcaaattcttctttttcctcatactcatacatacatgcactgaaatctgctaggatacttgaaccttctgtttgttgaggactcaaatgctttactgcattttgtgatatgtgccaagtacataaaccatgccatgcaccagtgaatacttcagacacagcctttcccattgcaatgtcttggtctgtaaaaatggtttgaggttgcttttgattatgggctgataaaaatgtattgaacatccacttgaatgattcaaatgtctcatcatacatcaaagctgcaccaaaaaccactgtctctctaaaatggttgaagccaacaaacataccaaaaggtctactttctttatttgtcccgaatgtagtgtcgaaggtgatgacatcaccaaagtgagcataatcagcaatcatcctagcatctgcccaaaatatattagctatttgttcttcgcaatccaattgcactgcatagtgaaatgagggattttccacaattttatcttggaagtactttagtaaacttcctgcctcaccataaagtaagtccctttggcgcctagaacgcaaataattcttatgatcacgctgtgtgtaaccaagattagctgacccaccaacatgccgaccaagaaactcatgtgctgctttaggtgtaataccagaatcatacgccacctcaatttcgactgcttggtgtttagaaatgttcctttgtgatggcatcaaacggcttgtttgtggagtttgaagaagatggctgtgttctacagctaagtcatgaaccttgtatgtcattgtttccctgagtaaagtgatgcccatgcgaacttggcaaccagttcgagtatgagttcgattacgttttgctacagcatatttcttttcttctgctctagaaccctgatttgaacaaacaaacctactggatgttactaactgatcaagatcacttttgttagtgtaattctttcgaacatcaaagccaatacgaccaccatatttgacccaaaaatcccaagcttcttcataggaattaaatgtcataccaatttgaggcatccaacagggaggtttagtagatctgttacattacagtatagaggaataaaaagtttgatgcatgaacaaaacaggaagaaagaagacaaaaatcagaagacaaaggatcctatcgcgatctgtacctctccaggttttgctccatggccttctcaacggtcatggctgaacagagaagagaaaaagaagcgtgtgatgtgcagcagtagggggtaaagtatgcttcccatggtagaattggcgccaattctcacctccctctcagacttttccctccaaaacacatctgctggagtcagagagtaggtgaaaagttgggggaaattgagcaaccaatctagaccatcccttgtgtgctggatggttggatgatgggtactgctaaagttgcagtcacagtagtgactgcatctgatccgaatccgtgccgtttactactattgactagaagtttgctcttctgaaattctcacaaggcagcaagatgtaaaatgacaaggaactgacttcctctaaaggttttgaacatgagttccttgattttgatgagtttgctcttccggaattctcataaggcagcaagatgtaaaatgacaaggaactgatttcctctaaagtttgaacacgagttccttgattttgatgatgatcacgttattggagtttgtatttgatgaagctcttcgaggtaaccgatacacatgttatttgggactttgattacggtcatttatgctatgtaacattctcttgataattcatttcatgcattatgaacaaaacccatcactacgtgagaattgagatatacagtaacagctatccattatgaatttatttaaatgtcatatatggttattctatttaaggatatatatagaaggaatatatttagttatatgcatttgtttatcaaaaagggaaaactattatcaactactacctccatcctaaaatataataacttttggctatgatagctaaaaatgtttatatttttggacggagggagaatgtacatatatttttaaaacgttatatttccgccaaattccgattaatcatttggcggtaccctttgtctgatacccgtataccgttttccacaacactgtatacgagtattgtacagtttctgtaaacatcaataatatcctcgaatttcaaaccatcaataatacaatttgttactccatctgttttatattataaattgtttgacttttttttctaatcaaagttctttaggtttgctcaaatttaagtaaaaaaaatagcaacatctataacactaaattagtttcattaaatttaacattgagtatattttaataatatgtttgttttgtattgtattgtaaatgttaccatatttttctacaaactcggtcaaacttttttcggtttgactaagaaaaaaatcaaacgacttaaaatataaaagaaatggagtattatcattccttcaatccaacaacaaacggagcatcccattacgcggctctcaaaaaagtgagatgcaacttatcaaagtcgatgcaacctcgcgtcaagtgtcaagttttgtcggtgataaataaaaacctcgggaagaatgatggcaatgcgccgagagtaattgtaattatctatgagataaattatagggaccctgctatgagataaattatagggaccctgggtatacatatttatacacacaaaccgataagagttctatttagacatgacacaaacatttgtaaagataaaagaaaaaaacattcataaatacaaaacttatctgccatgtcgtggtcttcgtaactccttttcaaactcgatctctgttgtataaatcttgtcatatttcgttaacgaaatttacttaaatattcaaaccaaattttagcattaacagttctctatgcatgccacattttgccacggccttgtttagatccaccctaaaatttttcaccctatcacatcgaacgtttgaacacctgcataaagtattaaatgtaggctacaaaaataattaattgcatagattgcgactaatttacaagatgaatcttttaaatctaattgctttatgatttgataatgttgtgctacagtaaacattgctaataatgattaattagacttaataaattgtctcgcagtttatacggcaaaaattcagtctaaagtaattcggcgggcgatgggccccacagtacaacatctcgatttgctccgatgagataactgtcccgtatggccgtatatatctgtaaattgcccaacaaaaaaaaggaagaaaagaaagaaaagcttctccccgagctccgagctcccgtgccgcccgctagagagatctcgcccgccgtccccgagatcccgccccgccgtcgagatcacgcgccaccgaggagaggagattcggcggtccgcctatcgcgtgaggacgagcgagactgcatactccagaaggtgcgtgatttcttccagatcgaagatactctttgtcaaaagaaaaaaaaaatatagaaaagaaaaattttgaatagaagaatatcaatagagacgatgatgcggcggtttgtgaatttggtggtggacaccgccggcgtcggcgccgacgcgacggcgtgcaagctgtaccgcgtcgctgcatcggccctcttttcatctccagcacgtcgtcaagcagcagccaaagaactagatccagatgacgtggacgacgccggcggcctgcctcctccggccatcaccttccacccctcctcattgtccggccctggcaacgtcgatttcttgcacctccccggcgacgacagccttctcgccctcgacgtcgacggccgcggtctgctctatagtgccgcctccgccgccgtccgctacatgcccgacccgtgcaagcccaagatggagcccatctccttcaccgccggcgatagcgtcctctacgtcatcgagagggtgcccttctccggtaaccccggctgcttcgaggctctcacctacggcctactcccccacgacttggacaggatgggctggtactggcggtctcttccgccgcctcctttcgccaaggttggctacgacggcgacttccggcgccaccgccagcgccgagagtacgacatcaccgcctccgcggtggtgaacgagacggagctgtgggtgacggcgcacggagctgggaccttttctttcgacacgcaggttggggagtggagggggcgcggcgaatggcggatgccgttcaaggggcggggcgagtatgtggaggagcacggcaaatggtttgggctctcctccacgccgctgcaggggctgcacctctgttcctgcgatctctcccatctctgctgttcctacgatgtgccggtggtcaggcgctggttggatggcctagaccgtctgccggcggcggcgccgcccaagcaatcctttctgatggaagcctacgccgtgcacctcggctccggtaggttctgcatcgccaggttcatggaagaggaggaggaggaggaagttgaggaggagaaggacaacatctcagttcatccattcttccacgtcgccggcgtcaacaacaacaagaagaagaacgacaggttcttgctgctcaccggcgttgatgtggtggcctgtgacgacgccgtcctcgtgcacaagtctatacgctacccattccaaaacggcgatttcgttcgtggttactctcgactcttttaatttcatctaatttacttattatacctctctccggtaaaactagctatattttgttttgtgacggagtgaatatatcatttttatatatatatcccttttcctttcgattgcaataatagtaataatgctgtatatgaatggtactttttgggtactccattcgtttatattaagaggctgtcctcttatagtcttattatacatgctcattcttgactctggaaaaagaaactttttttttgcaagttagaccgaaggattgaccgaccaaattttattaagagagaaaaggggttataattgtttacaagatcgacattaagctgtcaaggcaaagtgacaaccaaaccagtcatcagccgaaaagaaaaagtgaaaacagaacagaggccaactaatcacattgccaaaaaaaaaattcctgcttccttctaatgatcatatgatgaattccacttacagtactacaatttgactgcagctattttgacaattaagaaagcagagtgttgtaaaatttgggcataataagatgatatatcttccttagcagttagcacagcaacaacatcccaaaggtgaaatgtttttgaccggagtgatgcaactgcaacatatattccaaatagattctctctgcaaaattaaattattcaactagttccatctcattgcacgcctgcctgatgtgttgttcattgtatctcaaaaatcatatttgcagcagagcagaaaaaaaaaatcatttgcagcagagcagaaaaaaagcatcagtaatccatgattattattattaattgctcacatcacatccggtggctcatggacgcgagcaaatgagtaataatgcaatatatatagatggacgagatgatcatggcatgtcggcagcgtgatcgtgatcgatggcggcgacggggaggtgagtggaggaggagggcggcggctggtcgtcgtcctcgtggcagcagaggcagagcatgccgcggaggaggttgcacttgccgccaggaagccgagctgcttgcagcaggcgttgcacttgcctctaaaatccgattttatccccttgaatacgacgcgaatttggattcgttttcgagtttatctctccgccaaaccctaggttttcccggcgtgattccttgcgttccaagcccgatctctctctcccgtggctataaatagagtccccttcctctcctctttcgtttgcctcaagtcccagccatcgctgttgcctgtagcgccctacccgcggtcgccttctgtctccgccaccggcagccgttccagccgacgcccttctgcgctgccacttccctcggctccgaaaggctgatctccatcccggccgctggttaccttgcgccgaaactcgccggaagcccttcgtcactttgaatccgatctactccgcctccggccgaacaccaccgttgtttccgtcaacgccaagcttcgccgttgccttcctcggcatcacagcgccaagacgaagcccgtccacacctccgttgctcccatcgtcacctacggtcgccggccgttttccgtcatcgattctcgtcaccgtcaccaccggtgagttcgtctcgtcgtcctctccgcgttggtgctctcggatagcccggctgagcctcctaacaccggcgacctcgcggaccagtgcatggtcggctgtgatgtcatcgatgatgtcattatctatttaataaatcgtgaattctttgctgtataaggctaaaatcagtttaattaatcttgtaaaattcataactaattcatatgaagtcggaattaagtggttcaagtctctaaattcatctaaaatcatgatctacatgtttgtttactttatatgtactgtttatttggtttttattagtttttttttctcgttttgcgtgttagctcgtcgttttcatcgttgcgaaggttcgcgagtgcgtcggaagtgttcaagaagactaattgaagaccgattattgtaaggcaagtcacacaaatcccaaatgaccctttgagcatgttgaacccatttaaagctattgttttattttaaaatatgcattattttcgaatgtcattgggtggtgagtctttctcatttaattatggccgaagatgactttattttcctatggtaataaattgattagcttaaaccttatatattggtttggttcagctagatgttggacataattgcttagccatgcttagaaacattagcacatgattgggataactaatgttacactatcacttatgattatatttaatggtacccatgatggtcaatcgtgattggttaattaattacttgccaactaaaatttgattaatggtgggttgtgagcacatggttttgatggtcgtgctcatgacaattaaggaccggttcgtgagctactgttgtgagacattaaccatgccaaccataagccagcgtgggcaacggctttaccttttgtatagcatggttcatcacggggtgccagactgagaagcggcgagaagttcgtgggggtcgctggggagtccatgccttgttttataagggggtgattatgatccaggaacggtgcactgtggtgagttgtgttgtgcagaggatattgtcacagcctctattcgggtactttccagtatcgcgacgcatggtagacatgatgttgaggctttgtcttgtgggtacagtggtacacctctggccagagtaaaactattcgaatagccgtgcccgcggtcatgggcgggttgagcaatgtttcttgtgattagtctcacacctctcacaataattattggtgctataactggtaataatttgcttagctcctggtttggagttagatctgtacagccgggtatggttgtttaggatggtcgggcctgagcagcatgggtgtgctgttcagtgttgattaaaattgatgaataattactctactgttttacttctaaatgtttgctaaatgctgcttttgcaaatgagcctatattatgccatcctttggtatccttgtgcacttgcatatttgctgtgtggcttgttgagtatgtcatatgctcaccttgcaataatcaatcaacctaagttgaagaaaaatgatccagaaggagaagacgtttggcttataccccagttgagctgcctgtgggagtggagccggagcttcgctagatcgttattccgctgttgttttttttttcttttgtaagtatgtaacgttattattatgatggatttgtatattaaattatcagtttgtgtacctcggctgattcctggacgaggattttttgcacaaattagttcagaaattactagtgaatttctgggcgtgacagtgatccacatgtcaaggccaacgcgctgctgcaagctcatttttcaaggcgcactatcttggcagccgaccagcgggagatactcctttctgctcatagattgctccaggcaatggttgatgttatctccagcaatggatggcttacgcttgctcttaatgcaatggagctgagtcaaatggtgacacaaggcatatgggatcgtgattctgttcttttacagcttccacatttcaccaaggagttggcgcggagatgccaggagaatgaagggaggcccattgagagcatcttcgatctggctgagatgagcatcgatgagatgcgggatctgttgcagctatcaaaccctcagctacaggatatcattgaattcttcaagcgtttccccaatgtcgacatggcttacgaagttggcgagggtggatgatatcagggctggtgacaatgtaactgtacaggtgaccctggagcgtgacatgacgaacttgccttccgaggtggggccagttcatgcccccaggtacccaaagcccaaggaagaaggctggtggctggtaattggtgatagctctaccaatcagggttgcacttcagaagagggctcgagtgaagcttgagttcaccgctgcttcagaagctgggagaaaggagtacatgatctacctgatgtccgattattatctgggccgtgatcaggagtacgagttcaccgtcgatgtcatggatgctggaggggattgatcccaaggcaggaaagaggatgatagctttgcccagcccccaggttgtgtatgaaactgggtggttgcttgtacgctcgtagcaattcctagaagatatcaactttaaacactaactaattaatatcctatccacacttgtatttgtttgttacttgcttctatcttgttcattttctcattgtaactgatgcgcacctgtgctgctacttgtgctcagccttggggatctttattagcctatggctgcatgtgcttcttgtgatcatccttcatgttgtgtttttgtcttcctgtttcatctaatcaagtcattcatgtcctgattctatctacatcatttgatcatgcttggtcgtattatttgttgtatctcatatgttcatatagattgctccagccaatgcttgatataattattgttgcgcaactgcttgcaacgggtttggcttgttctggaaacaagaagtgatgtactaggagtaggacgtgctgtgcagtgtacagtacaccgtcaatccctaccctgttgctcacatggaccttttggattctcgactgcatgcatacatacaaaactgtcactcttaactaattgttgtttgtgtagggtatggatgtcaaactcaactattgttgtttgcgtagggtatggaggatatagtatataactggatttttaaaaataagatcgaacgtggcaattccattaacaaccaaacaaaggtgaagaggtcatgggctaactaactgtgtgaatagtcaacgtagagacttatcgaaaccaccaaagctaagccagagaataaaaaagctcaacgcgcactcttgttttgtttgctttgcgtacgtaagaaaggaaaaaaaaaaaccttgacaaaaacacatgatggataagactagatggaataatattatattattgcctcaagtataaataaaagtcattacggactttttactagtactgctattccaaaataatatccacaaggtaaagttagaatatgaggagagttagtacttagtcttggaggaaattaagctaagcaagggtaccagcagcaacgccaagccaacaatggaggagacctggctcttcctcctcttctccatctcgctcgtcgccgtcttgctcgccaccgctcgccgccgccgctctagcagcatcaaggcgcgcctccctcccgggccgtcgccgctgctcttcctcgccaagttcctccgcctccgccgctccatcttcgacctcggcccgctcctccgcgacctgcacgcgcgccacggccccgtcatctccatccgcctcttcggcaccaccctcgtcttcgtcgccgaccgccgcctcgcccaccgcgcactcgtccagggcggctccaccttcgccgaccgcccgccgctcccggagctcggccgcctcttcacctccgacacccgcgacatcaactcctccccgtacggcccctactggcgcctcgtccgccgcaacctcgcctccgaggcgctcagcccggcccgcgtcgcgctcttcgcgccggcgaggcggcgcgcgcgcgacgtgctcgtccgcggcctccgcgaccgcggcggcgacggctcccggcccgtcgagctgaggccgttgctccggcgcgccatgttcgagctgctcctgtacatgagcctcggcgccaggcttgccccggaggcgctcgaggaggtcgagcggctggagctatggatgctccgcgccttcaccagcttccccgtcttctccttcttcccggcgatcaccaagaggctcttccgcaaccagtgggccgctcacgtggccgttcgccggagggtgggcgagatatacgtcccgctgatcaacgccaggcgcgccggagacggagacggcgacgacccaccctgctacacggactccctcctccagctgcgcgtggccgaggaaggcgaccggccgctgacggacgacgagatcatcgcgctctgctccgagttcctcaacgccggcaccgacacgacggtgacgttggtggagtggatcatggccgagcttgtgaaccgccccgacatccaggccaaggtccacgacgaggtgagacgccggccggagctaaccgaggcagacctgcaggcgatgccgtacctcaaggccgtggtgctggagggcctccggctgcacccgccggcgcagttcctgctgccgcacggcgtgcagagcgacgcggaggtcggcggctacgtggtgcccaggggcgcggagctgaacgtgtgggtggcggagttggggcgggacgaggtggtgtggacggcggcgagggagttcatgccggagaggttcatggacggcggcgaggtggaggtggacgtgacggggagcagggagataacgatgatgccgttcggcgtggggcggcggatgtgccccgggtacacggtggggacgctgcacgcggagtacctggtggggagcctggtgagggagctggagtggctgccggagacgaagggggaggcggcggacatggcggaggagctggatttcaccaccgtcatgaagcacccgctccgtgctcgcgtcctcccaaggccctcctccctctactaatcgtgcttccatggatgaatcatgcatgaagaataacatgccaatcgatagttttgtgatggttgtaaaagcatgtgtagttttatgatacgtactttatgtttaaatatgtgtaatactgttgatttttgaaataatatttcatcattgtcttatttaaatatttagggtaaatataaaaaaacataaatcatgtttaaattatagggtacacataagttgtaataatatgaatgacacatgcatgttttttgttttgtaaaatgaatggtgaatcgtcatatgagtcaaccgcagcgagacgtacgcggtgatttcgtgaatctcaagatataccagttgagtctttgatggtgcttataaagaaagagtgtgcatatgtgtatccatcttatgtttgtactatcattcaaaaaaacaataaccatgaaaaactcaattcatcacccaaggggatatccccttattttcgcatgtcacttaaaaagtcatcaaaaaatatgaaaaaaaatagtaagataaatcaatatgtaatatgtcacttcacagacatacaaatacaaattcaacttatacaagtagaaacaaaaataacaaatttgtgaatttttgtttcgaattgtataagtcaaatttaaaatcgcaggttgcgaaaagatatatcatacattgatatatcatatattgatatatcctgatatgttttttataattttttttgaacgacatgtagaaaacgagaaaatattccctcgagggacaaaattccacttcctatgatatactaacaatatacgtttgaaaacggaacggtgaaataattcattgtagaggaaaatatatagatgaaataattgcctgcggaaaaatactttgggctttgatgggcccgtggtttttcctcgttcagtcggttgtgttttatcgtattttcccctgaattcttgttgtgtaaaggaaaaaaacaaacaaaaaaaaaccattgtagaagcagatgcggcggtttgtgaatttggtggtggacaacgccggcggcggcggcgcgacggcgtacaagctgtaccgtgtcgctgcatcggccctcttttcatctccaccacgtcggcaagcagccaacgtactcgatccggatgacgtggaggacgccgccggcggcctgcctcctccggccatcaccttccacccctcctcattgtccgtcggccctggcaacgtcgatttcttgcgcctctccggcgacgacagccttctcgccctcgacgtcgacggccgcggtctgctctacaacgccgcctccgccgccgtccgctacatgcccgacccgtgcaagcccaagatggagccaatctccttcaccaccgccggcgatagctgcctctacgtcatcgagagggtgcccttctccggtaaccccggctgcttcgaggctctcacctacggcctactccccgacgacgacgactcactgtcctccaggatgggctggtactggcggtctcttccgccgcctcctttcgccaaggttggctacgacggcgacatccaccgccaccgccatcgccgagagtacgacatcaccgcctccgcggtggtgaacgagacggagctgtgggtgacggcgcacggagccgggaccttctcgttcgacacgcaggctggggagtggagggcgcgcggcgaatggcggatgccgttcatggggcgcggcgagtacgtggaggagcacggcggatggttcgggctctcctccacgccggtgaaggggctgcacctctgctcctgccgtctctgttcctacgatgtgccggtggtcaggcgctggttggatggcctagaccggctgccggcggcggcgccgcccaagcgatcgtttctgatggaggcctacgccgtgcacctcggctccggtaggttctgcatcgccaggttcatggaagaggaggaggaggagaaggacaacatctcacttcatccattcttccgcgtcgccggcgaaaaaagcaagaacgacaggttcttgcttctcaccggcgttgatgtggtgggcagtgacggcgccgccgtcgtcgtgcacaaatctatacgctacaaattccaaaacggcgatttcgtttgtggttactctcgactcttttaatttacttacacctctctccggtaaaactacccagtatatttcccttttccttttcatttcgagcgagattacaataataatcttcttcgtttgtaatagagtaataatcgaaatgctgtatatgctccattcggcctttcgtttatattaccaacagacaaggaattcacagccttattaagaggctgtcctcttattatatatgctccttcattctggaaaatgaaaacttttttctttgctagttcgaccgaaggattgaccgaccaaattttattaagagagaaaaggggttataattgtttaacattaagctgtcaaggcaaagtggcaaccaaaccagtcatcacccgaaaagaaaaagggaaaacagaacaggggccaactaatcacatttcccaaaaaaaaaaatcttgcttccttctaatgatatgatgatttcctcttactgtactacaatttggctgatgctattttaatactacttccatattttaatgtatgatgctgttgactttttttcaatgtttgatcattcgtcttattaaaaaaattgtgtaaatatcatttattttattgtgacttgattcgttatcaaatgttctttaaacatgacataagtattttcatatttacccaaaaattttaaataaaacgaataatcaaacgttagtcaaaaagacaacggcgtcatacattaaaatacggagggagtaacaattaaggcaaggtgttgtaaaatttgggcataataagatgatatatcttccttagcagttagcacagcaacaacatcccaaaggtgaaatgtttttgaccggagtgatgcacctgcaacagatattccaaatagattctctctacaaaattaaatttattcaactagttccctctcattgcgcgcctgcctgatgtgttgttcattgtatctcgaaaatcatagttgcagcagagcagaaaaaaaaaatcatttgcagcatcagtaatccgtggttattattattaattgctcacatcacatccggtggctcatgatccagccaacatatatatgtactccaactataaatgggagtagatgagattggtacctgcagtgcaggtatgtgtgtgtgtatatagacgcgagcaaatgagcaatatatatagatggatgaatgatgatcatggcatgccggcggcgtgatcgtgatcgtgatcgtgatcgatggcgaggtgagtggaggaggaggaggagggcggcggctggtcgtcgtcctcgtggcagcagaggcagagcatgccgcccaggaagccgagctgcttgcagcaggcgttgcacttgcctctcttgtagcacaccccctagcacttgtagattgggtagttgcacgtctccgcctccgccgcccactgcatcatcgcaccatctgcatttccatttctaaatcccatcttatttcttttctttcttttcatttttctagctagctatagctgtttgcatttgcaataataatagtattttccatcttcttcttttattgctgcatgtatatgcattcatgctaacttgataacttaaactaatagtcaagcattgaacaggctaactgaaactaatagttaagcactgaggaggaggagggaggagctagataattagtaattaagatgactcacgcgaggcgatgaggacggtcactaggaacagcgccaccaccggcttcatcttcacagtcatcctactcgtacgcctcaatgctcactcgctatctagctgcctggcctcttatatactactcgttgcaagcctgcagctagcttttgacatggcagcccataaaattatgctccagagttaattaacatcgtccttcccattgtaattacaataataggcttaagtaattgtttttcacttttttcttcttttcttcccaaacccccttcttttctttgttttgccttttgtgtaaattttattcctcttaatacaaaagtgcgcaatccttttacgtattccaaaaaaaaaattaaatcgtcttgctgggggtagctagctgtcgtctcctcgtgcttgcttgcaagttactagtattaggagtttctgattatctagcattagcctgctttaagtaatgcgatcaatagtattgtgcgactactatcttaattgagatcgagacaagcatccagttcgttcatcattgatctcttgcaaatcgatctggtacatgtctatgtcattgctcttaatctgcctcaatgactcaatatggctagctcttaatctcagctcgattatgtcatcgaacaattcaagcacttatcttgccatatataccgagacctgatatgtgatagatggacaaattttgaatgtcttgttcgatgcacaacatttggagatgatgcgtgcgatttcgaagctgggacagaatttgtgaagaccaagaaaatgacaactcaatcacaacaaaccaaccaccgcccaggcagatcgcattcagagcatgagtaaataaatttcaagtctccctgttcttttcagaagaatacatgtccgaatgtggtataattaagcctgctaatgggttaaaatccaggccgcatccaccccaatccacctcctctgcaaccactccaccaaaccagtccgctccactttctcatctctaacatccaaattaatccaacccgcaggatgtttgaaaccaacccaacccaaaccattgtagctaagtggattgaatccatttcaaacccatggactgagaccacatgaaaccgccgccgccgccggcggaggaacattgacgcaaacccaacgaacgcatgcaacggtagtagcttgtcgtcgtgctcgatccgtggccgcgcgagcccgccatgtccagagactgcgtgatgagtgagcagctggcctgttcgacgcacacgacaatggctgcccgccgccgtgctcgtggccgcccgccgccgtgctcgcatccatggccgacgcgcacaacaacggcgggacggagctacttcacgacacggaggtgcgcggcgagcttcttctcccgccggtaaggaatagtagccgatgaacctgacctccattgtcgccaagctgagctcgaagagacagccatggtacagccggaagagcaccgcgccgctgctcttggcgaagcactcgagccggacctcctcgtccactgtcaatggcggcggcatctcctccggcgcggctgactccaccaccctcgccaggtccaccgcggcgcggcacgtccacctcgccgcgccgtcgtccttcgacaacgacgacgacagcggccgcctcgctgcgctgtcgtccttcgacgacaacgatcgatatctcgtggcgcctcgccacggccaggccgagcgtcccgtccggctacgacacgaggagcatctccacgctcggcttggcgacgcgttcgaggttcgagggatgagggagtttgatctgcgccgacggcgatgacctgtcgaggcggagcgcgggggcatagcagccgagctccgcggcgttcgagagcacagccagcagcgcagcgtcgtcgctgtctccatggatcgaacccactctagcatccatggatttaatccaagttggacccgaaattttatacccaaaaccaaaccaacccaaaccgttctcacatgcagtccaaaccgccccagcccattagtctcgtcaaaccatttccatccaaccaaagccagcccaaacttgaaaccaatccattttacccacttcaacccaacccattagcaggcttaggtataattaaggggagctccatgcttttcagtgttcttttcaaaagagtacatgtccgaatgtggtataattaaggggagctccgtgcttttcagagtttcagacgaaactgaacacctaaaactgcccaatgtgacggcaacagccaaaatattctgagatttagaggtagcgaccaccggccacatcaacgaggctctcgtctccatgggcaacttactttgttagttcttgctttggaaaaaatataaaattagcaagtggtattttgagaagaaatcgaaatgctaatggcacaggtcaagctagtacttgctgacaatagttgcaatacttctgtcgctatacatagccacgggctcacatactcgtatataacaacaggacttgatcaatttatttcatcatttttttattaccagtattgtccttggagcagcaataacagccagtgtcaacgggagaaaaatattacatcatcaaagccgagtttatgaccctacaaaagttgaattcgctttgcgctctcagtacaaactctccgaatgacatagtttcagctacactcccttggggagccccgtgaccgaatcgatcaatgctaggctttcgtcagtgacaacttttgggccagctccaagcctgctacagatgaagtagctcacatctcccttgaatttttggctcggcatcttcgtctcggcaggagctgggagggcctccacatcttctatcgatttcagtccagcatcgcttagaatcgacttgtcgccaaccatatagctgcatcattttgtttgtcaaatagattcttggatagattggtatgtcatactcatgacaatattaacgcacctgctgagatcattatcttgaggagggaaataatacaagagcttctgaaggagaatggttgcatttttgcggtttggtgcgattaggacagcattgggcccagcatcgaaggtgtaagcaacctgccatcaaaaaaagctcttgtagaatgagaagagttgatagcacaactgtctactagttccatactcgtatagaagaaaaatgcatactagaaaacataaacagtacaaataagtcctagacaaggattttcaatgaaagaacttccttatcacgaagccatattatgtacagccagattatcttgtgcattccttgggcttttgtttccatcataacaaagtaatgaattggtatatatatcatatccaatatatgtactaattaaatatgatcctccatagcattaacaccaatggactgatgacaattagaaaagggtgaaaagggtgtggaaaatgagcttagagtcaaacatttgctatttctacaaagatcattgagcaatgtgagtcatacacgttttggctagggcagtacaaattgtttgtgccaccatatgagcttatggtccattatacccttgttatgaactcagcatgtaaccaaccctatttcatggtatggacatccataaaccgcaacagtttattgagaaaaaaaaaggagaaaagaagagtatacctgtggggttccttctgactggttccacttctccacaaggctaattatcctgtgattaattcagacagcaatgtcaaagctgatgtgtcattagcaacagaagcccaaaacagagcactgataaataaaagatcacctgtgtgatgtatcgttcatatagaagatgggagggctcgtgtccaaacatacagcatgaaattggttgctatctgcacaagttaacctggcaaaggactcaaaattacgagacttgatagcctcttccattttcaacacccgttctggaactacagtctgcaatacaagaacaagcaattcaaaggacataagaaaaaagaagtaacagctaaattgacagaaaagctcaattaatattttactgcagtataaaactgcccaactctacttcctctatgaatcatgagaaatttaaacggtcaaaacagtcacctgggccctatattgcaaaaggggacttgtttcaacactgtctcgcatcccactagtgctacttgtttccttctgctttgaactgacctattttacacagggaagattcaattattttgaaggtgtcagacatgacataattagtaaatgttgttaaaaagcatgataaaatactagagttaccatccgattcaaatttactggttgtgaagccacaacaccaggagacaggagtagtaatgctacaacagattatacgcagtaagaggtatgttaaatgcacatcacataccaccgctatgataataacaagatcattccagtgtgcctcatcagcaagttgtacagctatgctgtcgcttccatcattattctgtaagtgtagtataaaacttatcattactcgctagaaaggatatgcgataaatttcaccaaggctgttcctctttcatagcatcagataactcacttttcccatacaccatttcacgaatcccccatatatactgcggcatgcacttccagacccttgcctgcatttgaatttgtcagttataccagaaggagaaaaggagcagttccatagcatattgatcagtacagatgagtacaagcaacaaaataccttgctatggaagaaagttcaccatgatcttctttcacattcattagctttccaagggtgaaaactacaaaaagcaatcaggtgataaatatgtgcttccattcaccctatttagatttttttaaaaataaaaaaatcaccaataagatgattgaaccattgtctgattttgggtggcattatcaaatttgaaaatatttgagacaaaataagtagggaaatatcattgatatcagaagtaagagactttaccaaaacaagccaagccagcagccgaagaggccaaaccagcagcagtggggaagttgttgaacgatgctatgtgtacatgtagcttcccccagtcctctttcttgatcctgatccccttcttctcatcctcgacatcttgagcacgcttccggatctccctcaggcagctctgaaacctccctcctgacaaggagatctcctgcacagttcaaaacgaaaagccagcttaagacatagtataccattaaaaaaagtaaaggatcatcccttaaggtctagcgtggtgatagatcacagacttttaagtttcacacagtgtaaatctaggatttgacagtttgtatttagataggatcagtgactgtaacagaaacaaagctagaaacacatactagatgctagtgcatatgaaatcaggaatgtgattcttttttaaaataataaaagaatggaaattagagctccactgcctgtagaatttgtagatgggaagaacactgaaacagattgccattattcagatctaagcagcagttgtcatcagtttgatgaacagagtcccattattcagaggggacaacaaagcataaacatcaatgcgaagcaacaacaaaaaaaaaaagtaggaagcagcagagcagagagatggaagagtagagaggaggaggaccttgccgttgagccacatgcggtcggaggggaaggaagggctgacggcgacggtggtggtggcggaaaggtggtcggggtcgagggtgacgctgatgctgtcgttgacggggaggatgagcgcctcgtccctcttcccccagtacttgatgacggcgatgttggtgggagatcggccggtggccatgagcacccactgcccctcctccgccgccgccatggaaggagaccgatctgctgcggcccagaagagcgagcaacgcgcgtcagggattcggactagcaacctcaactagatacagtcccaggcagcttaccggaacggaagcaacgacggggagcgggagcagtcgccggcggcggcggaggcgggagggcgggagatcggagacggcggggcggagacaccgaggaagacgagagtgagaccgaatcttgatgctaaatccaacggctgcgatttatctatcccctccttagtatatgttttttcacaaaaacccctcactcgggtcgctatcgcagccagcatcttttgtttttctttcctttttgcacaaagacccctctgaataataataaataataatatgacggctcggttacttcctcctccaagttcaagtccaagctagcgatcgccggcgatcaagccggcgaccatgcttccccggccaccgcgccgcgccgccacccccgtctatcatgatcatatcttctgtgaatggcttttcataagctgttgatccttcctgcagcatctaccaagtgaaatctgcatacacaatttgagatcaacatcgataagatgagatgagatgagatgcacaagtgaaatctgaatgcacaagttgagatcaacatcgataagatgagatgagatgagatacacaagtgagatctgcatgcacaagttgagatgcaggattcctattggattttgaagagagacagataatttacagggggtggattgactgattctcctcatacttcctggcttgaaaacgggaaagcttggagctttcggctctgatttgatccggtcagttctactgcttgacaaactgtggagaatctattccttccagccatatacatccaatttcttgacaatctggaccggacgatccatcagaaaaaattaattcagaatgcaatttggagtgcagcagcttttttggctggcacatcggtgtagtgcatctatatgtgaccttgcaactgtgcaagggtcaaacagcacggccacaagtacttttgttgatgaatcagttattaccacatgacttcgtcaatgctagcccagcaagtgatggaaggaaagatggatgaatgataaggctccagggctcataaatacctgagactgaacattgctcattacagtcttcagatgtaaagcagtgttgttcttcttctctattctgctcaaggcagctgcatccagatcactctactgatgaggaccacgaggatcatctgctggaagaaaacaaagatttgcacattgactatgcactgctgtaattgtatcaatatcgaattctaaatgctgaatgaacagttgctgatatgatcctgtcaggaagcaaaaacaagatactaattgccctcagagacatatatagtggacgtgcactagtgttttcataccacaaatcctttggccactggagtcaacttttgatcatctggataacataagtaaagaagattctatttcctacaagagcagcagcagctaagcacacacatccttttttcctttccagaaaggatataatgatggattagaatattcagacagtagtacagcttcaggattgctgcaagattagtcataaaataatactagtagtagtatcatcttactaccatccatggggttcaggacaaattagttgaactaggagtacatacagctgatacagttgtgcagtgaagcggtgacaattgtcaattgacaaagtgccaaggtctcacagctaatccccagctcagctgcctgctgcccccttgatggtctgcacatctctgcccattgaaatctttggtcagcaccatcctctggctgtcaagagttaggtgcagcccgatttgagtcaaccctttgattgcatcaagcaaaggtatactagtatcaatgcccctttatccaattctgcaaagtttcttccccaacttgctgtgtcctgaacaactggatttcattcggtcatcagcttacacggctggttgaatggttggtcaattgcaagctgttcatctgagagactgaaacaaaaccatttggatttgcggttgcagtcttgcagagatcacagaatgttgatctttcaggattagaaacaaaatgcagcacaaatatgatatgagtatatattctgatgaccagaatcagcacacacggttggttgaatgattggtcaattgcaagctgatcatctgggagactgaaacaaactgtttagattgcagttgcagtcctgcagaaatcaaagcaagtgcagcacagtatcaggcttcatatgacatgaatatatgatgacgatcagagattcagaatcgaaatcctcgtctgaaatttacaatttctgcattccttcactagtttcaacaacatttttttttgcttgctcttcagcacaaagattgaacagcaatacacactaacccaacaaaaagttagtttttacaagcaaatgtacacttcacaggatcacaaaggcagcagcagcagcacataaaaatcaaagaatggtagagtacagaaaggggaaaaagagagatttttttttatcatcctcctaattaaatcaaatcaacagccaactaccatcgtgggtttccctccacggaaggaaacctcagaaggaatggtggtgaggcggcgcgccggagccggacgccgccgccgccgcggcgctggcggtggcgctgctgttgctgcgcgtgctgtgctccatgatgcgcaccacctcgccgcggctggccaccacgcggtggaacacggcgcgcacctgccgctccagcggcgcgaggccctcctccagagcccggcacgcggcggcgagcgcctcggcgcgctcgaccacgtcacgcgcgcgctcatcggtcgcgcccatcaccagctgctcttcctcctcctcctccgcgacttcctcgaggagactgctcagctcccgcgcggcgcgctccacagcctgcatctcggcgaggagccccgtcgccgccgccgaccccgacgacgaccccttcttgtcctttttcctccactcgtcggcgatccgctcctggagagcacacatcggggccgcccactgcacctgcttcggcggcgccaccggggggttggtggccgcggacgaccggtcctggcacggcaccgccgcgaccagcgcccacatggagaagacgagcaccgagctcatggtgtagagcgccagccccagcccgcaacccgcgccgggggaggcggacgtgggcgactgcggcggcggcgcgaggtgcgccgccatggcgtggacgtggcggccggaggaccagttcctggagacgctgaaggacagcgcgcgcgcggggccggccctgcacgagggggacggcgcggcggcgagcttggcggcgtcggggaacagcctggagatggcccggcgcgcgcggccgaagtgggcgcggtgcagcggcggggcgaggaggcacgaggcggcggtgagcgcggcgcggtgcgagccccggagcgaggcgagcgtgagggagacggcgttgagtatgtcgagcgtcttgacggtgcggtcgaggaggtcagcggcgaggcggtcggcgggcggcctggagagcgcggcggcgacggggccgatgccgagaacctcgcggaaggcgtcgtcggaggagagcaccgcgtcgagcagcttggagaggaaggcgagggagaggagcggcgggtgatgggagagggcggcgaggcggtcggcgacgtgggcctggagggcgtggaggacctgcagctcgtcgtcctgcgcggggtcaaaggaggcgacggcggtggcgctgcggcggaagctgaggaggccgaggaagcccatcccggtgggcggcggcggcgggtcggcggcggccatcgtcgtcggggggcttcagcttcggggctgtgcgtgtgcgtgggcttgggcttgggctttgggcctgggccttggtggtggtcgtcgagggaagcaatggtggtgggtggagcgggcggtggtggcgcgcgccctcatatacgcacgcgcgccggctccgaccacgtctcgcgcgcaagagctacctttgactgcaaggtggggccatgggtgtatagggcccatgtgtcagtgggggtggagaggaagaggaggtggtgcgctgcgcggagaggaatgggaaaggtggactggttcttggagctgacttggttgcctcccactaactgtgtggacctggtgtacagcacccagtaatccctttttttttttcattcgctcccattttctaaatactattttgttgcgtattagttattttcacgtatattctgtgtgagtttttttccctggctagctgcctgagattaaggtgttttttttcagagatgttttcgcttcttatcagcgcagtactacctccgtcacaaaatacttatcgtttagagtttttttgtaacgtttaattatttatcttattcaaaagattatggaattattatttattttgtttgtgacttgctttattaacagaagtacgacttatttttttatatttacgcaacttttgaaataagataaataatcaaacgtttgcaactgtattaatagaaatgtgtaatgtgtagtactagtagtatttgttgtttttatttagttgcagctggcagcttaggacaaattgtaccttgaaggcttgatggctggcagggaatgaaaagtcatgaggtcttaagtccctatcatatcggatgtttgaaaattaattataaatattaaatgtagactattaataaaacccatccataatcttggactaatttgcgagacgaatctaatgagcctaattaatccatgattagcctatgtgatgctaccgtaaacattctctaattatagattaattaggcttaaaaaatttgtctcgtgaattagcttttatttatgtaattagttttgtaagtagtctatatttaatactctaaattagtgtctaaagacatggactaaagttaagtccctggatctaaacaccacctaaaggcttaaagcatgacagggcagggcaggccagatggagttaaattaaagccaaaacagatacggttgtgatagaatcatactagtagaaattagaagaggacgcatgcaaagcttgtatcatgtgacagtgagaagccaaacgcataggacacacaccaccaacatagcacaggtatgtaaacacaacgacaaatgctccattttagtaaggcgagcaggatcttaattcatcttacaaagaaaaaaaaaggaataagacagtgtcatgccactacaaaacactagtactaaaataaaacattagcaccaatcatcttctctctcttttgatctcttctctgaagtagtactagtagtacttcctccgtcctaaaatgaagctatttttgaggttggcacggatattaagaaagtatgtgagaatgattggaggaagtgtgtgattggttgaaaagagaaagtaggtgaagaagaatagttgtgattggttgagaggaggaggtaggtgaagaaatagctttattttgggacaagacactgtgctagaaatagctacattttggaacggagggagtagtaaataactagtgtagtttgaccatgtctattttgacgcgagaacacatctccaccgtcgatctctctgcccacgtgtcgtcccaggatgatctgcgccgctgaatagtaagtactacgtcaggacagtgaccctgcacttataattcactaaacgaaaaggaaaatgaaaaccaataatgattactggaggactacttagtttagaagatacgagaaatactcaagctaattaaccttggactgttctcaaaaaaaaaaattaagcttggaccacgtcagatgagagccggccgagcgtcgcgttatgtgctgcatgcttgcatagaccaagtctcctagctagctaattcttcatttaacttaaatttgatgtaattttcacaatacatatgcaaactaactatctactactaataattaaaacgagcttgattgttactagtatatattcaatttatagtacatagtaattagctcgcggttgcactttctgtaattaaattaacactgggcgatcggcttcagctagctagctagaccaagtcacctgcaagctattagctcgagtactttccagtttcaattcaagtcatggatataattaacaacacatgtaacacggattagaaatcaagcaagctatctactccagggaaggcaggctgactcagatcataccaggtcagccaatcaacggccatgcatacatacatcagaataaatattcatgtgatcgcctagcttatggtttcaaatgacacaaagaatttaactcacgtgttcatcaagagaatgcagtttatacattccaacaaaattcatctttcacttcactcgacgagccggccggctgctgctatttagatagtgatgtttcgaaacagagcaacctctcatgactcatcagattcatgatattttctttttcaataatacaagaagaagtaattaagctgatgataaaaaaagatgagcacttacacgtgtctatgcaggtatgaactcaggtgactgtcaatcgacctccttgattccatcttataccatacatacattagctatgattgaacatatgatgatgagttccatgaatcaatggatcaatatatatcgatcgctaacgcgaaaacaacaagctaatgaccaggagaaaattaaattaaataagcaagtgaataattaatcgtgatatccctaagtagctaggtagtaattaattgtaatctttgtcaattgagacagatgctgctgcagtaatagacacgtcttttaccaagaacagccttgcgtgcatacacatcacaatacatcaccatctcctgggatgatcgatgtatacgtacgcactcaccaccactaagggccccttttatttgtagaaaaaatatatgaattttagaggatttcaatcctatggaaaaaaaaatcctatgaaagcctttgaaaggattgaattatatccaatcctttaaaatttctaagaaatgggtaatcctatgcacattttggagaaaagttagccagaggtctaaccacttggaacatttcctctgagcctatctctctcatctgattcttgcgtttttcctgtggtccaatcaaacggccattcatgtgtttttcctatgttttacaatcttctgttttaaaattgtattcctatcctgtgttttttctattactctgttttttcattcctacgattcaaatggacctaatttcagataggtaaagatggagtagtacttcctatatatttattactcactcggtttcatatataagatgctttaattttctctaagttaatttttctaagtttaatgagtttataaaaatataataattcttacaacaccaaattatatctattaaatataacacttaatatatttgatagtatctttgtttggtataaaaatattattatgtttttatataaatttaattgaatataaagaattttgacttaaaaaagatcaaatcaaagtgtagtacaacaaagagagagatagagtagtatgatcttattatggttgattcgcgtgtatggacggtcaggatcgagttatatatatccggccgggtggctgcattctggccatatggacgtcacagtcacggccgtcgcctctgatccgggtcaagcagaataataagaggagaaatgcagctggtcagccccagatgcaaaactatactagctggttaattataattagtcagtctcccatgtaactggttaatcaacacgcgctctcgccgtccatagtaattaccgcagtgataacaacgggacgatggattgctacatgttagtagtacttactgtactagctagctattagagtaagtcccaaaataagtttattttacacccataccagatataccaatacaaaaccaaagaaaactataatatcttatttttatcaaatttaacattttatcttttcttaatacaactattcgtaaaaaatgagggcgaggcccgagcataggcacggcgacagagaggagactactccctccgtcccacaaaacgtgattcctagaagcccgatgtagctttagcagcagtattaaaagattagcatgtcttacaaaatacaaccactaattaacagtaaaaaaaaagacaagcaagatgggtgttttgtagagaaaatcaaccgatcgacgggacggcaacacgacgatcgagcaaggaaaggaattggaggaagggtccggccgcagtcaagtcggcgcgcgggataagatggagacattatctggacgctggctaatttgggatatcttatccggactctcactgaggctcagaattaaggttcatctatctatcaatccctaattatattatgttatatgcctaagtattatcgttgttaatcccttcgattgtccatgggcattttacaagaggcacacggagcaagcggcaatctaaggcatcaagcaggaaatagtcccggaacatcacgatggtttcaagcttttattcctgggcttccaccaagtaatatacgcatgtaatcatcagatgagatgataaaatatatcattgtagtacattgcattatctaaaaaaatcattgtagtacattagatatttgttctctgctagacataagctttctcatcaccatgtacaaatttccgagacatacttcaacggccatctgactgactccacaatacaattgctttgagcccttaacgaccatgaaatgcccattgtacacaaggtaatacaaagttacaaactacagtagcacaaatgattgttactcgtcggctagcaagcaaaaaaaagatcaaggacgcacccccatccatctctgctatcaaatcaagggtaaactccatacaactcaatgatgaagtaacaaaatcaaccgtcctgtagttaaagctatcgtctccgtatatgatggtacagagctaaaatgataaccagctccacaaacctgctgcaaaaaaatcactagccatcaccctatcacgagaagaaccgtttctaaactacaaacatgcctccgcagaaatcatgcatattggactccagcacatggccttgtgcaggctaattttggtgattttcctctgcaggttaactaacacttggggcagacgcctcctcttccccttcatcctttgtcctggtagaatgcaagattattgtcattgcaacatccaatcacatcaagataaatatatatcattttacccaaccaaaggtttgaataatcctagcctgattaatcatggaaagagggtgtcagaaccaggaaatagtgtttcgtttacgtaaaaaatggtgaattttggagagcaaacttgtctaatatttaagcagatcctgcttttcaacagcacctagaggtacagaacttgttctttcagaagagcaatcttattttaccagaaatgttttgtgggcaaacagttttggcctgcagaatgggacgttgcattgaatttcccttgaaacagttttgatacatggaaccgcagtacacagaaatactaacacagtactaactatattcagacaaaagcagccttgcaacaaaaatcttgggtagcattgcagtaggaaagcagaatagaaaaacaccagtgcagcttgcagcgttactttatgcccttaaggaaggtgtgcaagtgggcatgtaaaagttggcaagctttggaagcttaagcagcacacataaaccgagtaaactaagagatgacagaaaaaagtatgatacttgaatacttcactcagcataatcaaactgaatcagtacccatggaaaattgttacaatcaacagaaatatgtctttttggttctctctctgtgtgtgcgtgtggtttgtggggggtgatagaaatatattctgtaacaagacctaagttgatacaatatgcagagctgtccccactaacctttcattgcaacttttgcctgtgatatcgtcaatggcttgatcaagtgcatatagagctatcttcttaacctggtgatgcatattcacagggttcaattagatatgaatgtcaaaaggggagaaactataaaacatagtgctagagctatcacagttgtcaaattattcaaatatgtgtgcagaagagtatggaactgcggataaaaggattagctaacctctagtttatcttcattcaccctatgacccttcggaagcaagcgaaattcttctgtcagcctgatgcactcttgcacattttccggagaaacaaagtcaagtgcaacctttatacatgactgtccaataaaagggaaaaaaaaagcaggttggtaaaaagaataataccacagataagattggtccattttaattcaacacatggtattaacagcaatggtaatggacagttggaaactgcttccatgtctgtcatagcataccttcaaatttctgacttggtggggacatcctgctgggataaacacagcctcaccaagtttctgttcaaatgtccaaggctcaattcctgcatatgaaatgaacaatatatatcagtaagtgagaacaaattacaaaagacatcagtattttttactgaccatgttcttccttgagctttctcttgtgctcatttgttagataaaagcattgatcgtgaataggatgagaaacctgacaacatagggcagttgtgtgagatgagaaacatgacagatggcattccatggacaagtggtagaataactaattacctgtttgactgtttcataattataatgtctaaactcttctgcatgcttcatcagataatcatgcaatttgctgacatcttcacgtcggaagatatcccacaatgcaccaccctctgtctgatttccctcaacaaatgggtgatcatctttgggctcaatagatatggtaaatttgttagtctccatgctggtttcgtttatttcccctgttgcactggaagagcaagcatcacgtcgcctactgcgtctttgacaatcagaagattcagatgatcctacaccatgagaagatttacatttatcttccctcccaaagccattgcccatctcctctcccccattaattgtgcagatagaatggtctgtttcccccttggagaaagtaatatccatattatgtgcatcactttgattgggtgattgcccattagacagactcaagtttccctcagcttcatcagctaccatatctgtatgaacacctccctggtccattacagcaacatttggtgctggctgcttaatgcttgagccattttcaagtcctcgagatcttggcacttcagttgattcactgagagctattgatgtatcatcgtcatggtctggtcgcagaacatgaagattcttgccatctttacgtaagctctctttctttttctctattgctgtaatcctttcagctttgagttctacctcatcagtatgcatgagaatattaacctgtttacgcaataggaaacatgtgattattactttattagtcaaaactgaacaaagtaaacaggtgtataacaaatggaaaggcctgaaatcaggaaaataacacgatgatacagctttttattaaaaaaaaaggaaaatcacacgatgatacagctttttattaaaaaaacacaatgatacagctggatactgtatgcatcagatacattttcataattaaaattaacgttccattggttttttcccatataattcatgacatggtcaaccaactatccagcattgtcagccaccgtagcaagaattaaactaaggagtgcagctttcagcagcaagtaacaagacaacacaagcaaatatcacataattctttttatagatgattctataaatttatgctgtgtttaataactagactagatgttagcattggtaatcaactataaagagaactgaaaaatcaaaaatctaaataagcaacttccaacatgccaacagaagaatatttgaagccaaaaacatgcaggtagaacccagtgccctgaggttgagcaagctttgtcctgcttggttcggtactagtacaaaaattgtccctttataacagggctcactcttaaactaggaaggagctaaatatagtagaataacttgcagacttgacatgactacaatctaaagttaaactaggaaatggcttctatatattcgatgctcgtactgtcactgtagttgtcttccagccactgttcaacggcacgagctaggctcatggggtgctgaaggtctgtaagattttacaactccacatcagtaggcaatgattggccgaggccagcagtgaacaagttgacttgctgttctttcagaagagatggtgaaacctggtacaagagagcaaagaatttttttggtactctgccactatcctagtatggtgtaatagagataattggttcaaggcattgctgtgcattggagagccatagtgcatgttgacaaagtcgcagttttttttccacaagaaaacgccttcatatcatttaaaactgcatatagcacttctgtgcctcgcccatcatgtggtctgacacaagccattccttccctcttcaagagatcacggtccttgaaaaattgctcgcaacgattaaaccatgggagtgggtcttctttgccatcaaatgctgagaaggtcaatttgtggtagaatagcgcaccacacgcatcttcatcctgccctagcactgatgccaagacattgctgctgcggctagtgctggttggaatgaggccatgagggccagggtatcatgctacagcccttgcatcacttgtgttcatggcatcctgcctagaaatgaggatataaatcttcttgcccaggtctgtaccccagctgtttgaagagctcttccagggctttggagttttatatggtggatggcagggatgggttggtcagagggctagggctgctggaggaggagattgctatgatacgaaataatgtagtaaagaggaggaagaaggtcaggaatagaaacacaggcaggtatgaaccagcactctcaggtcaagcagggttgtcctgctcagctagatgctcggttggcaaggatttagagttgggtgaagaccttcagctttattgactgattgctgctagtacaaaattggtcccttcatataacagggataactcttaaactacgaagaagcgagatatggacatatggtagtacaacatacaaacttgacctgaatactaggaaatagctactatatttgatatataaagactaggaatgtatatcctcccagactactgcaggaggccctgctaattttgagttcccagcagccccttcctttccatgtttacgtctccgatactttctatccataacatataatagcatccaaggatagcaatatgtacaatcaatatgaattaaaaggaaacaagattttaatccataaatctacatatacaaatgccagaaatcacaagaaattcacttatttaccgcatcagacatgtcgcaatggatcttcgtaacagaatcacctattcccaactcttgggcgacaccataagcaatgtatgtctttggaccaagatctggctttttaacatgttttggaagcttcactgccagattaaggggaccagattttggatctgtatactcacgaaatggtagtgcagacatgaactcagcaccatgccgcggcaggcgctcctcaaaggaactatgttgtggccaatctttaagcttaagtagcacaggcaaatcctccgaaccaacagctccacgggaatacccctcaaaaaacatgtgaatatttatatcaacctgcattatggttaaatgaaagcaatggtattaggaagttaccagtttgaaatataaagtagtttcaatggtgctgttgaaccccagatatgaaactggcaccaccaacacatcctggtggtacataaactaatatattgatatgtgaagttcataagttctaccactaccaggcacataagctgagctgacattaggtagatatacagttctttttcttttgttgtgtgtacattttcatggtatcagggattccactggcacatctacacacctcaagaaatcacgatgatcaatgtttcaactccacacgtttataattgtactcgtgtagattatgtgactgacaatccctagcatcagctctacaagaggcagcttattgcaattttattaacataatgttacttacctcaaaccatgtcagacaatcaagagctataactgagagccgttcatgctctttcttgtctctcttttcccgtaaggcccgccacataaccattggctcccagctcagtccagaagttagctcaagcacgtcacgaacaatgactggctgaccattcaaccaatgctgctgaaaatgatctaaagctccactttgaacttctctagcagttggacaatatatgtagttatcattggagtcctctctgcaagctgatttccgtgatgtttcattgttcacttcaccggattcagtgaagcaggaacatctagagcctcccaactcctgctctgtttccttattgaccactgaattgactttatccagtaaatcagaaataaagttctccttaaacaaacacctaagttcgagaagacaatccccgcaaccacctgcattaggtgggcatggtatgcttccgttgctttttgccctccatatcaaactaggagtgcaatcctctgaaggagctgcactacctatcaacctgtcattctgttgatcagaagccccttgacctacagcactgctatgactacttccctcttgcaaaccttccttgccttctatttcaggtacatcaacagctgtgtcacaagtgacaacagtaccagtagtaagaccttgacgcaactcctggcagcagctgaggcagagatcatagtgaccacttttacaacttctgtggaagtcaacaatggatgttctgcagttatcactgtttcaaataaaccaaaaaattagatagttcacacttgaaagaacatatagtccacatgctttacaaataaagcaataccaaccagtaaatccgctcatcattattaaactgagcttgaggaacctccaagtcagttacatcgatccctgttgcagaattaggattaggaaccaacaaaagaaacttagtgctaaaagggaaccgtgttaagctatgataatacctttaattgtggcctcaacacttttctctagcatctgctcttggtgaagttgtttcaaccaagggagcaaaaagcgtgcaatacgcagagagtatttaattttgttcttaccatcggcaaactccttgtcaccctgacaaacgcataacagaaaatatcaaacaaaatgaagcaatgaggccaggtaataaaatagaaacgggacaacaaaaaaaagaggtgtaccttatttattacatttgtccgcagacaagtcttacaattgcagttattgtgacaaactggacagcagttctcaaaatcgtcctctgttagatgcgggtacctgcttagatcatgccacagaaacaagcaacagatccatattagtagctaagatataaatgtaaatttgtgcatgaactaacataataagaactgaaagggtgacacaactaaggtgatcaacattgagtgcttttagaagggcacaaaccagcgtttgatgcacttgacacaatatctgtgcctcctgtttttttcagcaccattccggcacctcacaactcttccactgtccttcctttggcactgatggcacatggttgaagttccatccatcttttttgtgtgctgcaaatcaaggaaatcatgatataaggacttagcaatgaattactgacatacaactgcaaatacaccatagagaatatgctgtataaaagattgcaatttccaccttattctccttgtagtctaccgctggaacgttccgcctgtccctgagcttcctgggtggaagttcagtcgaagagggatcagcaacaggacccttcctgcgctttcttgcggttctcgaggcctgagtctgccctgcgccattctcctggaaccaaaaagagatccatcacacattcggaacatggtaaatgtttgcatttccagtccccggcaggaaaagaaaacactaacctcaggagaagcctgcgtttcctcctccttgtttgtcttctcaccgttttcctgcaaccgcacccaataactggtcaagcatttcgtatgcaaaactacatattaagctcttcttaaaaagaagtggagggaaaattcagcgcaattgcagaggaactcttcagtgctgcacattccgtgagcaacccaggcttagaaatccaatagattggtagatatccaatgaaatttgacaactctgtagcttagacaagcaaaatcagggaaatggtcgattatccaaataacagtacactatgattgaagaaaagggagcaaaatccattatccattgcaagcgcgaaaaggaatccaaggatattgcccacttcacatccccgaccagaataacaaatacagaaagaaaggggaacaactcaaagcggcaaaactaacacaccgaaagcaaacatgaagcagccagtgttgctcggagatactagcacgaatccatccgctagggtttaaacgtcccaacatcccctcgacgacaacggcgcgaagaagacgcagcacatcatagcaactccccgggttttccgaggcgttgcccgaaggaacgagagagaaaataaaaaaaaacgagacctaatcgaagcagcttcgcttcggttaccttggcggcggcgtcctccggggccttgcgcggcctcccgccaccgcgcttcctcttgggcggcatccccggctagaccccgcggcgaccggcggcgaggtcggcggcggagaaggaggaaatcaaatcaaattgcggcgcgggtcgggtcgggtcgggtcgatctgtgggcggaaggggattcggagtggaatggaagaggaaggatacatatgacacgacggagcccacgatgtgtgcgttagggcccactggtcagtgaccgtggagggctccggtgggccaggatggtaagcttctgggcccagtttcagcgagagctggagtaggggatgtatggcccactcatcggagaatcgtggccgcgcacgtgtgccgaggagtgtactaggaatggtttgtttatgtttttggttttcgcgggctgtggtgcgacgtgtgagtttgaatcgagcggcggttggtgaaaaggaaaattcgaggtaaaaaaaaaagggactgtctatctgtctcagtcgacagaaaatttggtgtctaatctgttgtttttttatcataagatttcgatcaaagagtctcagatttttcacagaaatactttaaaaaatatatatataatcttattcatgacccattggatacaataaaagcccaaaacaaaaagaagcccaaaattaaaacatgagccaaatccaatattacaaccacatcaaaactgacagagagaattcacgtgaccacattgcctattgaagaaaacttgagaaccaagaagatgctctgcataggcacgtgatctgatcattaaagcaaaaaaagcaactttgcttccaaagagaaaaatcagagcaatagatcgaacaaggaagaagaagatggaggtggaggagaagattgcaaaaaaacgaaggatttagaatctgcaaacaaaattcaagatctgaggaatatgaaatcaacaggtactgaatcttgttctgaacttcctaattcttgaaatcaacactcttctaattcttgttctgaatcttctgaacttccttctttgaatcttgaaaaaaataactcacaaatgactcaagttcatgggattcctgtgaagaggcaaaaaattgcattaatccatcagtcctctatactggcgtatgtaaaagaagcataaaatagcacaacactatatacacagtacttcataactcatttgacaattgatagaatcttcatatgaatctacaatagcacaacactttagactattgacaaaatcttcatatgaatctacaatagaactatcaaataatagacagaatttcatcactcatttgacaatcaaatatgttagttacaggattgcactgttggtattttaactaaattcttgtggacttaagatctctattcatattgcatatcaatttattgggaacaaattcagaaattaataggaaaagtcaatcatagcaaattttaatttaattatagttcaactaccatcaacctcctaactcaaagctttcaaacaaaggagcaaaggttcacatataaaatgactaggaaaacacaactacaaaattcaaaaaaaaaatcgcatggcccctgatacatatcagcaagcaacacacaatgactataagaaaacaatcacatggccctgatacatatcagcaagcaacattcaaggatttactgtccagactgtagacttaaaaacttaacataatcaaaaatttgaaaacttatactctgcaaaattcgaatttacttcagactattaacataatcttcatatgaatccacaacataactttcacataatatacagtacttcataactcatttgagaatcaacaggttagatacagtattgcacttttttgttttcaactaacttcttgtggacttaagatctctattcatattgcatatcaatttattggaaacaaattcagaatttcataggaaaagaaaatcagaacaaattttaattatagttcaactaccatccatccactaactcaagctctcaaataaattattcagagatacaattgtcaatatatttgtactacaataagatagactgtatttgatggccctgattcacatcaccaagcaacacacaaagactactgtatttaaggattattgtccagtttgaagacttaaaactttacataatcaaaaatttgaaaactcaaaacagaaatcattcagagaattcagaaaatagacaatttatttcatatgaactgattagaaggaatttcagaatatcatatgaaaactatatgagataaaaaattacaatacaagtcaaaatgaaatcatcaagtgtactcatcaagtgtactgataatatgttctttgttttgattgctaaatgtttgataattaagtgtactgaaatatacttatgctttgttttcacaggtttgacagatgagaatttgaaaggttttgttggaggtaagaacagacttatatgtttatataatttaatgaggttatgcatacaactgttcattaaaaaaaattactaatttttgaaaattctatgtatacagaaacagcgaaaaaacaacagttgattgacttggatttaaacaaaaaaatttcacaatcaggtgaaaaaacataaattttttatgttgtttatttcaatatgaaatcagaattataatcagaaaatctcattcaaacaggtttacaattaattgagcaaaattacaataggacaagatcatttataatagatgcaaagaaaagtagtacacgatcaagtactgcacagtcaggtaagaacggaaaaaaaacatttgtccatataaatttttatttcattgatatgtttaaattaacttagaaagaaaacatatgttgtgcaggtattttgaaggatttaagagagagagacaaaaacattgagaagaagacaatatcaaaagatgaaggtaattgaaaataaaattacataatttcttttgactaattgtattcagagtttggttttaaatttcataagaaacaaacatcagattaattcaatttttttaataaataaaggacttgggttactggagcaaaattataatacgatgagatcatatatgcttgaagatggcaaaggtgatacaaaaactggtaagaaacataaatttagaaccattaaataaattagaatttaacaataatctgtctattctattataatatgcaggaaacactcaaagagattcagaaattgacaagggaaagagaatagctgttatcgagaatgtaaaaacaatggaaaatgaaagaattcaatttgaagaagatatgttaggtatatatatttttgactacacagaatttgtttttttgtacatattttagattgttttattttttttcaggagaacaggatatgaactatgcagaagaaatacatcaaaccaatgttctatcactattggatcaagatttcattgatgtaattatacattgtcagatatcgtatatttgttttattttgatttggttttaatttaattaatatattttaagcaggataaatttacttcatacactagtctaatggaacatattatatcttcacaacctacaagatgcaatgatttggaggtaatttaacttgtactctattgaaaattagaatttcttcattttttttgaattgttttttaaaaactatttttattctttgcagaattcgatgtgagaaagcagcagcacaaatgttgacttcaattataatttggtgaatgaggtattaaaaaaatttattatttgaatatatcatttagaaaacattaagattaataaaaaagatcaaaaaatcattatgttgaattttacatgagtgcaggttgaacaaaatggaaatgattctatgcagactgtcattgatgcaaaaaaatatgtctgaggtgattccagaaattaattttgaagctcaagttgattctgtacaaccttggtctctagatttgttcaatctacaagaatctattgaggtatgaatttttcatgaatatgtatggttcatatcaattaagattgatataaagataaattttcaataatgtaaatttatggtccaatgtttaattacagcaacagagttcaattcagtctagtgataaaggcgaaagtactactgaagttgatcctgatttgaatgaagaatttctaacagaagaagatattgaacagtttctagatgaagaacaacaggaagcatcaaaaggaaacaatgcaagcatagacagaaaatatattccagagttgaatcagaaattcaaatcaatagatgaggcacagaactacttcaatttttatgcatacatggctggattttctattgtcaatgctcacagtgctagaacattaagtaaaaaaagaaatggagaagttattagagaaacattcaaatacaacaagtatgtgaagtcggattgcaataagaaggaagaaacaattacttctgaaaggaaaacaaatgaagtcatagggactgaatgcaaatgtgttcttgtaatcagtgagaggaattcgatttgggttatatcgaggatagatttagatcacaatcatgagctcagtcctccagatgaggctagatttctaagatctcacaaatacatgtcgacagaagaaaagattctaatcaggactttgaaagaatgccatattccaacaagaaatatgattgtaatattatctgttctaagaggtggtctaacttctttgccttacactaaaaaggatataagcaatgtcagaacatcaataaacagagaaacaagcagtaatgatttgatgcaatgtttgaattttttgaagaaaaagcaggaagaagatcccaatttcttctatgagtttgatcttgatgagaatagaaaagtgaagaattttttttggactgatggaagatctagggagtggtactacaaatttggcgattgtataagttttgacacaacttttttgacaaacagatataatctgccttttgcaccatttgttagagtatctggacatgggaacacaatactatttggttgtgcttttatacatgatgaaacaactgaaacttttgagtggctcttcagagcttttttgaaagcaatgaatggaaagcaaccaaagacaataattactgatcaggatggtgctataagggcagcaatcaaaaatatattcacagaagccaaacatcgaaattgtttcttccatatagtctcaaaagctctgaagagatctggttctctattcaagaagagacaaggtctttatgacatatacaatgatatcatacacaactcattgactgaagaagaatttgagtttctttgggaggatatgattcaagtttttaatttgcaagacatcaattttctgagaaacatgtgggaaatcagaaaaagatttattccagtgtatttcaaaacaaatttctaccctttcattcaatcaacagcactaagtgagggtacacacttagtgctgttggcaattacacaaatcaaaaactgtaattacagagataaaaaactgtaactgatagtagtctatatactaatgtaattaaatatagatttgcaaagtctagtcattcatatcatacaaaacataaagtagaacatctcaatcataccatattactgcacaatattttcatctgaacagtcaggttaaaaagcacaaaaacggtataattatccttcactcaacagcacaaactgtactttactatacttatttcagtactcttcactatacaactgacaaataaaatattaaactgtttgaaaaaaacagtaacatgcagtttcaaacatatacaatataaacaatagctaattaaaatgaggagaaacaatatcaaaccaaaaaaaaagatttgaaaagaaaattggtaagcaaaaataaagacatataatcaaacctattattctgttttggcacaggaggataaatcactgagaatctgttgaaatcaatagagtgatcttgaacataaaggttccaggcaagactaaaatttgaaatctacaaaaaaaatattaatagaagttaaattttgtagatgaataaaaaagctgttatgaaatatttacaaattcataaatgtatataaaactaagtataccagtttaggtcttaattcagcatgatagaagctctcctcatcatacaatgaatccagaaaaacaaatctttcagatttcaaatcaatgacaaatacgaaccagtgacgactcttgacaattgggaaaaagagctgaatgaaaacaaaaaaatacatgaaaaagaatttaagttatataatgcaaaatttagagaaaaaaagtaagaaaataaaccaggtcacatgtgtgaacatgtcttgctagtgaagctccatcaaaacacttctttacagccgagatatttgtcatagaacggtccttaaggagatcatcctaacattaacaaaagaaaaaaaatgagactgatattatttgttaatgtcaattatttataaagatcaatatagaaaacaactacacaactacagtttctgtcatattaacttgcactacaatggtattatttcataagaaaaaaattaatactaaataaaataaattacagtcaatttctattgcaattacagaaaacaaaaactgtaattacagagataaaaaaatgtaactgatagcagtatatgtactaatgtaattaaatatggatttgcaaaagtctagtcattgagatcatacaaatcataaagtagaaaaactcaattgtaccatataacagcaaaaaaatattttcctctgaacagtcaggttaaaaatcataaaaacaatttaattatccttcactaaacagtacaaaaactgtactatactatacttattttagtactctttacaatacatctgacaaataaaatatgaaaaaaaacaagagacaagcagaccctgcataatcctagtaaaatcatacataaccagcgagcaaacaaccagtaaatcagaacaaacagcaaaacagaaaagtcatctcaccaaaaaaaaaatcataacttaaaaaagaaaaaataatcataaattcaaaaaggatgccatcagatattaaagaaacacgtcaaagctctgcaacatcatcagacaagaattttaattattctttttaattagtataattaatattcttgcctgatgacgtgctgaacttagatttgcttaatgtagaagatatttatcatcatctggcgaaaagaaaattaaaataatgaaccaaaaaaaatacaaaaattatctacactgtagtacaaaaagacattagaaaaatcaattgactatcaatcaccactaatgttgtaacaagagtgcagaaaaggggttcaaatggaagtttttcattgtgtgattagtaagtaaaagtctaaacatctaatatgataagcaataaaaattgtaattcttggttgatgaagcagaagaagaagatggagagaaacacatcatatataataaattacagtcaatttatatggaaattacataaagcaaaaaccgtaattacagtaatacatttcggtaactgggaattaactatagattaatgtataaaaatgaactgttaacaaaatttgaatattgatttgcaatgtctactaaatcagatcatacaactcaaccaatataactactaaaacaaacatagaaaataagaagttattttacttagaagggcatgtttccttgcttcaagttaagaaattctttctttttgatttccatgagaccagcagggatgtgagcagacctgaatccctcacggaaaatagtccaagtgattggctcgtcaggaggaatgagagttttgtatgtctcccaccaagcagctgctgcaccttgcaggtagtaagcagcaaaggtagccttctctacaggatcacaccggcaaaggttcagcttgatttcaatatcacgaagccaatcatctgctgcgagtggatcagccgcaaaggagaaatgaggtggatgtgttcgttgaacatctgctagcttggagggtgcttgattggcctgctgtgccatggcagcccccatgttttcagagttcgctaccatcctttcaaaaagtcggttttgattagccaggagttgagcaagagatggttcatcatcatgctgttctgcagtggcagcacggcgactacccccggcacgtccagaagaatgtaggccagtgcgaggctgactcgctccctcaccattggcatcatcagtaagagcagccatagagcgagtatgtgtcatcctgcactcaaagtacaaaagtacatgagctgcttgagcatagaattggcatatacattaccctaaataggtagcatacaggaatgatttcttatagccgaatttacaagtcatccatcatatatttgcatgaaacaaatttctggacagcaagcaatccattccaaaaggagcataagttcattccagtacattagttttaaaggatctaagtgatcacagatacataggagtggataatggtcataagaaaccaagttcatgccttggtgttacaaaattttgaccgttaaaaagattacatattagggtgtcatctcatacatcttaaagaaaagaaatgaaagttacaccccatacatattctttttccagtacaccattctatggaacttcggagaatccgatgggaggttgaggcactgtggttgacggagtggccatagtcaaacggtattgtctcccattccgctcgaactcatagaatggccccagcagcaccggatattatcaattaataatcaaatagacaaatattagattaaaaaaagaaactacactatttttagatacttactcttgaaaattactcttgctgatcttgcaaacaacattataaacttgtctatcatattgtgtcactggaaaagaatgtctctcagggctgtatggatctgtatagtatctagctggttgtaaaattcttctgagatcatgttttggtttttgacttgtgctgcactgtccaacagatttatcaacattgcacaacagaatcctctcaggactgcctgtagacatcttcaacttcttgtctagtttaactacaaatgtgttgatcttattgtacaaaacattagtcttcgaagttatgtcaaaacaattgtctggacattgtttttctccaagaaatatgacatcaggtgaatcctaaataaaaatagaagaaaaaatgagaaaaaaatgtatttattaattttaaacattgttcttgaaccaaaacataatccactacatttcatttcaaggtaaaaacagaattacatagcttcaaatggcagaaacaaaattttcaggaaagcacttttgacagcacaaatcaaacagaaaaaaaatttcaggaacacacttttgacaggcacaaatcaagcaaaaaaacaatcttcaagagcgcacatttgacaggcacaaatcaagcagaaacataatcttcaagaatgcacatttgacaaaaaaagataaattcataatatattagtaaaacaaaaaaaaataaaaataagaaaacatacctttttctgtagttgttcaatgttcaagttttcctcttcattatgttgagtcaagatttcagtatcggtatcctccaaagttatcattactaacttgtcctgtgaaatattaaaaaataaattttaaaaaagtattataaatgtaaagctttgtacaatttagaaagttacctcattagttgaatcgttcaattggctttgtgaatcatcatcgaaatcttgtgacaggtcctttggaatgatctggattaacataaaaaaaattttgagatgaaaaaaacagataaaaaaacatataaaaacatacaaacaggacaaaaaagaataaggaaccattacatttgaattgtcttgatgtttgggtgttacttgagtcctgaaatgtttttcttcatttggaaaatcatcatctgaatcccagattttaaagctaggcttctcatgacccaagaatattgattttctttcattgaaaccaacaatgcttgatattgctttctttggagaagtattactgagtcctgtttccaaatttagaagtaatataactgagattgataatttgggaaaaaaataatcatcaagaaatttaaatttaaaaacaaaatatataaaatagaaaattgaagagaaactaaaatttacctggcttggaaagctttttcataattccatcaacaacagctattttatcctaaaaaaacaaaaaataaggcatatttaatcaatatgctgacataaagaaaatctaaggcagcaacgtattgaagtttatattatgttttgcttttcacaaaaatttaaataaagattataactaaattggaatgttcatatcaactaattaggggcaaagctagaagttcataggaaaaattaaattatatattcttaaagaattacaatctaaaatatgtactaaaagcatttttaaaagaatctacaaaatttcaaaaatcatattacttcaacgagactaaactagcaaacccatcaaaagtagatattgtacggttagaattcagaaatattgaaagcaaaatattatacagttagaattacctttggagaagatgatattttcataggagtttgctcatttccaattgcattatcattacaggtattctggtcttttaccattgaactatcatcattgaatttactcttgtcatcttcattcagattaacatctacataatttaaaagacaaatgtatatatttatgagttgtaagttagacaaaattgaaactaaaagttctgttgttgctggtactaaaagtaaaaatgcagcgattaagaagaaagaatatataatgataaataaatattgaacagtaaacaaaatcatattcaaaatttaaaaacttactagtgttttcaggaacaattggcttgctattagataaaagaacaaagacatctacaagaagattctttgctctttcatcaatgcagttctcatcaggaccaaaatgttgaataagcaattcattgatcttgtttttcatatcttgagttaaatcagcaccaactgaagaatcaagcatatctagaaagcttctctcaataggtttaacaggaacattttcttttacatcatcacttccaatctaaaaaaaagagagataacataaaatttaaaacatgaaacaattatattttttaaaaaataagaaatagatttataagtttaccattttgtaacagcactcagaaaaatctttaactggtcttttgccatagacacctttgctgattttatcaaactttgaaatttttttgatcattgaccctttccatacttttattcttggaacatgtttcagtactaatcgcataccaaaattcagaaaatccaaataattcacctattacaataaaaattaaaatgaataagtaactggcagaaaaaatagttttaacaaataattgaaaaaagagagagaaataatactaaccaccagacaatagaagcaacctccaaaagtttttgacttgtcaagcttgctcagatgtttcattaaccaatcaaagacaagactgctccaatccaaattgtcaatacaactaagatcttcaaaaacactcagatatttcgtgctaggttgaagagaagaatttgggcacaggaagcaattcaaggatacaatcatgaaacacattaagatttgttcatcagacattgtttcatttttgataagcttctctccaaaatatttgacagagggcaaagaagagaggccgaaagagtcaagaaggatctgtttgccaacttcaaaatctgaactaatcggtaaacctccaacatgcaaacccaaaacaatatgaactgattctttggaaagtggaatgactttatctctaacgatgatatcacaagaggtgacatcaactctttgtgccacccataaagcaaatttatatggcacgggacatttttcaaagagtaagagagttttgaaacaggttttggaaataatctctctctaatgttcagacaatgaagctagcacatgagaaaagtatttcacagaaaaccttgtcagtttagtatctaaagttgcagcactcttcattggatttttctgcaaaagaaaagatattttcattaaaaagtttttacataaattttgaaaataataaagacaactaataacatcaaactaatttaccttgcttttatgagaatagagtttccttttcattccatttagaacattatctctatatatctcaagcaaggctgaatccaacttatttttgaaatcaacatctactgtttcggtttattttctctatcaaaaataagagaatgcaaaattaattttttaaaaaaggagcaagacaataaaaggggtaataaagaagagagaaatacaaaaaaagtatgagaaatgcacaagatctaatatgattaagattctacattattggaattgttgtatagaaaatgacatgtttcaaagttcatcagcagatatcaaattcaaaaactaaaaataaaatgcttctacctttagacaagcagataatgtatcccaattaaaactctacaaaccacatttatgtggagtgccctttttacattattttctcaaaaatcaacagcaagacaagtactagaaaaactgaatgtgagcacatattgacaattaatgacataattgcagcaatgctctaagaatgtagaattgatattgcaaatttcaagtattgaaaagaataagaaaaaaagttaaaggtatagctaagggatataaaacagaaagcaaaagccaaattacagtcaattacagtgaatttatatggcaattacataaatcaaaaactgtaattacagaaaaaaaattatgtaatagagagaagtctaaaatttaatgtataaaaaagcaatgataggaaattataatagaacatataacttaaactaaacatagtgttgtaaacaaaaaatgcaataatattttgttaccttggaagtgccttcatcagtatttttcttcttactcaactttcttttcaaagagttcaaaagttcatccttagaaattccaacataactagattcggagtcctacaaagaaaattaatgaaatctaagaatattcttacaaacaatgttaaaaaattatttcataaaaacaaacctcattgtcacaaaattcatcatcatttggagaactttcatattcagaagaaatagaatcaccaaaaagatctttaatatcattaggattacccatctattaaaaaacaaaaaaattgaattaaaataagatagagaaatacacaaagcatgcatatcagaaatcatatatacagtcacaggttcacatcacagtttcacaactcaaggttaaaaaaatgtacagattttaacagtaacatgcagttgcaaatatatctaatttgcaaagtctagtcagaagcacaacataagagctaaatcaaagcctatattgcatataaactaaaaaagagggtgattcgtcaacattcgcacaaaaaatacagactacaacactacaagaccttcgcaatcttgagctcaaatcacaataatggcacctccaattcgaccacatccacttagtgaatcaccaaaaccacccccacgacaaacaccacaaaacgacagtcactagaggccaggataaatcactaatgaatcattgctgaataaatcattcaaataaataactactgaatcgcttgcaagagctcaagagggttattgagtggattagtgagttaacacaagaaacagtatccattaacagattcaagcaaaatgctgcatttgttaattcataaacaaaataacattaggaactagtagtttttggtcatgaatgcaaatgcaagtatctctggaaaatatgtatgaaaaacagataaacatgcgctgcagttcttaatgaacatcataacaaataggctaaaattctaaattaacggcagaacaaacagattctgcacaacatatgagaacacactaagaaaaaatctggatgacttgtgaatgacaggaaggaattggatactcaaacaaaaaaggggaataatgccattgacaaaatgacttgtaaatgacagtagactagatcttattttgtatgaacaattagatctacacctaacaacctaaaaatatcattaacatctaagccataagtgcaaaattagcttctgaatattggatcaaatgaaccatgtcactgatttggattaaaaagtacttctctaccttaaaacagaaataaaacaaacaacaacaattgtaactcaatgtctcataacacattcagtaactggatcaataaactacatgattcacaaaataacagatccactgaatccaaacactcaaaactcacctaagataccagcttcaaatctaagcctcagccaaaagtaacctacaatccaaaacaaaatagagattaaacctaaaaacaccacagaaaaaacaaaaacacaggggaaaaacctaaaacgttgtagagctgaccagatctgagactcgaaacaaaaataaaacgaaatcctcacgagacaatcacgagttcatcacgagttcatcacctactgcacatgctacgactacacaactcatggagttcatcacgtactgcacaagctacgcatgttccaaaccctaacccgtgttgtccgatcaaacaacaacagtgaaatcctaaaaaacaaaaataaaacgaacaaatcaaactaaatcctcacgaaacaatcacgagttcgtcacgagttcgtcacctactgcaaatgctacgactacacagctcatggagttcatcacgtactgcacaacaacagcaaaaacacgagaaggatggggaaggagacggtgaagagcaagagagaagaaaggaaaaactcacgaatcaaatagaggtcaacgagcagctctacatcagcagaaaaaggacgacgaactctccggcgaaaatcctcaacaccggctagatctacgccggcgaaatcgccgtggcggcgaaatcgtctcatcacaacggcgaccttgccgaagcctctctgtctctgtgtgtctctctctcccccagcgagtgagtgattaggggagaaatatcaggacaaaagtgggacccacaaaaatcacggagaaagaaatgcaggcgcggagatcaaaatttgaaaagtacaggtgggacccacaaagactgaaaatgttaggtgcgtctctggaaaaatcaagtgggacccacaacagcccaaaaaaaacaggcccaacaacccagtcaacccagaccacgaacgcaaaaaaaagcccatatgaagtaaagaagtccatctctcagcacgaatcttgaacagatcaatggcccaaaaaacgacagattcagcccaaagaaaactgtcgacagaggaatagcagttccgaataaaaaagggcgaaaatttacagcagccgacgacggggcctctcgaaaacaaagagaaaaatgtctcaaatttgggtggaatacggtcttgaaaaatatctcagattcactgtgctactacttactcctacaggaaattggattattattgtgatgaaaagaagcgagaaacctaattcgcgcgtacgcgttgccgccgcgcacgccggcccactaaggcccatgcacgtaagcgcttgtgcttctttctttatttctcttttttttacaccgccgtttcttcctttttctttattttttcgctgattgttattcctaccgtacagatagattagtctcctatttttactagcgattagtttactagtaatttttaaatcttaactttaaaatttttaaatttggatatgaaagttttcaaatctcgagttgaaagttttcaaatctcaagttgaaagttttcaagattttcaaatctagacttgaaagttttttaatcgagttgaaagttttcaaatcttgagttgaaaatttttaaatcttaagttgaaatttttcaaaattttcaaatctggacctgaaagttttcaaatctcgagttgaaagttttcaaatatcaagttgaaagttttcaaaactttcgaatctggacttgaaagttttcaaatccgagtgaaaagttttcaaaatttgactttaaaatttaaatcttaaaacaaaagttttcaaatctaacttaaaattttttaatctattagtaaaaaaatctccgaatttttttttgagaatcttccctaattactcgtcattaatgttaagtgtatgttaactaatactatagagtagttaggaaggtaatacagagtagttagggaggtgctcgctgctggcgcgcacgcgccagctagcagccgcagaagatgcagatttggatcgagcctgagaacatataccacatgggccgcaagattccgtggcccgtgggcctctgatgatagcctactactgtagtactgtatattgcccaatcaagacagtagtgtcggaatttttttcatttttaaatttttttcttttaatatttacagaaataatctatcggcgcaaaaaattacagaaataggccctgccgccctagtggagggcgacaagctgacgtggcagacggcggctcgacaacgccgtctgccgccgtctgcgaaaattgcatttagcctagggcggcaaggggctaaatgcatttttcgcagccctaaagagcatttggctcatacttttttgcatctgggtcccttgccgccctagatgcaaaaagtaccagccaaaaagtactaggcctaggctggcggcaagggttttcgtgcaaaaaaaaacctccctctcccgtctgtcgtcaccgcccgtcttttccccgtttgccacgtaagcttgccgccctagtggagcgcggcagggtctatttttataattttttgcgccgatggattatttctgtaaatattaaaagaaaaaaatttaaaaatgaaaaaaattcgtagtgtcgtcgtgcaaagcctgtaagatttgtcggtttggaagttgcaacaacttttgcagtgagctgccaaacaacctgtctcaaaacaacatatgcatccttcatccagttgcaccacctatctcccagttgcctatactactactgtactgtatattctactatgactctggtatctgctattctgttacacatcgctaatgctcagcacgtatctactctatcgatctgacaattataaaaaaaaaagataggcaggaaaaaaaccatcgtatcatataaacaaacaaaaaaaactcaatcatatcggtcgagaaaaggcaagaaccctaccttttcacaccgtcacacgagtactcatcccttaggcctaatcggtttagaagggattgagagaaaataattccacacctcaataggtgtggaacaaatcccatcatatccctgcctaataatatcggtctgtcaactatcattggataactggaccaaaaccggccaccgaacaacgtcgatgcgagacagatagcacagtactcctactatatacataaactcctctgaaactgatcaatggagcaataaggtcatcagacagtcatcacctcacctcacccacccacccccaccagctgatgaaagccacagcacaagcaaaatcacaaagctggtatacagcacagcagctcagacataccctgaatattcattgatcattattcactcatgtaccagaaacatttcttacacgacaagggaacatgagagagcatatgaacaccagggatcaataaatgaatgaatctagtgacaaacaaatcacatcacaggtggtaacagtagtagtattaattcatcatcaaccaccagcacaaatcaatacattatccaaatacaacactaagaaccagttaaaactgtgggggagaaaaaaaaatactcgagataatagcgagctgtaattcacaacaatggcattttagaatctcaaacggcaaacacaatcatcatcatattcttcctagtctacaacacctttacacatgtggttttttcttcttcttccctttatgttacaaaggccaccctccatcaccaggtgaggtgagggtgtgttcctcaactcctgaagccaaagttggaccacctcctcccagcatctttcttaacacgctgcgagttggtcacgaaaaggttttccagcgatttctgcttcctgttccgggaccgccctgcctccttcagaagctccgcaagccttagcttctcgtcctcgacatccgggtttgctgtgccgagcttctcttccctcaccttaagtacgtgttccagtatttcaatggcgtcctcaaccctgaaggcaaaagggaaatgcacttactcatgtatcaagttaaaatattggaaatctaaaagaacaaattctatctgttttctttttgcacagggaaaaacaagttgtggcaattcctaaatttatagatgcaacctcacaggtatataagcaatcaatacacccactcaaaaaaaaggggggaaaacagcacgcctgtaagtttggaaatcgactgagttgatgcaaatcaccgcaggttaatagcatttcaatgaatagtttatatcaggcaactttataaataattggacagttgtaatcatacactggcatgcagcaacatgtgggcaatttgatggtggtccactaaactaaatgatgccttcatttatttgttgattgattgcaatctctttgttaatgccatcgaaattatgcaaccttacataggatgataatctaattgatcaaccaatcttgcctatccatccaaataatactacacatgaactaaccgcctatccatccaaataatactacacatgaactaaccaacattcaacatttcacggattattagaggaggaaacccataagctgacaccttcagatagcaaaacaaattcaggggattacttctacagctgtgaatgataagggtagatgccaacataactcaataagcatattcaggtgcttgtcaatggcatttcttggattttccccataaccatcaagggattgctaccaagatatgatttgatcctaattctatatgaaacagctgttggttgaggaaaaaaaagtttctggtatgaacacatacctgcccatagcatcgtagattgcagccaaattactgtagacgccgagagtatctggatgagaggcaccacactcctgttctagaactgcccttgcctcttcaaacaactgtgcagcctcatcaatcttgaatagctgcacacaagctagccccatctggttcaacagaactccaaaaaatgccgacttcctctccccgctagctctcaatttggcaaccgcattttcaaatgagttccttgaatcggcatacctccctaccatgtagtacaacacacccatttgtgcctcgatgccagcaacagtgctccactgtcctggtgagtcctcaagcaactttagtgccctttgcaaaagcttcagtgcctcatcaaggtctccaagcgcctcatagatggcagcaatctccattaggcctccagcaacctcatcaggggcagcgccaggcgcgggctttgcatagacacggagtgcattctcacagtaggatttggactcgcggagcctccctgttcggtggtaaaggtctgcgaggcggacaaagacagatgcaaccgaagggtggtcatcaccacgggcagacttgagtactgtcaacgccttctggtaggagaagacagcctcgtcgaagcgggcgagggcaaggtaggtgttgcctatcgcgacatcgatcgtcgcgacctcaatgtcacgtccattggcgaccatggtcatggaggcaagcacaaggtgctccagggcaccatcatagtcacccttggcgtcaaggatgagtgccatcaggcggcggtcggaggcctcctcgagcgaagcgggagcgctgtgctcccggtggatctcgagggctttgcggcacaacttctctgcttcatcgaactgcagggcttgcacatgcgcttccgccaaatacctgctcatagtgcaaaataaatgttgtgttggtcaagtgctagctcttgcagattattgttacttctatctctactttttttttttttgcataataatgcgatggacttgatgaaatttatggcgagatcggcggaaatcacaaaatagcagagggaaattaaaaaagatgtcgcttttgaagaggtagattggagttgaaaagcaaaatggcgtttctaacttttaagagaggagatctagatcgagaaacgggcgagaaggaagggtttttgacctgcaggtctcggcgacgcggggatcacgctcgccgagcgcggccatctggatctcgaggcccttgccgtagcaggcgatggactcgtccatgcggccgagcatggcgtgggtgtcgccgagctgcatccagccggagaaggcggcgagggcccactcctcccccttctgctggtcctcgggcggctgctcctccgccgagctctcaccctcaggcggcggcggaggcggaggcggcgtgacgacggcgacggcgcgctcgaggacagggatggcgtcggcgtgcctgccgaggccgcagtggatggcggcggcgacgtggaggctcatggcgagctcgagctcggccccctcgccgcggcgctcgagcgcgcgggcggccctctcggcgaactcgagcgcgcgcgcggcgcccccgccctcccccgagaccatggcgtcgcgggcctgcttgagcaggaagggccccagatccgggttgtcgagcgccgcctcgtccgtctccggctgcgccgccaccttcctgggcttggcccgcgacgaggtggaaggcgacggcgacggcggcgcccggctcctgggcagcggcgacgacagccgcctcggcggcggggccgccaccggtggcgagttgtcggccgcggcgaggcccggcatggtcgggtgaggcgagcgcgaggtggggagtcagagagggacacagctgcttggccttggccttggccttgcttgcaatggaagagaagaagaagagcggcgcggcgcgggggtttgggtggcgtcataatgaggagagcggcacgagtaattaggcagcggttgatggccaagtttagtcattaatcaattaattaaggtcctcgaggtaggcaattaaggtggctggttcatctctctctctctgtcgcccaagtcttctcgtgtacctagttgattcgtgtactacggcctaaggctacaatgtactgtggctgtgtgcctgtgtgatgcgatggtgaatgggaatgggcttgattagggttgattgtgttgacctgtctcagaatgacaggtgggccatgcgtggttagcttgtgattaaggtgacaaattgttgggggtcttcatccatcttgatcgctgacaaatctgcctggtgttgcaggcatacagagcataactgagaaaaattattgttacagattactgctccctccgtttaatgtttggactttagagaaggcgtcatttattgagagtatatattttgacaaataaatttaaataagtggcctagataatacactaggaaaattatatttttttaagtgtggagcaaatatttcgtttaaatggttcagtaaataatctgaaaataaatgcttgacttagctactcacttgtctattgtaagtgtattttccgaaccactaaacgatgtatttataaatattttttacataaatatttctttataagtatcaaatattttgttcacgtttataataattagtatttaattgattacatgttaatgttaatgattttctcgtttcaagtatcgtcttgacaagcacagggcactactacccccagctcaaagctctgaaagttcgcttggtcggtatcgacactgatcctatgatatctgcttctacgttcgtatacattagcatgtagtttaattaattatatagtacgtacagtacagtgtatgagaaacattataattaagtagagtaggaggaaggattaaggaaggagtgcattacattacgcatgcatgcctacttgcaagttgcaaccaccatcggaagaagagatacaacgaaaatgatgaaatggatcatggaggatcatcagagctgtaatgcttccctggcatgcacaccctgtcatgaactaattagctcgatcatcacactgtatatgtttgtatgtcctaatcattgttttcggatccatccaaattatcctgacagatcttaaaacacagcccatcacaacgctggtttcgtacatggatatgttcttttcagacaccaattgctgacagtacattagtgtactccataggttcatcttgctgctgccattacttgagtgtagacaaagaaaggagaattattgctcgtgcatgcctcggttggtccgacattttcattgccattcgagcaccctatggattacagactgacagttaaattggttcgctaagtgtgatcagtgttcagtaacattttgctctgttcttatctccaagttcccaacccatctccctcgttttccgcgcgcacgcttttcaaactgctaaacggtgcgttttttgcaaaaaatttatatatgaaagttgcttaaaaaaaatcaaattaatccatttttgaaaaaaaaattagcaaatacttaattaatcatgcgctaatggagcactccgttttccgtgcggggagtttagttcccaactccccctatccgaacacagtactcctccgtgaaacctgtcggtgtaaaatccgaagagaagttgtctaacatgttggtgggccttgggcctcgtcgtgggctttagatttaggttgaggcccacttatcaacaacaaatagtacaaaggccacaacaaggggatgacgaactgccgctgctactcgccgtcgccgtcgccgtcgactcctcgtcgccggcgtccccaaaccaagcaaaatgccatctccgtctctcctcctccaccaccaccaccaccgcctctcccctcgcttcgccccctcccgctccccctccccccgaaccctatcgctgcatcctgctcctcgcctccgcctccgcctccggcttcgcgccagcgcccgcggcggcgggggcagcacacgggaccacgatgacggcgcgcggtccatcccgatagcgcggtgctacgaggcagccctcgcgcgcctcgacctctcgggaaccgcgcggcgggagcaggcggtcgcggcggcggcggcggccgatggaggcgcggctgccgaggctcacctcgccgctgtcgccgacgccatggtcatggaggccttcctccctggacccgacggcgcccggcgcagcgccatgtccacacggctggtgagcgtttcggggttccactcccacctgtccctgtatcttccctttgctgatttgctccacacaaccgattgatgatgagaccaatgtatttatttgttcccttacttgtttactgcttctgcctagtgtgatgctcgaagttgcgtcctaaattccacccggactcagcatcccatcagaattagtgtaacgcacctatatctatttactctaagctttgatgctttattttgcgctaaattcggagtattggttgctctggatttcgtcatttcatacatattacgtgaaatgtttgttggcatgtacacagcctattcaccacacggtagtacatatgatttttaagaacctgtacagggtgaaacaactaactgtacatgctaagttcaccatgtaaaattaatctcttggaactattggttggtactaggagtccaagtgcattagtgactcagtgtctcagcgcaagtggccggctgggaattttatgatacaatagaggtgcttgtacttgtagcttaacaacaaatcagtatctgtgcttttctatcatgttgtgtctaggaagagaacttattgccagttttgtatatatcgaacatggttagatgctttaatttcgatcggaatgtctgtccttgttggatcatgaggaagttctggcatttcattgtagattttgcaagcaaatgaagttacagagaaggccagtaagctaaagaaagaccttggcactgaatttttctctgaaaacgaacctgatgcagagagtgttttggcaatggcctttaagcaagttgtaatggatcagctcacaaactttcggcttgaagtgttctccccaggttcagagatagatctccaagatttgagcaaaccccgaaaggtgttcctctgtaaagtttgggacttgtatattattttgtttcgtttgtttgcttgttgctaatttgtggatgcacaccaggtgcctgcggattttagtatcagatcatcagatgaaaaacttctagctgctcttgcggaagccattttctcctgtgtcattgaggatgccagaaataattacctagggggcactggtggtttgtttcataagtggaagtcaaactgctcattggattcctctgtttgcatagacataatttctgagtcagaagtagtgaacagtgctaggaggcgcttagatagttttgatcttgtacagtcttctcatgtagcgggtaaagcaaagaatggatggtggccagctccaaagtctgaaaggttagtgaagattggtggccctgattttatgctttgggccagtgagtttgtgtacacatataaactacaaattgatgccaaagcattcaagaatacaaagcttgggggtcatcatgtgttagcaaataataagggggaagttctcttatcccacgcccaaatggtacattattattctctccttgtccttgatgtatacattacttgttgccattcttatttattgtatgctattctccatctcccaaacctgtaggtggagttagcaaatattctggacatgtattttgaagatcagttcacattacctggaaaaaccttctattccaactggaattcagaaccatcaaagattaaaaagaacaatgtatgctgctattttttatttcagagcttacttgtgttaaatattttttttttatttatgttcatcaagcattttttttggtgcagggttatttgaacaacctttttgctttgttggctggtagctctattgtttttcttgtcggcgccattgctcagttatgctggcctcagtctcttaaagataaaagattggccactgttagttcatgtgtctcatcatcacagagctattgttctgatatccactctctagatagtagtgaggtatgctttctagttcttgaaatgttgttgcttgcccagggagaatcctgtttgtttttaagtgtggaaacactttggtattttatactattttctggatttttttttacttgataacccattcacaagacattgatcgtcattgtgttgtaatttagaaataactactcaactaattggaagtgtcccaaaccttttgatagtgcaatattgttctctacgtccaaatcaaagaaaaggaaacaagctacctcgatttttagttgctctgggatattttgattgtctgcattatcctatgcaacatagcatgtaagagccgctgctttaaaaataaaggatctctaagaaatggtctgaaactctgcatgattcatgtagaagtcatttcatcaacttgttatggcttcatgatgtgtgttcccattaggaacatcatgtagcatgtctcctttttgaactattacccttttgccagcaaacctagttgctgtttaaatttaattaagggcatatctggtgacaaatctatcataactactttgttgattatctaacatatctgttgtatgcaacctatttacccctgggcagttgcaggcttactgtgtatctgttgttgagaaaattaaagactcatttggttgtactggtgatctaatggttgatgcaaatattggtgcttgggttggagaactgcctgaattcttcaagggcatcaactgtgacagtcatgatgattatgtcgatattcagagtactggtgctattagccaaggagagcaaccctcattggtgtcaagtcctattaagatgtcttctcatctggaacaaaatgatgacactcaagaaactctgcagaatattgctagttttcaggtatgctcatttcctgcataaaaaatctctttgtatcagatgaagaacttggtatttttggtaaaatgatgtgcctaccaactcaaatgtgtatttgccattaacatagttcatgaagagggttaatcaccataaaagagattgatgacgatggtttggaagtagaactgaacctaaggggtagagggttggcaggctgaggaacttggctagggaggatagactggaacatatggctgagatggacttggtgctaacttatatggtttcgcttttatagggacgacatctaacaatccattcaaacctttcctttaaatataataattctaccccatctgataagatcatatcctatctccaattaaacctaagttgctagctaagcaatgtgttgcagataaatattgtaactgccatctcacaccagccctgatgggcccgtgacctaccttatggccatatgcagttatgcacataacaatatcactgtgtgaggtttttagtctgtctattttatattgcaaatttccccaaaatattcatgctaacaggtttaccacacatctgtttatgatgcactgtcactacacattttcagtacttttaagttaccatgtcatttctttatttggttcctgtttttattgttcaatttcctttcatgcttggtagcaaaatgcacttgttttgccatctttattattctaaaacaattgattgatttaagttttgctgttctttacattaatttcctggttttcttattttcagcagcatatatccaagatctaaagtggatgttctataaactataataccctgtttggcatatattcatttgttctttggacataactcatcagtcatgactcaaaagaaagagactacactttctcttttctatttcgtttaatactatgaccacaatgaaattaatcgtttaccttgagtgttacaagatagcacaataagactgcaaaataataatgttttcgttcttttgaataagttgtttgcagcatctgttaacttttcctgcaagttgggttgcacgaatcacccaatgccattgtcttatacttttgaaactatatgatggtagaagattacacttgactttatgatggaaactattgttctattgttcatttccttgagttaaatagttcagacttacactatatcacccttttttgatacaaacttgcaggtggtcatgtcagaaagaggtaaagtagttggatttcagccaacaaaccgcctagctgtgaatcattgggcaacaaatccattaacgaagctcctgtacgaggggcgaaagatctctccaggtaccatgattgaagtatcaaaccatggaattttattgttaatacctgtgctaaagctgtattttgtctttgcttaatactatggtatggatattgtcagcctttctggagcctaggcttagaatttctcgcccagctaaggttgtcccagttgagttgctgatgtcggtgaatccagaatccttttttgctttggtgaggcctgttcaagatccatgctaatggaggtacttttcatttctcctccagttgttctccatctactaccctcaccctctcttctctctcatgtaattctataatcgccagtactttatttacccagagttctgtagttgctgtcctagttaaagctaatgtcatttgttgtcacccaatctatgcttatcttacccttaaaacaggattttacatgctttgtcattacatggtgctgtacagattcatgaactttttaaacatagtagactgggcagttttcttgttggttagtggatgcattttatagtaaaggatatggaattataaactctctaaatagtagctttactctttgtcttgcatgcgcttgcgaatcaaatagaagaactgcaagtaggtgttgcaagctatggaccatgaatcattgcagcacaggctctcacgttggggttctctatgtggttaaagcatggttgaatcgatccacatgtagaagttatcagttattacttcttaatgactccaatccagatgacacaatggagtccctttgtggaatatcagcaccatgccagattgcaatacagctattcgtgacgatatgctgtctgttctgctcatgttggagtttatcatcggttttctgtttctgaagtctcaggtaattaacctcgaaccttctgggtaaattctttttatcagtagtaacaatggtagctcttcatcatcggtatcaggatgctcattttgagttttttttttggggaagaatttgcctcaagcccattttccagtttctacagaaggctggaagcaatttcattttgcgtaatcaagatatcacctgctagacaactttgcaaactaacatacaccctgtaagagttgtcaagtgtacaattatagatcacagtgaaagtagaatgaatggtaaccacttcagttgacatcataggtcttgggcgtctatgatgtaacactctctttcgcacacagcatattttgtatgaaaaatattatataatcgatctcttctactgaactattgttctatgtgctcgtatgcaccacagtaaattaggatgctaaattgatttgtcgggctgcaaatctgaattcacaatcgtgagctaggcataaatttctccaattgagttcattatcacttcctctgtgataatttggttcattctctccgtgtggtgggcagcatcccagtatatgtacttgctgggatgtgtgcatgctcttcggcctctgcatgtttgcccaacttcaataactcctgttccacaacaacctcttgaggtttctgtcaggcctgtagttcagaagaaaatatttttttgaggttataataccaataagtgcacactttaataaggatgctctgaaatataggacaacttaccatagttattggggcttattgttgccatgccgatggttgtataagtatcaacaaatgtagccctgatatttggttgattctttagaagacgcaccacttcaactagcctctcattaaatgaggttgccagcaagttcatgttttcatggcatctggttgtacctgtgcctagcaatgttctagcaataggtaaacacccaattgggggcactccaacaaagacaaatctccttcctccaagtgctgccatcacctgagtaacatggcaatgattaggtcttgagcaaaagttgatataactcttttctgacaagtgcttacctgggtgtagttagcaacgcgtgatatcagctggttttcgtactgtgggccgctctctgctgctgactggtttgaggcaagatagtgaaaaagcagatctgttgttccagcacttacgacgaatgtagccctcctgactagttcttctgctcttcttcgtccaactaacctctgcaggttccttttgtaacgccaaaggtcctctatttggttgggaaatgacagtgcattctatcatgaaaaaggaaagaaaacctgtcatgacagttcattctaccatgaaaaagaaagaaaacctgtctagtcactacccaatgctggccctcaataatcaaattaacttggactactaagtagtcatgattcacatatcaaactaggttgatcatgcattatctgcttggttatccaattttgactactaaaaaatatttggtagtagcttctaattctgtccctggcagattgatttaatagcttttccttactttctgacggtgaaatatttgtgctttgcaggttatgcttaccgaacttctggcagtggcctcgtcatacccggaacctgctgatgcaaaactcacacccctcctgagctgtcctgacctcaaccttgggtcgcggaatcctggaatactcctcgctatacctagtttttccgctgcataaccacaaagcttatcctcaaatatccctactgaacaatggtgaacaccactactaactcaggtcaccttctaaatcaaagcacatctgctcaactctgaaatacttgtgtaaatggagatgcaaggcaatgggtgtatttgtgtctgtaccgagtatgtccgtgatgagccggccgttgctgaaccggccggtgggcctgccgccgaggaagtcggcgccgtacggcaagaagttggccttcatcgccgtctgcagccggttgttgttgccgggatccaccgtcgagtcaccgaacaccagcatggtggtacacccggtggtggtgtagttgatcaccctcgccggcggtggcggcactgaagaccagcccggctcctgcggcggcaccaccgtccgcggcggcgccggctccctccttggtggcaatggagactgccacggctgctgctgctgctggggcggcgttggtggtgctggctccggcgtgtcaggctcctgtgatggcggggaatccggcagcggcggctccggcgaatcggaataccccggcgacggtggtgacaccgggagcccaggcatgggcgggtcgtcgtattggtcgtccggtggctgtggcggtgacagctgcgccgctgccattgttatcagggagaagtgccatgcgacgaggagcagcgccgccgcagccaccgccagcctcctcatggacttgctgcgttgctttgctcagttcagttatgtgctagcttgtcaaggtccaaagacaagagtgcatgcatgtataaataaatgctcagctaagtaaaactgccgttgcctgtcaaggtggcttggtgccatgtaggtaagggagcgactaagggtgtgtttgaggattggggagattggggagattggggagattgggaagatacgcaaaacgaggtgagccattagcacatgattaattgagtattaactattttaaacttcaaaaatggattaatatgattttttaaagcaactttcctatagaaattttttgcaaaaaacgcaccgtttagtagtttgaaaagcgtgcgcgcggaaaacgagggacaatctccccaaacactcacaaacgaacggtgcctaaatttgcttaagagttcgagcttgctttgtgtgacatgactaaatttagaagacattttcagtgaaatcacccacttgttagtggccagtgggagattaatcgggagagattcttgtaaaaaaaaaaggagatcggaataaccaaagaggcacatactgcaaaattgcaaagaagagcaggtggtggttggttcagtggtttgtgtgatctttgcgtctgccatgcaaattcgctcttctagaacaatcttctttttttcttttttttccagcgaaaaaggtactgtgattttgtatttcctccttctatagtcaacaacagatgtcaaaatatgcatattcttcctccggtaaaagaaatacagcgtttcaacatttttcagttcgatcttttaaaattttgatcatcaataatttttgaaatgcttattttgaaaatataaaaatggtcaatgtagatttgttatgaaaaaaaatactttcgtaatctcataaaaatgatacatgtgtagattttataagtacctagccatgaaattgattttcttccttcacaaggtagaaccgaaggtaaatactgaaaataatagcaggagagttttcttttaataacaattctcaccatcatggcatcgtctgcttcaaaactagtactcgcaaatccatattcctctagaaacaagtaaacaaatagacatgtcacaccaatacacccaattgtttactcataagggattactcgcaaattactcgcaagaaaattccatttattatgccaaaggacatgagtgtcaaaattttgacattaattaaacaaaaaatgcaaacatttattatgccaaaggacatgagtgacaaaattttgacataaatgcaagagcctcagctagacaaaattgtcatttacaaaagagagtcctacatttattctacgacaaaattcaaaggaaaaaaaaactcttctaaatgtctatcctatcctaaccttggaaatgactgaaaaacaaaaaacccaacttcttcacgttggaatccggtctgcccacctataggcctgtagggatataaaccttcaaaaaataattgaattcttcatacctctaaattctaatatgataatttttgtatactgtatgatcttttggtatcatgtcatgcactctaaaacctaagaaagatgatctaaataaataaataaataatgaggatcaatttccctcatgcttcggctgcttattgtcattagagctggtgccctgctccaatgaggccttcacaaatctgcctctgacacgccttcgcgtgtctgctgttgccttgcgggaggcgtacattatctgcttgacaaacctgaaaaattcaaaagtgtaccagcaacttgtaattgcaatcttgtttcaaaaagctcgtactgaacaaaatattattcctaggcaactaaataatatttcagatgcacatttgagaattttaactgttctttctgaagactaatctgcaatgtaagctacaaagtgagacgaaaaatgcgtattgatacgtacctcctgttgctctttttctccttgtatctctgcacagctcgctgtctcttctccggatcagggcaagatttctcgggcagcacgatatgcgaggtctgttgatcttggccgtcaaacatgtttgagctcccacccagcagcgagcccgtgttggagctctgaaaattcacacagggaaactctgaacctgtgttgttgttgctactgtttgtgtctatcaccggtaactgatcatatgccgtttcgtcgtttatgttcagtggttgcagaagactatgatctgaagattgcggtatgagctgtgcgagttctgaagatgaagttgctgctcctatctcgttgttgatgttcgcgtccatcatcggtaactgaacataaggtgcgttgctcatgttcagaggctgcagaaagctagtatctgataacagtgcgatgtctgaacacgatgaggatgccatttgctgatgatcagggtccagataggatcccaaatcgaaataagaaggatccaaatccagataagaaggttcctgcgatcaattgaagaaaacaagtttgtgaggcggcatcaaactgtacgataattttgatgaatttgaaagggggtgaaataagcagaaccatcgtttacttgcaatgctcctggttccattagtgcgactgaatcaaacgagtttgtccaggcttgaaagtaatcttgctgatttgcattgtcaacaagtaaatcttctccacctattgtcgccatctctttactaatgtcaggattcgcatcttcaaacatctcaaatgagacatgtgtgtatatatatattagtatgcttatgttaattgaatgatggtaataagatgatatgttagtcatataatggaatgctatatattaatgggattgatcaagggatgaattaggtaaggaaaagaaatgcaactcacttttgtttaagaaggcagatcacttagagatttaagagtttaccattggcttcttttaataccagatcacttatttttaataccagatcacttagagatttaaggaaagaatgagtttaccattggcttcttttaatacctcgggataataacaataatttgtatagctcatactattgtcgtatgggacgaatgggagtgtgtcggtgatccacggctcatccgtcgccgccgccgccggcggcggcggcggtgccggcacgtcgatagagaagatgcgggccatctcggcggggccggggataccggtgtaagcggcggcggggcggtggcagtggcgcgaggcgtcgcgcgcgcacgaggcgc

SEQ ID NO: 5915 - DNA, 6615 bp, Oryza sativa
  unsure (1)..(6615): unsure at all n locations
tatatcatgctattgtaaatgatctactattatctctcctgctcactttcttatccatattttctagccagcagctcagtacataaacaatataaaatgctatattaactatctatgatatactaatagtccattaaactccttacaaacactctcaatctgtcatatagtgttctacaaacactcctaagacgtcatgtggcgctcaaataaactagaatatcctagaaattatgataaaaaattaaaactattgattttcctttaaataggtgaacccaataattgtaactactacatctcacagaaataaatccggtacccccatctcaacccctaccatatgtgtgcacgcatgcacgtacgtacctactccttccaccatcctactcacctctaggatccaactctcatcttctattttctagctaacacataattaatgtataaaaaataataatagctaaatacatgtacttttctcagtttatttgatttggtgggttatttataattaaatacataatctgagatccatattacccatatttactatatagaagttagataatgcggctgctctaactacaaatatttgagcaaaatagcagtttgaaaacaatcaacgaattcaaatatgagtctaaagtccaagttcaatcaccaccaagaagcctggaaccataatgcatactttgggcctgaatccgaggaaggcggagctacaatgaggtggacactgatgacagcagcagcatcgacttcctcaagttcctgagccaaataacgcgctagataattatgtgcagggcaaggactaacaggaggggcagagagagatgttccatgtcttcgacaaggactagaaaacaacttcatctttgccaccgagcctcgccacgttatgtccaatgcatcaagaaaggctcactgatgagaaggtcgacaatgatccgcgaggctgatggtgacaggcggatcactacaaggagtttgtacttaaattcagaaaaaaataaaagaagcaatttgattaaaacacatacaaaaattataaaatcattaaaactataaaaagaaacaagattccatgtagaatataaaatatcaagagtccatataaaagtataagttataaatatatggaatttggaataataaaagaagtattaaaagaagagtccaaatacaacacgatacatgattaagtacaatttaaaatccctaaagaagacaatgtagaataaaacaataatttgattttaatacaaattctagataagaataagtcaatcactaaattcaaaatacaataaatatttttattagaatttttctatatttattgattcaaatgcataacaaattgcatatatatatatatatatatatatatatatatatatatatatatatatatatatatatatatatatatatatatatatgaaccgatataaaagagggctttctcatatgtacaaatatacaaatattaccaaataaatctttgtcagatctgttcatatcgacactatttaaatataaaaaattccttacttttatctcaatctggttcgttctaactatttttgaaacaaactaatacgcatgcccgcgcgaatgcgcgggctatcttcctattttatataaatgtgggcaatgctagaaagtcttacattatgaagcggagggattattttagttttgtaattattttgaacaaatacttaaatgtccaatcatatgttttattgttttatcaaaccttagggggtgctaagtactaactgatagagatatacatggttcttccttattcactgcaggtcagaaatcgggcatagagaagcgctacaaccatccttatgaggagatcatcactgcccacccagagatcattgattgtcacaccctaaaaatcctaaatatataaattgttgtttaattggaattattagaaatgattttaaaagcctagaagagaagatctaattttaattaataaattccaatataaaatggggccagataaaatttcattaaatactttgcttaactctataattcctagatttttctgggatttatttgagctaaggaagtatttttaatagatggaattgcatttaatgaataatttaaattgaaaaaggtttttaaaatcctcttttggctttgggccgaaagtcggcccaaaaccttctctctccctctccccggcccaagccagcccagtccgcccgcccgcgcttgcgttcgccgctgacaggtggggcccgcctgtcagggtcatcgtcttcctcccgacgaaaccctagccgnaccgngccgncgncgncattccaaatctaaccgtccctttccgtttccggtgaaattgattgaggggaaaggatccccgtgatccactctaccttttcccttttggaaacatcgtctaaatcgctttggaaattcgcggattcgatctcgaatcggattcgtctctctctcccgaaccctaatatttccattgcgtcgccggtcgccatgggccttcgccgccgcgccctagtccctatttaagcacccccaggtcctccgctacccgtcgccaccctcgccttcatctctcgtcgctggtagagccctagcaccgtgtagcctcgcgccgccgtcgccgccgccgctccagccgtgtgtcgccgtcgctccagtcgtcgccgtcgctcgggaagaccgccgtcgtggtcgccgtcgcgtcgccatcctcgtcggcccctccatcgttgctgtagaccaccggagcaccgccgtcgtcgtcaacccgaaggttgccgccggcgagcttgcacgcccgagccgccgctggtgatgacgtcatcgccgacgccatcgttgccatccgtcgtagaccggtcgtagaccgttaaatcttggccgtccgttgtggataggatcgatctcggccgttcgtttccgtgagccgccgctgtgcacccggttcaccgtgaaccctagccgctgacgcaataattcccttttccttttcaaaaataattcattattgcgtcataattcaattaaaacccatataaatgttgtaatccgatttaaactttaaaaattcataactaattcatcttagctcggatttagttggttcaagtctctaaatttttctaaaattgagatctacatgttaaaaatatccacatgtactgttcatgcttgtttatgtgttgttttggtgttttttctcttttctgtttagattccgacgtttccggagagttcgttttcgcaggagaaaaatttgaagagttccaaggccagcaaggcaagtcacacagatcccaaacaattaaggaccggttcacgagtttcggttgtgaaacattaaccgtgccaaccacaagccagcgtgggcaacggctttaccttttgtatagcatggttcattgcagagcaccagactgagaagtggcggagataagcccacgggggtcgcttgggagtccatgccttgtttataagggggtgattatgatccaggaacggtgcactgtggtggattgtgttgtgcgaggggtactgtcacagctcctttctgaggtaccgtggtggtatcgaggcgcatggtgacatgttgtggggctgtgtcttgtgggttcagtggtacatctctggccagagtaaaactatttgaatagccgtgcccgcggttctgggcgggtctaacaatgtctttcgtgattagtttcacacttctcatcataatagaagatgctataactggtaataatttgattagctcctggtttggaatggtatattcctggtgtggagatagaactgtgcagccgggatggttgttcagaatggttgggcctatgcaacagggtatgttgtatagcgttggattaatattgtttaattattacctaactgttttattaaattctgaaatgtttgttaaatgctgtttatgcaaatgaaaccctactatgccatcctttgttatcctgtgcacttgcatatttgctgcgtggcttgctgagtatgtcatatactcaccttgcaattatttatcagaggaggagttctacagtgatgctgatggtgtggatgattaggcgtagccctggtcaaactgcctgtggagaggagtcgcctgcgctgtttcttatttttttccgctgcttagatctttattgattgagaggaactatctacctctgtaatgacattttattcgcttattaattagagtaataattgtactctattatcaatttgttattgtgtgcctcggctgattcctggacgagggttcacacacatgtaagcgtttggaattttggatagaaattccgggcatgacaagttggtatcagagcctccttgaccctagattatgccaaatggttacccatagaagccctctaaaaatattggaaaagtagaactgttctgctccctttctcttttaattaaaccaaactaatagcacatgcacttcataatctcttttagtggttctcattgaaaatttattccagtgttattagtactgtacatctgttactgtactaatggctcatttaccagcaaaagttttacaacattgttttatttaatcttgctgcaatgaaataaatttagcatgttgattttataactttcttttatttctttcggaacctgttgttcaaaagtgcaaaatttgtgatcttgtttccaactgtttcaacttatcttgcaagcctggtttactttatttacttaccttttacttaatccaaaaacttgtgctattaattgaataaatgtcataactccctcctttcacttatctttagatgccgcgctacaagcctgagtacttgtttggtgttgagggatttgtccaggagttgcgtacgatgtcctttgccataggatttgggactgcccctttgtatgcccagattccccatgattgtgatgaagagaagtgccgagtcaaagtcaccttgaacagtaacagtgaagatatcccatcagtgatgttcaaagctggaggaggaaactacattcatgcatgtcaggaggtggcaaggatcgccataggagagctccgcgatcgctacagtgatcagttggccgacactgagtatcgctaccatcctcgccaaccccagggaagtgaccgtggcagctaccttgagaccgaggggattgagaatgatgctaccacaaggcatttggttgagatgctgtgggctatggatgagacccacgcggaggttgtgctagcagctcaagatcgtgaagaccggaatcgtggaaagatttgcaagctagaagacaaggtggagcgtttggagaaggaactagccgcgttgaagggagaagcaccaccgcagaaggccagggttcgtcttaccgcaaggaagagagctctattcgtccctcgctaccaattggcgccaaaggtccgtgtggtggagaaagaagttaccccagccctagcgaatcctccgatcgtcaacgtaagtgatgatgaaggagaagaatcgaagcgcacccactcaaaggtcgaatggggagctactcaagatgatggagacgagctgaacgagccttcaatcaactccgatgcccggaagacctagaatgccttgtcaagccgttgtcctagatcgttgtgttagtttgcttgttttaagtttggttgtgtgtgggggtcctgcatgtggtttacatctgtggtgggatgtaagtgcatgcgtttgtttgctttcgagtgttaggtagttggtgagtttagtgatgtgagagtcttcagttttgtaataatgaaactcagttaagatcaataaaagttaagttagtagaaaaattaattctctgtcctaagtagttttccccggtttctcttcttgtgctcctgcccttgccagatggtgctcactcgcagcaacgggaatggccccaacatcaataataacaacaacaacaatggagagaatcccacacttgcccaagtcctggctcaacaggcacagcttatgaacatgatgatgcagcaactccagaaccagcagaacgagggaaataaccatgcacctccccagaacaagttagcaaaatttcttcgtgtgaggccgcccactttctctagcaccactaatcctgttgaagctggcaattggctgcacgccatagagaagaagttggatttgcttcagtgcactgatcaggagaaggtctcatttgcatcacaccaactgcatggccctgcctctgagtggtgggatcacttccgccttaacaggactaccgctgaacctatctcttggtttgaattcaccgctgctttctggaagacgcatataccatcgggagtggtgtctctcaagaagaaggaattcaggtcgctcacccagggatctcgcacggtaaccgagtatctgcaggagttcaatcgtctggctcgttatgctccggaagatgtgcgcactgatgaagagcgccaggagaggttcttggaaggacttaatgatgagctttcttacccactcatgactggggattatcatgatttccagaagttagtagataaggctattcgccaggaggacaagtaca

SEQ ID NO: 5916 - DNA, 2959 bp, Oryza sativa
cccatgccttccggctgccccactgagcgcggagccccttgtgcaagctttggccactgcgaacaccacggtgttggatgggttaaatgcccagatggaggtcctgcaggcagagcgggcggagctcgacgcggcgtgagcgcgtgtcgaagaggggcaatgctcggtggaggccatggtggaggcgggccgcaaggcacaccgccggcacacctgagagctcgaggcccgtcggaaggagctggcggagattgccagggaggtggaggagaagcgagaggctgccctcattgccaccgccgtgctgaacgaggcgcgggacgatctccgcctccaatacgggagctaggcggcggagctaggaaagaagccggcacacctgagagctcgaggcccgtcggaaggagctggcggagattgccagggaggtggaggagaagcgagaggctgccctcattgccaccgccgtgctgaacgaggcgcgggacgatctccgcctccaatacgggagctaggcggcggagctaggaaagaagctcgacgccgcccggggggtccttgacgccgccgctgcccgggaacggcgggcggcgaagaccgaggcggcgtcccggcggcgcgaagaagcccttgaggcccgcgccatggtgctggaagagcgcgcccgcgcgaaggagagggacctggcggaccgcgaggccgccgtcgccatccgggagacaacactggcggcgcacgaggccggctgtgccgaagaggagtccacactccgcctccgcgaggatgcgctcaccgagcgggagagagctctcgaggaggccgaggccgcggcgcaaaggctggcggacagcctgtccctccgcgaggcggcgcgggaggaacaagcgcgccgcaatctggaaggtgcccgcgccgagagggccgcactggatcagcggaccgctgagctcgaggcgcgggcaagggagctggatgcgagggcacgcagcggcggggcggccgcgggcgacggggacttagcagcccgcctcgcagctgctgaacacaccatcgcggatctgcagggcgcgctgaactcgtccacgggggaggtcgaggccctccgcttggcaggcgagatagggcccagcatgcttcgcgacggcgtctcccgtctagaccgcgccgggcggtaggtgggtctctggggcgggcggactgtgaagtacgccgccaaccaggggggcctcgcccagcgcctctccgagatggccgggaccctccagcggctccccgaggagctcgaggagacaattaagtcatcctcgagggacctcgcccgaggagcggtggagctcgtactggcgagctaccaggccagggaccctgacttctccccatgggcagcgctggacgagttccctcccgggaccgaggacggtgcgcgcgcgcaggtccgggacgccgccgaccacatcgtccacaacttcgagggtacggcccctcggctcgcgttcgccctcgactccgacgaggagggcggtgacggcggtgacgaggccggcgacccgggtgcgtcggagtgagcccccaggcctccgccaatctttaaatagttttttccttctttttccgaggccttcgggcccccttcttgtatagactaacttaatctgcaattaaataaagaggaaatttctgtgtcaatttcttttgttgtgtgtatgagacgaggatggtctgtgccacggtccttctgtgtcttagcttgaacaagggctcgtgcccaggtcccagcctcaaatggcgcgggtcggggctagtgcctggggagattcacgtgtcgagactggccaggccgggaacgtggtgaccgagggttatggatgacccgattgtgggcctttgccgattccccccccgggagttcaccacgccccggggcacggctcggttctgggccccttttggcgattttagccggcccgggccaccaagggcaggatcgagcacgagcgtgctaattcaagccaagatttttcaaaaggaaacaaaggcacagacgcagtccttgggaaatcgaaaatgcttttattgaaatacggaagaaaaaagataagaatatgcatgtgtggtagcccccggccaaccctgcacgcccgaggggggtgcggggttggcccgagcccgagacctgacatccaactcccattaggggtagaagcgacgaaggtgttcgatgttccacgggttaggcagctccgtgccgtcgcctgtggccagccgaacggagcccggccgggggacgccaatcactcgatacggaccctcccacattggtgagagcttgctcaatccagcacgcgtttggacgcggcgtaggacgaggtcgtcgacgcagagtgatcgggcccggacgtggcgctgatggtagcgctgcaggctctgctggtagcgcgcggctcggagggccgcgcgccgccttcgttcttccaagtagtcgaggtcatctctgcgaagctgatcttgatcagcctcgcagtacatggtggcccgaggggacctcagggtgagctcggatgggagaaccgcctccgcgccgtagacaaggaagaaaggcgtttccccggttgctcggcttggcgtggttcggttcgcccagagcaccgctggcaactcctcgatccacgagtcgccgtgcttcttgaggatgttgaaggtcttggttttaaggcccttgaggatttccgcgttggcgcgctccacttggctattgcttctggggtgggcgggggaggcgaagcagagcttgatgcccatgtcttcacaatagtcaccgaagagttcactagtgaactgggtgctgttatccgtaatgatacggttaggcaccccaaaccgagcagtgatgcccttgatgaatttaagcgcggagtgcttatcgatcttgacgaccggataagcctcgggccacttagtg

SEQ ID NO: 5917 - DNA, 9284 bp, Oryza sativa
acactttaattgtatagatgaatatatgttaagtaatatagaaatgatggatatatatatatatatatatatatatatatatatatatatatatgttaaaaatattgtgaaaaaataatgtgaagaaaaatgattggatgttgatatgtagaattcaatgaattatagatatgttgcatgcttgcataagcttgtttgtaattagggtaaattgaaatcatgctattataattttgcaaagtttaagatatgtcatcggtatctcaatgacatgtagaactcatatgagtcaatgacatgtggttcaggatggtatatcttaaattttgcaaaattataatggcatggttccaatttttccttgtaattattactagtggacgatgaggtggcatgttatcgcgctacatccatgaattttttcagtttttttcgattttttccggaattttgaatttggtcaaaattcatccaaatcatatcgccggtttcccctaccgtacccccgcgataagcgtgataagtgatgcgattatcacacgataagtgaaaccctggtccaactctaaaatattttatattttttattagatgtttctattaggtgatttattttttgaccaatgtagattataaattagtgtaaaattataatgtcattatagctcctaatagtcgttgtaccgctggaaaacgtctttttctagtatagacaaaaaatattttttacatgagttcttaggggaaaaggaacttacgttaaaatggtaaaaagcttagaaaaattgatgttttctgcatgctttttttccctaaacactaaaggaagcagggagtgtacattgcgaagaagttggattcttttgtctattatatcaatcaaattattattagtactgacggagcgtggggctcctcaccgggagaccgcgcaggcccccctttgccggttcggccgggggcgctaagtgaggttctaagccctcggtctgtggaatattcgcgagagaggcaatgcacgagacacgggcgatgtagacaggttcgggccgctgagaagcgtaataccctactcctgtgttctggtggatctgtgtatgaagaaactacaaagagttcgagagctagaacaagtttagactctagaactcgtttgctcctcctttccccttttttcttctccgtccctctctttggtgggcaaggtcctccttttataactcaaggggataccacatgctccacttctacctactcttcttttgggtggggacccaccctctcttgaccaaaaccccgttcgccttctcttggaagctaaaatatagcttgtctttgagtgtggcccagcgtcctcactcgtctgacataggggatcaccctgtcattccttcattaatgggcggagatttgcaatggctgctatccgaatgaccctccgatgggatgggtcatacctacctccactccgctggaaggaggtgcaaaatgggtgcgcggttgtctgcctatgacatgaccagcgtcagaccagtcacagaccggtcattcttgtccaccacgtgtcagtttagcaagctgcatgtctgcccttcttcatacaacgacttccttgcaatggttgcgatgaagcctggaatatatctgggcgggactaacgtgccaactccaggagctagcacgccggctccggctagggacgagtgcctggaggctctcatcaatccgacgggacggggcgaggcgtgtgtcaggccgcctgttgccacctaacccgcgatctgaccggtctgtgaccggtcacacactgcgaccggtcacggaccggatgagcgctgcgctgcattaaatgcggcgtggcgcgctcgtccaaaccgcaataaatgcggttaggtgagccctgctgtgctcacctaaaccatacacgtggcgtcaaaaccacagggggtcggggcgcccctgccctcggggccgaaacgggagcggcccgacccctcggggagacaaaaggcggggaggtctcgtcaccctcgggcccgacccgggccacgtgggtgactgcggctaccctaacctctagtcatgataccctcggccccatgtcatcgacagtagcccccggcgtcacgccagggcgatcgcccccctcgagggaagcgctcgggcgtgacgccattctttagatctggtgacaggtggggccggtctctacaggcgggtaggaactcagcggtcgcaagtcgcacgcattggcagggaaaactgatcgataataatgagcggcctcttcgagactgccacatcactcgagcagcgcgcgaatcgggacgagtcagttcgtttcgcctggagacgtgatgatggcgcttcggtcggcgagcgaagttaacgcgcgcacgatatgtcccatctcgactgccacggcctcgtgcgccgcaaacgggcgagtgggattagcagaggcgtgggcgcaagaaacgagggggcgagatagtgggcgcgggaagcgaggagccgggcagagcgttggcaagggtataaagacgccgaggaagagattcgtttccttcctctcgccattattccccttgccttcgccgcttgcgctctaactcttcgtttcctgtgccctaccctcgccgcactcgctcgttctcaagttcctcctctgccggcgtcatggcacggggctccgcaccgctcgatggtagcgtgctgccgccttcccgcatcgtgagcgagaggcaggctgggctaccgcgccgcttcatgccggaatctgccaccggccgggagatggtcgcgctgggcgagggacgcccggcgccacgttacccggggcggtccgtcttcttcctctcttttgcaatggcagggctagtcccgccattctcttctttcttcatggatgttctggagcattatgatctccagatggcgcacctcacccccaacgcggtaatgacgttggccatcttcgcacacctgtgcgagatgtttatcggggtgcgcccatctcttcggctgttccggtggttcttcaccgtacagccagtgtcgccgccgtcggtggtcggtggctgctacttccagccgcgggggccggtgctgagccgctacattccctgcgtcctgcgcaagaagtgggacgactggaagagcgactggttctacacccccctcgccgacgaagcgcgcctccgacttccgagccagcccccggcgcaggcctccagctggcgcgtgccggtagatctgggagacggctacgacaccgtccttgaccgcctggcgggcctgcgatcctaggggctcacgggggccatggtgtacgacgactaccttcgtcgccggatcgcgccgctccagcggcgcgcccggggcgcctgggagtacaccgggtcgaaggactacatgaggacccaccaggggggcagatgggactgggcccctgaggatttcaagatggtggtccaacgggtgctgaatctcagctccgtggaggcgtccctcatcccccaaggagtcctccccctctgcagcgatccagatcgcgccaacatcttgaccatcatgatggcggtcggggcgtcggaggagcgggctcctcgaggccacgatggcgcgggcgggagccgcaggggggaacaatctaccccaggagggggtcgtgcttctgggccccgcgacgggggcccggggggcagccgccctgccgacgcccgggggaagaggaagcaggagggtaccccttccccatctcctccccgagggggcggggcggtgcgtgctagcagcaggcgctcggaaggtgccgcgccaacgccgcagcccgagggggagcggaaaaagaaacggctccgcaagatgggggggaccgagccaagccggggaaacctcatctcccccccaaggtggtcgtttaaccgacctcctcgcaggttcgtccccgcgcctactacggccgaattcattctttcaaagcgagttttcacttacctgtttctttttgtcttctggtttttcttctgcttcagcgagatcccgtcgcgcccctcccgccattccaagtccggccggtctgaggccgaggatacggcgaccgcggaggcccggaggcgggaagctgaccggcgagaagccgcggaccgccttcgggaagccgaggaggctgcccaggaggccgtccgggctcgccaggctgaggaagccgctcgggaggaggccaggctccgccgggccgaggagtccgcccgggaggcggaggtggcacgcgcacgccaggcggcctgccaagcccccgacccgactccgcccgaggcgacgatgacttccgaggccacccacgactaggccgcaggcgcaccgctcgggcccgactcctcgggcgacgctcaggacgagccaggttcgggggacgtccccgagtccggcacgtcgatcggcgggccgagccgtgcggcattctcaccgaggcggctctctcccatgccttccgctgccccactgagcgcggagccccttctgcaagccttggccactgcgaacaccacggtgttggatgggttaaatgcccagatggaggtcctgcaggcagagcgggcggagctcgacgcggcgtgagcgcgtgtcgaagaggggcaatgctcggtggaggccatggtggaggcgggccgcaaggcacaccgccggcacacctgagagctcgaggcccgtcggaaggagctggcggagattgccagggaggtggaggagaagcgagaggctgccctcattgccaccgccgtgctgaacgaggcgcgggacgatctccgcctccaatacgggagctaggcggcggagctaggaaagaagccggcacacctgagagctcgaggcccgtcggaaggagctggcggagattgccagggaggtggaggagaagcgagaggctgccctcattgccaccgccgtgctgaacgaggcgcgggacgatctccgcctccaatacgggagctaggcggcggagctaggaaagaagctcgacgccgcccggggggtccttgacgccgccgctgcccgggaacggcgggcggcgaagaccgaggcggcgtcccggcggcgcgaagaagcccttgaggcccgcgccatggtgctggaggggaagacgtcgccggagaagcctgcttcattttgccgacgagatccagttgctgacgaaggtcgccgacttcctcacgcaactcctgaactgctgcttctacttgaggtctccaactgctcacttcgcgatctagcttgacgaccgctgcttgagtttcgccttgagcacgattcagcctcaccaaggactcctagatctccatcaacaccttgccgaaatcaatgttctgcttctccatcgcttcgacttgaagttgcaaacgggaagtatatcgtggcttctccaggatcgaaattgctctgataccaaattgtcacggtctcgaactcgtaggagagattcggtcgagtagagaagggaagagattgagagagttggcttgaggaagaagaagaagaagaacagaacagaattgaacaggagagagatggaattgaatttgagtatgtttgattacatgattcgatccccttcctctcaatcctgccggcttatatagcatcgcactacacagcctctctcactcactgacagtggcccagccaatcactactgggtccacacactcgcagggaaacgggagttgggctgcttctcccttctgggccgattcacaggctgggccgctggcttctgctttgaactccctgctacagatgttgccgccgtgacaaactacaggctatgacccatttgactaaggtggagtttattttccttttctttgagaggattggcagaaattttctcctttggttcaccgggtactaacggatggacactgctattgtttattctctttggttttatccttttgatcttatagcattagtagatttcagtttgtacgcagcaaacaccagtgaaggtgatttttgctactagcatagtagcaaatagttgaaagataaatgtatggatgtaatttatcacgtgcagcctttttgtaatcttcatagagctggtacataattttcaactcaagagtgatcctagtctggatatatcatttgtcctgtatgctgggtgggtgcggagttcttcgtggtttttgtttagagctcttgtagctgctaaattttgaattctgaaatgtgatgttgatgtatttagtgaatttggcatatcacaattgattctttgtctattttcggtgttatcttttattatctgattctaatgtttgctattccctttgttggaattttcaaagattgagacagaagatggttctgatgaggagtccgatgaatcagactccgaagtaaatgtggaaacagagctatcgaaagtcactgagatgcgtatcataccatctgatccttgtcagtgtatcctttttacagtaaattgtctgatgtaggagcatttattggttttccttgtataaatctacctctgatgcttgcatactaaattttgatatgagtgcaggtttacatgaaataactatcatttctaatgctctatgttcatttttcattagctctttatttttaatttattctcatgactgtagcaactaatagtcatgattagatttgtttattcttgaagagtaggtcttcactctagagggtactactttaagaatgtaatgtgtgcattctgttccttcacaagtaaaaatttgcttgtcttatgttattcagttacaaatggttctctgttgggattaatagctaatcaagaataaactaccttgcataattagtatcatactgcagatcatcatggcagatatattttttatttccagcagtttgaaatgctatttatttgaagaattgactaatactatttcttgaagcatttgtatcttctattatatattcacattatatcttggatccttgacagaagtttcagtggatggactctttgaagcattctcacattgtgctgaattgaaccccgatcctaatgctggtaagttttaatagttaataaacaataaaagaatgttctttgtttgatgtatgcctttttaattaccagagagtgatgaagagaatggctgggctcatagagatgaaggtgatgaagatatgactggtggtaagaattcgccctgttcatttctcttttgtgttcatccaaacgttatgcataatcttttatgtattatcttgcattcaggaagtgatgctgaatgtgagttttcagatgtcaacccgataggtcaaactgatgaacatgatattactcatgctgtagttgaggtatgctgttggtttgttctaccattatgttttatgctttatatgattctgtgaaacgattgcaagtgaaataaaactcttgtgttataagcttggttgtaaaggttttttcttttcttcgggctcctgtgaatataatctgtatttactacaacatatggtataggaattggtaatggcatcctctcacgtcattttatttagaaactacgaccatatgtatatttcttactgtttttgtcacataatatgttaaggtatagttaattcatatacagatataccgtgtgattcagggtggcagttgattatcctttcaaaattattataaacatcaaacagttactttctgaacagtttgatctgtatactaagataaaactcttttgttccttcccctgccaatctcatgagctaactcgaacaaaaacctcataatgtccttatgcagcttcagatcaatgaccaacgttttgaggatgcagaggaagcagaacatgagacgcatggaaatggacactaatgcaggtgccttgttattttcttctctgaagaaaaaaaaaactggtttgttgtacatcgccaatgatgcacattgttgactaaagacttattttttgtttgtttcttttccttcccttttgagatgtcacagattaactcctttgggccaccttgtaaacttgcatcaatggcaacgtatgggagaaaaaaggtcttgctactggtcaagaaaaatgtaagctgaaagcatgctggaggtctttgtatgcgttgtcttctgtaaaatacatgtatgatcatgcaacttcatattcagagatattttgacaatgtgctcatggaaaacatccatactttgtaagtgttcaagcttaattgtcagatttttttttatttacatccttgatcgaccaaagatgtatgctgatagctgagcaacaaacatttccttttctgtagcatttgctactgatgaatggtcctgtgctcaatgtccaaggacttgcagcagaatccgttagctcgttttattgctgtcagtattgttcttgtagacatttgttcatgatgaacttttgctcggttgagtatggtaatctgaaggttaagttattttttttacacgatttgaggcaatgggcagggagctctgtgttgaagggagtactctgttaaagcatgatttctttcgaatgtaggaatttgaaaacactggagtaagaaaaggcaggaattcaatttacacgttgttcaaacccatgctatgaaccctcaaggtttctatgcattggaattttgtagcgcagtcgtccttctatcccttcttccactgcacacaacgcgtccgcacgtctaccgaagggacacattaggtgatttcccacgctttctacggaaattgccaagtaacttctaaatttttttaatgatcgagctaaaagtataaaagtataaattatattagttattaacaacaaataaaattggtttgtcaaagtatgtttagagagaaatacatttagtatgagattgtagatgaaatatgatattctacactttaattgtatagatgaatatatgttaagtaatatagaaatgatggatatatatatatatatatatatatatatatgttaaaaatattgtgaaaaaataatgtgaagaaaaatgattggatgttgatatgtagaattcaatgaattatagatatgttgcatgcttgcataagcttgtttgtaattagggtaaattgaaatcatgctattataattttgcaaagtttaagatatgtcatcggtatctcaatgacatgtagaactcatatgagtcaatgacatgtggttcaggatggtatatcttaaattttgcaaaattataatggcatggttccaatttttccttgtaattattactag

SEQ ID NO: 5918 - DNA, 757 bp, Oryza sativa
ttgttgttgaagaactgacgctgcggacgaacaacaaacgaagaacctccctgtgacattgactgaggtcccaaagtaagacgcggcctctgactattcccctgttgtgccttgaagtgagcaatccggcgtttcttctgctccatgcggttgtacttgtcctcctggcgaatagccttatctactaacttctggaaatcatgataatccccagtcatgagtgggtaagaaagctcatcattaagtccttccaagaacctctcctggcgctcttcatcagtgcgcacatcttccggagcataacgagccagacgattgaactcctgcagatactcggttaccgtgcgagatccctgggtgagcgacctgaattccttcttcttgagagacaccactcccgatggtatatgcgtcttccagaaagcagcggtgaattcaaaccaagagataggttcagcggtagtcctgttaaggcggaagtgatcccaccactcagaggcagggccatgcagttggtgtgatgcaaatgagaccttctcctgatcagtgcactgaagcaaatccaacttcttctctatggcgtgcagccaattgccagcttcaacaggattagtggtgctagagaaagtgggcggcctcacacgaagaaattttgctaacttgttctggggaggtgcatggttatttccctcgttctgctggttctggagttgctgcatcatcatgttcataagctgtgcctgttgagcccagactt

SEQ ID NO: 5919 - DNA, 7535 bp, Oryza sativa
  unsure (1)..(7535): unsure at all n locations
attgatgatttgtttgatcagcttaaaggtgccactgttttctccaagatagatcttcgatcagggtatcaccagttgagaatcaaagaggaagatatacctaagacagcttttaccactaggtatgggttgtttaaatgtactgttatgtcttttggacttaccaatgcccccgctttcttcatgaacttgatgaataaggtgtttacggaataccaagacaagttcgtggtggtctttattaatgacattcgtatctactcccgaaccaaagaagagcatgaagaacatcttcgccttgcactagagaagctacgagaacatcaactgtatgccaagtttagcaagtgtgaattttggttgtctgaagtgaagttccttggtcacgtcatctcagccggaggagttgccgttgatcctagtaatgtggaatccgtaaccaactggaaacaaccaaagacagtttcagagattcgcagtttcctaggcctcgcaggatattatcggaggtttatagagaatttttccaagattgctaagcccatgacacgattacttcaaaaggatgtaaagtacaagtggtcagaagaatgtgcgcagagttttcaagagttgaagaatcgcttaatatcagctcctattttgattttgcctgatccaaagaagggttttcaagtgtattgtaatgcatccaagtttgggttagcttgtgttctgatgcaagatgggaaggtggttgcctatgcatctcgtcagttacgtccgcatgagaagaactaccctactcatgatcttgagttagctgcagtggttcatgcgttgaaaatttggcgtcattatctttttggtactcgtacagaggtgtacaccgatcacaagagtttaaagtatatctttactcaaccagatctgaacatgagacaacggagatagttggaattaattaaggattatgatatgggaattcattatcaccagggaaaggctaatgttgtagcagatgctcttagcaggaaaggctattgcaatgctacggaaggacgacagttgccattggagttatgcaaggaatttgaaagattaaatttgggaattgtcagtagaggtttcgttgcagccttagaagcaaagcccactctaatcgatcaggttagagaagcccaaattaatgatcctgatattcaagaaatcaagaagaatatgagaagaggaaaagctatcggtttcttggaagatgagcaaggaactgtatggttgggcgagagaatctgtgtccctgacaacaaagatttaaaagatgcaattctgaaagaagctcacgatactttatactccattcaccctagtagtaccaagatgtaccaggatctcaaggagagattttggtgggcaagtatgaagcgtgaaatcgcagaatacgtagcagtatgtgatgtttgtcagcgggtcaaggcagaacatcagaaacccgccggtttgttgcagcctttgaagataccagagtggaagtgggaggaaatcggtatggatttcatcactggcctacccagaacgtcatcaggccacgactctatttgggtaatagtcgacagacttaccaaagtggctcatttcatcccagtaaagacaacatattccggaagctggttggcggaattgtatacggcaaggattgtgtgtttgcatggcgtccctaagaaaatagtgtctgatcgaggtagttagtttacttcaaagttttggaagaaacttcaagaagagatgggttctaagctaaactttagtactacttatcatccacagacagacggacaaaccaaaagggtaaatcagattttggaagacatgtcgagagcttatgctttagacttcggtggaagttgggataagaatctaccttatgcggaatttttgtacaacaacagttatcaagctagtctccaaatggctccgtacgaagcactgtatggtcggaagtgccgcactccgcttttgtgggatcaaacgggagaacgtcaggttttcgggaagcagaagagaaggtaaagatcattcaagaaaggttgcgtgtggctcagtctcgccataagagttatgccgacaatcgccgcagagatttgagttttgaagaaggagattatgtgtaccttcgtgtcacgcctcttcgaggagttcatcgcttccacactaaaggaaaattggcaccgcgtttcgtgggaccttacaagattgtcagcagaagaggagaggtcgcttatcagttggagttacctcaatctttggcaggagtccataatgtgttccatgtgtcgcaattgaaaaagtgtttaagggtacctaccgaagaagctaatcttgaacagatagaagtccaagaggatctaacctatgttgagaaaccaatccgtatcttagaaatagatgagagaagaaccagaaatcaagttatccgtttttataaagtccaatggagtaatcactcggaagaagaatcaacttaggaacaagaagatgaattgaagtcagctcatccgcatctattcgccagttcttccgaatctcgaggacgagattccgtttaagggggtaggtttgtcacaccctaaaaatcctaaatatataaattgttgtttaattggaattattagaaatgattttaaaagcctagaagagaagatctaattttaattaataaattccaatataaaatggggccagataaaatttcattaaatactttgcttaactctataattcctagatttttctgggatttatttgagctaaggaagtatttttaatagatggaattgcatttaataaataatttaaattgaaaaagatttttaaaatcctcttttgacattgggccgaaagtcagcctaaaaccttctctctccctctccccggcccaagccggcccagtccgcccgcagccgcccgcccgcgcgtgcgttcgccgctgacaggtggggaccgcctgtcagggtcgtcgtcttcctcccgacgaaaccctagccgcaccgggccgccgccgncattccaaatctaaccgtccctttccgtttccggtgaaattgattgaggggaaaggatccccgtgatccactctaccttttcccttttggaaacatcgtctaaatcgctttggaaattcgcggattcgatctcgaatcggattcgtctctctctcccgaaccctaatatttccatcgcgtcgctggtcgccatgggcattcgccgccgcgccctagtccctatttaagcacccccaggtcctccgctacccgtcgccaccctcgccttcatctctcgtcgctggtagagccctagcaccgtgtagcctcgcgccgccgtcgccgccgccgctccagccgtgtgtcgccgtcgctccagtcgtcgccgtcgctcgggaagaccgccgtcgtggtcgccgtcgcgtcgccatcctcgtcggcccctccatcgttgctgtagaccaccggagcaccgccgtcgtcgtcaacccgaaggttgccgccggcgagcttgcacgcccgagccgccgctggtgatgacgtcatcgccgacgccatcgttgccatccgtcgtagaccggtcgtagaccgttaaatcttggccgtccgttgtggataggatcgatctcggccgttcgtttccgtgagccgccgctgtgcacccggttcaccgtgaaccctagccgctgacgcaataattcccttttccttttcaaaaataattccttattgcgtcataattcaattaaaacccatataaatgttgtaatccgatttaaactttaaaaattcataactaattcatcttagctcggatttagttggttcaagtctctaaatttttctaaaattgagatctacatgttaaaaatatccacatgtactgttcatgcttgtttatgtgctgttttggtgtttttgctcttttctgtttagattctgacgtttccggagagttcgttttcgcaggagaagaatttgaagagttccaaggccagcaaggcaagtcacacagatcccaaacaaccctttgagcatgttgatcccgtttaaagctattgtttctattcaactattgcatttattttcgaatgtcattgggtggagttaacctattgtttgttatagcccttttgttcttgattactttattccttgataccttgggatattataacttgactagttgagctttatatattggttcagctagatattagatatgattgcttagtcatgcttagaaacattagcacactattgagataacttataattcactattatttaatgatggcttaatgatagctcacgatggtcaatcgtgattggttaattaattaaactgccaactaaaacttgctaatggtgggttgtgagcacatggttttgatggtcgtgctcatgataattaaggaccggttcacgagttttggttgtgaaacattaactgtgccaaccacaagctagcgtgggcaacggctttaccttttgtatagcatggttcattgcggagcaccagactgagaagtggcggagataagcccacgggggtcgctggggagtccatgccttgtttataagggggtgattatgatccaggaacggtgcactgtggtggattgtgttgtgctaggggtactgtcacagctcctttctgaggtaccgtggtggtatcgaggcgtatcgtgacatgttgtagggctgtgtcttgtgggtacagtggtacatctctggccaaagtaaaactattcgaatagccgtgcccgcggttatgggcgggtctaacaatgtctttcgtgattagtttcacacttctcagcataataaaagatgctataactggtaataatttgattagctcctggtttggaatggtatattcctggtgtggagatagaactgtgcagccggaatggttgttcagaatggttgggcctatgcaacagggtatgttgtatagcgttggattaatattgtttaattattacctaactgttttattaaattctgaaatgtttgttaaatgctgtttatgcaaatgaaaccctactatgccatcctttgttatcctatgcacttgcatatttgctgcgtggcttgctaagtatgtcatatactcaccttgcaatcattcatcagaggaagagttctacagtgatgctgatggtgtggatgattaggcgtagccctagtcaagctgcctatggagaggagtcgtctgcgctgtttcttatttttttccgctgcttagatctttattgattgagaggaactatctacctctgtaatgacattttattcgcttattaattagagtaataattgtactctattatcaatttgttattgtgtgcctcggttgattcctggacgagggttcacacacatgtaagcgtttggaattttggataaaaattccgggcgtgacattgataaacacatgccctcccttgaagctcgtgtagacatcgtcgcttccgaggtcccgaagcttgccgagtccgccgcgcggaaggccattactgagtggggccgtccagccactgatatcacccacctcatctttagcacctactctggctgctgcgcccctagtgccgacctgcagctagcatcgctcattggcctccgccctaccgtctcccgcacaatcctcagcctctatggttgctctggtggtgctcgggcactccagcttgccaaggagctcgttgagaacaatcgtggcgcgcgcatccttgtagcactctccgagctgaccctgatatgtttctcagcccctgatgaaagcaaaattgtcgggcatggactattcggggatggcgctggtgcaatcatcgttggcgcaggccccttggctgatggcgagcgcccattgttcgagatggtcgctgcctcccagaccacgataccaggaacagagaacgcacttggcatgcaggccactagcagcggcatagatttccacatctccatccagctgccgacgctgatcagggataacatccaggagagcttgctccattcattctgttcggtcggaaacacagatcctaaatggaacgacctcttctgggcggtacaccccggtggccgcatgatccttgacaacatagagggtgagctctaactacagccgtggaagcttgcagcaagtcgtcaagttctacgtgagtacggaaacatgagtggcgcgacgattgcgtttgttcttgatgaactacgccagtgtcgggagaaggaaaaacaagagccagaacagcctgaatggggagtgatgctggcctttggaccagggatcactattgagacaatgatcctgcgtaacccattgcctcatggtcttatggaaaattaattaccactatcatgaaaagaatgcaaagggaatcaacacgtgatgcaccagtatttcactacgctatgataattaattaatggatgacactgattgttcacgcttaagtatttccaactctacttgttgcaaatataacttttattacttccatatgtcctctggttctttagctttcttgatttgtaacaaaatttgaaatacccttttaccgtgtcatttgtcagtatagtcgaattattacctctgtcaaggccctggtaataagattatgtattttttttatttccaaaatcgcaagaatacactgatttggggaaaatttacacaaatataccgttgatgctcttttgatgagcgagagcgttgcagccatgtcaatctcgcacttcgggagagagaaaccgcgatctcgctaaatggcggcgtgaaggttgttgaaattataagcacataataatttaatttattccataaataaatcatgatattgcagatgtaaactagcatgaacgtatcataagatctataacatgaacaacacgaacagatcaaatatgcgcaaaatattaaacacgtaccgagattgcggaaaaacctgttgctcggcaagaattactcgcggttgcgggcgccgacgaaggcgcgcagcacgcgagcggagaggaagacgagccgtcgcggacgaacagggagcagtcacgcaaaacgcttttcaaaaaccttattgctgccttctcccggtgcaagacgtcgaaggcagaggttccggagacctgctctcccgattaccggtgcacgccggcgagcgggatggagtagtctacgagcgacggcgcagcacagagtaggaggcaaaccctagattggtttcgcgtatgttgcgtgaagtcaccggctcggtttatatagagataggtcgcttgatcagggcgcccgcacgatctccactccgctaaccgaactggattagtcgcgcgtaacttatccggactccacgaacaaaactaacaaaacaaatccgaatttcccgcagcaaaacaagactgcaaaggaggctgcttctgcgcaagggtgaggaactaattgttcgggccattcgacgcgtacatcgtgcacgcgcgccgcctgtacggcccgacgaggcgaggcgagcg

SEQ ID NO: 5920 - DNA, 10525 bp, Oryza sativa
  unsure (1)..(10525): unsure at all n locations
cgccggccgtcgccgacgccggcaaagaaagaatggggcggagatccccggaaaagagcaagaaagggggaatagagactcaccgccgccggcgtgcgcgggagtcaaccgccgtcggtcgccattacgccaacgcaggagagaaaagaaggggtggcaccgcgccgctgtgctcgccgggcgccgccgcacagcgctcgacggctgcgcgcgccggcgaaaggaggtgcgacggcgccagcgcgccgtgccgccgggccgtgcagccgccgtgccgccgtcgcaccatggctagggtttcggccgagagaagagaagagtggctagggtttggccagcggttgggggctcgggttttgctctcccgatctccccgcttggccgtctgatcgaaaccctagcgatcggacagccaacgtcggccggaccgcttttggcccaagagggggcgcgcgctaggcctctttcccggcccaggcccaggttgcggcctagagaggggtgagagcccgcatgtgcatataccagggccgccagagtccaattttggtccctcggggccgaaagaaaaaggaaaagagtctatttttagtccctgtttcagatgcatttacaattatagttattaaatgtgtttatttctaagcaatttgagccaacgtgaaaattgtttagagaatagataaatgtgagaaatgcttctgaacatgtattttgtatattttcatgcaaattacaatagaattttgaattgtttttgcatgatttacctccgtttaagatttgaaccgaagggttaatttttacagagtgaataacagaattttgtcattgtttatatgaattttatatagatcttttgctgcaaatagatgaaattgatgaaaattagtgtttctaaaattaaattttgaaccaacgggataatttcattttaggaacattaattatgtgctatgatgttgtaattttctaaccaacgttgataattgtaatgttatagttatggctctatgtgttatgtctattttctgcccaacggtgatgtagacttaatacataataattttaatattaattttgttctcacaatacatgattatctcaggtggctactccttgatgggttacattaaagatattccgaccctaaaaggatataactatgaagaatggaaaagagaactcgaccttgcttttatcttgggagaggtggactgggtgttgactaccccatgtcctatagaacctgcggaccttgtcagaggtgaaaaagagtcagatgctgaatggcaaaagagagagagggacaatgctcccctcatcatgtcgtatgacattgaacatgtgaaatggtccttagccaacaagaactgtttggctgcggtaaaggacacgattgagccaacaatattgggctcaatcccagagtatgacaccgtctctaagtacctcgaaagtataaagagccagtttactggttcttcaaagttttatgcgacacagctgataaagcagcttgtgacagagaggtaccatggaggtggtgtaaaagaccacattcttaggatgagcgacatggcttccaagttgaagccaatggatttgggcatctcagatgcctttttggtccatctggttatgacctcattgccaaagaactttgacaactttgttgtcaactacaaaataagtccagagaaatggaatcttgaagagctcatctctaattgtgtgcaagaggaggaaagaatcaaagagaccaatggtgcctccaataaccttgttaaagataacaaggaaaagagccactggtcaccccccccccctcaaaagcaaaacagcctcagcatctgcctcagtaacaacagttcacagttaagacaagatcagtgtccccactataagaagacagggcattgcaagaaagttcgtcctgacttcctgatagtgatcatggcaaagaaaggtgagaacattattacatttgtaaatgaatctcattatgattggttattctagatccacatgatggattgattctggagcaactattcatgtgtgtaattgtttaaagggattccgttcgatgaggactacgcaaagaagcgaaagatccattagagttgccaatggagttgaagcaaaagttgaaactattagagatcttcgcctagagctcgcgaatggcttcacacttttacttagagatgttttttatgtcccttctttgcaaagaaacttaataagtgtatccaaattggattttgatagatatgattgccattttggaaatggcaaatgtgaactatggtataataatgcatgtattagtcttgctgtgttgcaagatgagatttatttgttatctctttctgagaatgtgaatattgtgtcctcgttgacaaaagaaaagaaagcgaactcctgatgtctcatagaaattatggcactgtcgtttaggccatatttcgagggggagaattgagagactgattaagaatgtaattctttctccattggagttcttagttttagaacaatgcatagaatgcatcggtgcctaaaacaccgtatgagctatggatcctccgtgtgggggggagtcttgcagaggctaaagtatttaacctaaatcttgggaagttggaccccagaacaataggctgccattttattggctatcctgaaagatcaaagggttatcatttctactgtccaaacagttatacaaagtttgtagaaacgagacacgtcgtcttcttggattagggggagctcggtagttcgagaaattgatcttgaggagaggcgggtgtctgtacctgctccgtcgactcaggaacctttcttctctctacctgctgatgttgtgcctccaatgcatgacgttgcggtaccaacacatgttgttatctctcctgtggcaacaatgaatgaaagtgaggaacctattctacaggattcaacagaaattattgccacactagaggaggagctgcaacagcctcaaacagataatgtgccagaacaggaggcccctagaaggtctgaaatagacagaagatcggctatccatgatgactatcatgttcataatatagaagagtcgcacatggaggatgatcccacctcatatgaagaggccatgagaagcgctcgctcatctgaatggttggaagccatgaaagatgaaataaaattaatgaaattaaacaatgtctgggatttagaagaaattcctaaagaagccaaaacagtaggctgtaaatgggtctataaaaccaaatatgactccagagggcatatggaaaagtttaaagcgcgacttgtggcaaaaggcttcacgcaaagagaagggattgattacaatgagacattttctctagtctcttgtaaagattccttaaggattacaatggcactagtggcacattatgatttagaattacatcagatggatgtaaaacggcatttctaaatggagatttggaggaaaagtatacatggcacaaccgaaaggtttcgtcatgaaaggaaacgaaaatatgggatgtcgtctaaagagatccatttatggattagaacaagcttcgagacagtggtacttgaagtttgatgggacaataaagaaattttgggtttcaagagaatgttgaggacaactgtatttattcaaagtttaagaatgggaaattcattttcctaattatgtatgtggataatattctactggctagtagtgatgtcagtctactacaggaaacaaagaaattctagtcctcaaannnnnnnnnnnnnnnnnnnnnnnnggctttacatgttttgggcatagagattcaccgagatagaacaaagtatgcattgggactttctcaaaaggcatatatagaaaaggtgttgaagaaattcaacgtgtacagatgcagtgctacacctgctcctatagtcaaaggcgaaaactatggggcatcgcaatgtcctagaaatcagtatgagctcaatgaaatgaaaacaaagtcatatgcgtcagctgtagaaagcctacagtacgcgcaagtgtgcacacgacctgacttggcatttgttactaggttacttggaagatttcagagtaatccaggtccagagcactggaaattggtataaaaagtcttgcgttatttgcaaggaacaaaagacctcatgctgccttatagaaaatcagaatcgctctagatagtggggtattcagattctgactttgcaaaagataatacaaagtcaatatcgggatacgtgttcaccctggcagtaggagctatttcatggaaaagctcaaaacagaccatcactgcagggtctactatgtatgccgagtttatagcatgctatgaggcaacggggcaggtgaactggctaaagaagtttatacccggttttaaaggtggttgacagtattgagaaaccactaaagttatactgcaataacgaatccatagtaatgtacactcacaacgatcagtcaagtggtgctgccaaacacattgacataaagtactatgttgtgaaagacaaagtccgagatcaaacaatcagtctcgagcacattagaacagaaagaatgctcgcggatccgctcacgaaaggcctacctcccaacgtgtttaaggaacatgtagcattcatgggtttaagggaagccttatgaatcctggactatagggcccaaaagttaaagtatatgtttctgaatagagatgtgtatagtggctattgaatccatcgatgattaaccgtgatgtgtaacatgctctatatgcaaatctgtgatgtaatagaaaaaggctaaaagaaatagtgatatcaagggggagaatgttagatggatctccctccccttgagccgttctcaagggggccttgactcgcgccctgatcggaggcacccagcccaatggctggtgggcccccatcaccctgcgccatataaagaggggtggaggctgggacggcacttgacacgaggttcgccgccgccaactccaccccacaaaccctaatccgatcgagagggggcgcagccagtgacgggaacgtgccagcgccgcgccacgcctcatcgtcgaccgcgactcccactgctacaaccaccgtcctcgtcaagcagagcgacgacaacgacgatggccgggacttcctcctcatccaacgcgtcaaccggtcacatcctaaacccttttcccttaatctctattgttgttcaatcattcaacccaaataaaccacccgactagatgtaaacctagttgatccaatagacaaccctaacaggaaggtgtcgaagttgaggtagatgttcaccatccggacgcagcggaagccgtggccgatgttcttgctctccgcccacagcaccgactcatcctgttactccgggttggatggcagcagccgaacctgtttgcaccaacacacgtacgcgtgcagatgaacgaatatgtcagatcatcatcaaagactagtggttttgcaacaaattcacaacttgtgacgccagggcggaaatagtaagcatgtgcgttgattgctactgcgctccaaccactgcgttaactgatttttgacatatatgaaataaactggattaattaatgaacaataagtatgtatgtacatatagggtggctccgtccgaggtccgagggagtgcttgatggcttggctggtggccttgttcaccagcgcgaacgccaggtagccttccttgtccttgacactggcggtggacggtagccatagtccggctcgtggctcggtggagacgatatctatactaatataaaaatgaggagttgccccctccaatcttacaggtgaaatcatctcgatcaatccttaccgtccatctgcgtctgtcctgatccatatcctccatccatccgccacggattgtccgcttcctccttctcgcgcgatgaacttgcgctgaccatgctggactcgcgctcctcctcgccccgattctcctcgccccgcctcagtccaacggtgctccagccgatgctcctcctcctccaccctattcctcctcgcattccccgttcgcgccgccggagggtcgtccccttccgccgacgccgccatactccaccgatgccctcgctggaaccgatttcttccccttccgccggcaccgcaatccacatcacaggttcacaggtcctcgccggaaccgatttcttccccttccgccgtgccaccgtcgccgcaatccacttcacaggttcatcttgcgccgattggttcccgtcagatttgagtaggaactaaaggaaccatcactattcccctgaaccctaaggtaataccaatttctcctattttacatgtttttgtgatgtgtcaatttgtggatcaccatttgttttcttgatcattcacaattgccaatcagaaattggccatagagtttgaagattttaacatatcaatggatttgcatcctttcagttgatcctgtgcagcccctgtcaatggatttgtatcctttctttcttctgaacttttcagatcactggaggctctaaattttgcttgtaatacagatgattagcactactcactgtgaagccatcctactgttcttgttcgtagttactgaaaaatatataaagccatcctactgttctataggagaatctaaacccagtggcaacatcacatgcaaaacacctccatatgaaattaatccttctttttcttcctatttccttgcagatcttcaaatttgtggttccccgagtatatatatgcccaggttgtatgcttgaaggttgtaactcctagcgatggacggcattcctaaattaactgcaaatgaattaagaagacaaagagaccgagagcggtacgcggcactcagcgttgaggagaaggcagcacgagttcaaaagaaccgtgaaaataggaagaggaagaagtctgcatctacatcgggcacaggtgatgatatattcattcacttcttattatgctcacccctatttcgtggcaaacaatgctgaaacctgggcaaactcgattggattgtagttttgaatcagagcctgtgcctttctccacacatggtaatgtcttgtggaatcaatttataatatcaaattgttctgtgcgtctgtttttttttttggggggggggttcaatctaataatatatttcaacaggtgtgcttggcgatattaaaaatttgagtttgcataatggaagccaaactgtagattgtcagccatcatttcaacctgtgccttcctccacacccgtgtcttcctgcacacctgtttgcagaaaccgacaaacctaaggaagtactttttgcggcacacttgccgtatactgctgcatgcagctcaggcaatgtcacaggtatgatttcttcgttgctttacataattacagtgccttgctatatttgccaattgatttgttctcatcactaaaatggtgaaattggtgtagttatcatgcaggctcccaatgaagtgctttccaagtaccactgaaatggtgaaattggtgtagttatcatgcatgctcccaatgaggtgctttccgattaccaattgcaaattaggttatttcattcctaaaccatgcttcttacccaacattgatttgttgattgatatctcagttaattatttcaatggtgtgcgtcaattgtatatttgtatcttccttacaattttcctcgaatttctgtgattttgcagccctgatcgagttgcctatttcctttatcattttgttcaagtaatctgtagtagtataaaaccaaaatatttcttattggttccaaggcaggtttcctgctcaccaagcaagttgatgctttgtttcaggaaatataggacaaataaacagatgactgttttagacaagttcaccctattgatagcattaaaattagatgctcaagatggatgatagtaacaacaaaagcaagtggttaagtcctccaatgtttcatcatttacggaggagttcataaggtgaaactgtaaccagatttttgtgttagtcatgtatcctctttccaattttgcgagatcttttactgcatttcatctcagcaaatgatgtgaataatatgagccatttgatgatatttctttgcatacattttcatttaactactgttaggcttttaatattattaacagactgttatggttattccaacagtttactatatatcatctatactaatataaaactactattataatctgtaggcttgccccagtctctctcgcggcaatggtctgcgtgtgctacaatctgcatccctccacgcctgagtaatcccctccgttcccatgttgaccgacgcggccgccgctgtctcctccaaagcagcagcggtcctagccgaattggccatccccattgccaaacaccatcactggcgccggcagcctcaatccgcgtcgagtttttgtctccaccagcatagtggtctctacacatgaggttggtcttaggctgcaacttttaactcttattttccatcttttaatcgaactcgatgcgagcacgggcttaatgcattcaagccacagtctcaaagcattctgtatttatgttgatgttggttgattgctcttgatgtgcatgtcaggtacttggaggttttttatttccctcatgacgaggacttgttttctcttatctttcaggcctcgagtgacaaatcagagcagcaatcatgctttgttgtggcttttatctctgccgatctcacggcaatctatcgacatgcacatttgtattttgtagttggataaaaaaaaagtagcaatagttgccatctttttctctaggaaaaactgatttgtttatatgctttctcagtttatgtcagagaaaatggttagttgagcttgtctcctatactgaatgtgcttggggttaactgggctttcagtcagtaagcatggtaacagactcttcattgagttaagtagtccaataattattttttaaagcattttagtcagagtagaaacaattatattttttctctactgactgcatctggtatttttggtaattagctggcatcacgtacttatgtatatagtcatatggacatcaagcatgtttgtgggataatataagatgctctaggcagagtagaaacatttatattttacattcctttgtgtcatattttcccttttttagggaagggggcagatcactgctcaataataaatttattcatagtttatattttgtttaattagatgattgactatgaaatttcatcacctgttgtcgagctggagtccccagtgaagacctctgtatgggaccattatgctttcattaaattccatcaccttggaaaactggttttgggtaatagtaatccctgtaatctgtatattttggtgtgtgcctaattgtatgaattgaaagattgaattaagttatgagcactaaccaaatggacaggcttgctttcagtctcctgacttttgcctatttgtctctattcctctgaaatccgtcatgcatgtgcagcgttttgaggatttggctaaacaatactttattgtcaaccttgacgataatgacttctcacgtactgagaatcatcaccaaggtttttcattttttatcttatgaattactctttgtggttgcttaaggaatagtggacttctaactgaatatgataccgacgtgccttgcacgtgcacgattactagtataggtagaactatgagtcagagtcgtcgccgcgaagctagtcaactccgacgtgatgctcgccacccgctcacggcggcggtgctgcccttcaacgcacctgacgtggagctagccgccgggttccgcccctacgacgtcatcctcttctccggcgaaccacgctctagcacgtgctagccggttcgtttgccggaccgaagtcgttggtcgtgaggaagcctcaccagggcaccccgtggaccacttgccgctcctcgggctgcgccgccgcacttcggccctcaccgcaagccgctttcgttgctcccagtccgaagagaaaggaggagaaagagatgagagagagagaggtaggaagaagggaaggagagaggacgacatgcgggccccacatgtcagtgagtctcacagtatattttttctatgaatgacaaatgggtcccatacatatttttaaattctaatgccatataatagccatgtcaattccacatggaacgaagactaagtcaatatcaccacgtcagtaaaaccgctctcaaaactgccataagagtcaaattgcatcagtttaatagttggggtcgagatatttggtactgtggttcaagaatacgaatcagatttaatcactaggtaagggagcgaaagtgaacttattactatttcttatatggctggaaataagtctattttgtgtccctcatctctttgcgccatacacttatatggctagaataagtctattttggcgccctcatctat

SEQ ID NO: 5921 - DNA, 2851 bp, Oryza sativa
aaatctcagccacaggcgggcgcttgggccgttctgtacgggcctcggccacagcccacagccacactagtaaaatgttttttttttcgaaacaataccaatattgctgcccagcttaatatttcgcccaacggcaagctcctgccgatatctatctcctctgtacgtatgagtgtcagtcggatgcttgcatgcagcaatcagtatacatacttgtgcaattgaatactccctccgtttttcgttataagttcattttgaatttggtcaaaatcaaactacttcaaatttaatcaatctatatacctacttaaaatatacctacttaaaaaaataagtaaggctttcggtagggttttttcgtccgtcaattttttttcacacgcggtatttttctcacgcgcggtttttttggccggtttttatcagattccggtttttttacgtgtggtttttgtccgatttttttgtccgattgttttttggtgggcccggatattccccaccgcgtccaatttttttgtgggcccggtttttttccaaccgttgattctgatgggcccggttttttatatacaaaagaaaaaaaccacaggaatccatgttcaccatgttcacgcacagaaacacagtagtccaggttcacgcacaaaaaacacaggagtccagttcacacacaaaatatacatacaaaaaaacagagtccaggtttaccaggttcacgcaagaaaacaatatcgcatacgagtcaggttggttcgcccacaccttttcctgctcctgtttgcgcagcccaagtcaggagttagattctatcccgattctatcccgagtcagattctatcccgcttttgtttccgctatatttagctagcactcccactaacgtgattttatagatttttctcgcaggacaaaatacacaaatatgattacaggcaatacaaataatagaagcgcacaagaagatatagatcacaaggctcttcttcctctaggatgtcaagccacctccaattaatgtcgattccaggttatcaatgaactcaaccctgaatgcaatttcaatttcattagatttataagattaatattgaataaaactacccaaggtcttttttctgtccatgcagaaacatatagcaagttagcaacaggcatattttcatttcagttgctcagcggctattttcataacataccaccacaaaatctaggagttgcaaacccaaacatgaaaatctcttttttaagtggctttatatattactagaagaaagaaaaagtattggtaattgcagcaagagcaattttatgcagaaaaacattaactgtgcagacagatgaaccatcgtttaattattgcaattttttatcatgctctaagaaccttaatgtttatcatgctctaaaaaccaagtaaatacaacacgactagatgaatgtctttctgctttctttttaccttatgtccgctctgcttttattcttatttattggcagtaattaccggaatatttttggcaatcatctcgattctatacctccaacccatcaaagggtgataagaagaaggttcacaatgcagcacgacattgccaattgcctgaaaacaatgtcatagccaacacttataccaatccagatcagcagacatcagtatggagctcttaaaaattccaaagcattacaacggggcatagcaagtacaataggttccaatttagccatgcaactaaacttaattctgaaaaaaaaattgacctgatcatcataactctttagattaagaaagatatatcttgatgatctttcagaatttcatgttcataagcttatattattgttgagaaaggctccaattctatacacatgcataaagcaaaatattttaaatcaaagatgtgtagggaaattttatagactccaatgctaccagaagtaccttaaatcacggatgcattagtgagtctttttgcaataatctccacattcttcagcagagcactatcatgaacctcagtacactgataatttagatgtatagtccttggttccaatatcgctatactgtccctgcatcatggaaacaaatgcaagtaagaaaaaatatccatcacatatcaaaacaaagtttctttaaatcaaataaaagcatcatggcatatagcaaactaaggtttgatttttttttttttggtgctacattggtacatgtcagaattgagtgttcctaaacagatgaccaatcaggcatgcacattgcaaccaaaacaaagcaggaaaccatgtgatcagatattacatcgtaagagaaaaaaaaattggttgcagtagtacggctgtagtttgcacaaaatttgagtccgtcgcatatcgctcgcgccattaggatcgaacaaagacagagagggcagataccatgttcaacccgaaagagattactagaaccaaaacgattactacagattcaatttggactaaaaagggggatgaaataaacctcataaatacaagaaggattccactagattactacaacaaccaatcgaggaagactcaattggtcagatcgaagccgcgtgaagcgcagatccagcaagaaggaagaagagggttctggcggttcaggggctgaagagagcatagaacggcagggggattgtgggcgccggtcagcaaggaagagaagattgcattattgcaacgatgaactcaccgtggccactctagatccgctccaccgctgatgtgtgcagccgtcgtcgaggttgtcgcccccttcttccaatctgccaccccacctcatggccggccaagaaaggagagcaggggcgccggcaccatctag

SEQ ID NO: 5922 - DNA, 10840 bp, Oryza sativa
tgagataggcttttgtgattttccaaagaattaatcttcgagtgggctaaggcccatctattaattccaacaaaggggatagcgctatatcgctaatctatccagcggtatcgctaatcctttaagtgcgcccaggactgtaactgtctcacgctccaaacaagcaagagctactcggtctcgcacccttaatacgcgagaccaccggccaaaacacacaacccagcatcgaggtggtggagcccgtgaaggaattggcctcgcgcggctatccgcgagagcgcctctctgacgcacgtcggggcccacctttggtctcgcacttccccaccatgaaaccgagtgcgatttcgcattctcccagcgcgagaccgaaatgttaattgcaaggctaagttgattatatttcgtgtgaagaccgtggagtacgtatatatattttctttcatgatttttagtagttatgtgtaatatatatatatatgagagaaagtagtaatttaattagtgagactagtcttatccacattaactgcgattgataaaatcattacttaatgaattatagttaaattaatattatggagtacttattatattattatgttggtaatcgcaataacatatcacggcaaataaacttttagtgtaattctcatggagtctgatgaggacacaactagcttggatataaccaagactaccttatatattaatcaaccaaaggtgcatatgttctacattagatttacttgttatatatttgaacaaacgttgctacacaaagagttttgtgtgttttcgtttgcagaggtacttgcttgggggaagaaaaagaaaccgagcgtaacgaatgcacgaatgattaaagaaattgattggagaccaaaccaagaccttctccaagtctatttccatctcaccacgtcacttttggtccatagaagacaagagataaagttctatacgttttggatccggattcgggcctcctgacaagatcaacttaaaatggacctagccgctgatctagatggaatttcggggcctatgagtacttgttggaagtcttatggagtctactttaagatggttttggtcccacatcaaaattcctaccaagctgccgggaatctacaaaacaagccacatatctcatccagtccgaatccgatttgtgttttggccttgatagtgtcgtgggcttagcccaagggggtctgagcactacggcaaccctaggacgtccttaatcatacttaatcagtagtcgtcatcgcttagaggcgggttttgcttagattaatttgttaagaacagtttcgccactagatcagtttgtagaaccccaaattcgagtggttaatcattcatatgcaattgtgttgcaatctatcttattcttgcttgtgttcttcgattcgcacgtagggattatccttctcggccaggtcaaccgggtttcggcacggttgataaccagaggagacgtggtgctgcaattgcggggctcagtagcgtgttcgttcagaagccggatcgagttgtgtcgcgactccgcccaaatcgattgtttatcaatacctatcggaagatcgggagctaacatccctcatcagttggtatgagagcgcggttgcccgttaggtaatttatcttcccataaccagaaaattgccacacaaaaaaatattctttacctagacaatgtgacccgttgcattgttctattagattttcctttgttgaattctagattgcattgtcgtgttgagtgctggtttagttttagatttaattttaagttttgagtattgcatctgttcatcacttaggcctagggttcatcactcaagtcggtgtgagttgtacgtcagttttaggtccagtttttcatctcaacgattgttgctggtatcttgaaaaattgaatcctctcttcgtcgggtaaaaaaaggtaatgataatggtgctacaactactcaaggtatgtatatttatgatgtgccaactatgtctactacttatgctacattagagcaacccatagtggaaacaattgctgaaatacctttgtcacaaaataatttgcttgatgtttcttgtgataaagaagagttgtgcgatgctccacttatatccatgccacaactagtgaatggacatgttagttctatagtagagccaccatgtgttgagtttaaacatgttattaacattgctagcgagaatgaagaggttaaattattatcttctttaaatacatagggttatattctatttgatgatgtttgtcctatcaactgttcagagaagaaattatttgctagatttgaattgccatgcccttctgatgtgatttttcatattattggcaattatgatagtaaaggagaatataatgtgcatcgagtatatatttgttcgaagttcactatacctccttttcatgatgaaatgtattgtctagaggaccgtctgcgtataagtaattctctatctagttcctctagttgtttaaatgagttacatgttagtttgcaagaaggggagtgttgtggtttttcgactacaaagattttaggatccatccatatggccacaagaaatgttcctcaccggatgttgtgatagataaagataagttcaaaatgctccatgacaaggtgaaactgaggacggtttccaatcaagaaggggaggatgatgaggacacaactagctcggatataaccaagactaccttatgtactaatcaaccaaagatgcatatgttctacataatatttacttgttatatatttgaacaaatgttactacacaatgagttttgtgtgttttcgtttacagtggtacttgcttgggtgaaggaaaagagaccgagcgtaacgaatggatggatgattaaagaagttgattggggaccaaaccaagaccttctgcaagtctacttgcatatcaccacgtcacttttggtctataaaagacaagagataaagttctacacgttttggattcggattcgggcctcctgacagcatcaacttaaaacgggcctagccgctgatctagaagatattttggggcctatgagtacctgttggaaaacttatagagtctactttcatatggttttggtcccacgccaaaattcctaccgagctatcgggaatctgcaaaataagccacatatctcattcagtccgaatctaatttgtgctttgggccttgtaattgtgtcgtgctcttagcccaagggggtgtgttaacaaccaaatttgataattcaagtatcggagatgaagataaaaccgaagcggaatccgagatagagatcgttccggaagcagagcaagaatcggctaaagtccgaatcggctacggttaggatcgctagagttcgagtcagacaaggttagccgattgagccgattccgacaatatgactcgatacatgacatcaggttgggttatggtgcttcatatggattgccatgcacggattgagtcctagaaaggcaattgtatatattaattaggatattctatgtaatttccttagagataagtttggacaaaagtctgccgcaaagacttatggtatcttagagtttgttagagataatagtcgtgtccgatatggacatattttgtaatcttgggtataaatagaccccgaaccccatgtaatcaatctaacacacgttcaaatacaatgtcggcgcatcgccacacttttactttcgttttgtttcgacgagttcttgctttcgggttgagctgcatctgtttcgatcttcaactagaggtaaaacttgttttggcggcttgtgttctcgggattagtgcttccatctttatgatactctaatcttgtttatgtaattcgtcgagttatcatatatcttatataatctctggcaatattgttatttaaccctcaatccgctaaaatctatcgctagaaggcggccgatcaggttaaataccaatgttgacttagattatatagggtatccaccactctatgaaacacccaacggcttgattgtcctagacattgtccttcttttcatacttaatgctgcatcagttaagtttgatctattaagtcgtgcttagaatctcaatctctagcctgctttttggttgctgattagggtaatatcggggtttcagccgatcttacctgatttagctttatgtttcatgtgcttaattgatatgcttgatctgccctttatgttaagatcttattacaataaagtatattaggcttctgtttggtatattttacttgctttaatatcttaatatagagtggtatcggagtattagccgatacatgctagatctatctgattggctatgctattagcgtctataatctcattgttaatatatatttcgatctaagtgatttatactgtctcggcatggcgaccgatctatcccaatcacttgatttgagtatatatcgacataaagattacatactgctaatatctacagccgatcgaatagatttagtgctctcttaattattaatgattgccaatcgattcaaatatgacatcagctcagagataaatgatatgtcatcggcgattagccgatcggctatcatttatggatttaaccactattttcctgtctttgtttcttgttgattgcaggatcaaatcaactggcatgctcacgaacctaaaggcaagattttcagacctaacatccctcatcagagtcccaacggtgtgctgcacagaaaattaacgtcgcgtgtagtgcaataatgataagttacaatatttatatattcatggagtcgcattagttggtacaacaatttggtaaatactaccatttttatgttctagcaaataggaaaatatcttacttattgtttttttataaaacaatggtctcatttagtcatgaacaataacttcgtgcacttgttttttaaggtctattaggagtacaatattttgcactatgtattgtgaggttttggagtgatgttttatttttttcggagttcctttaacattccatattaaataggacatcaatgcaagaaatattcctcaaatacgaaacatcatgcacaacatatagaatattgtacaaagacatcatgttcagtgctactcattgttgtggtcagtcggagtcctaaaactaccagcttgcattttctttgtctgtttccttgcacctgcggcatgtcgggagctaaaagagaaacacggttgggctcacggcgctcatggttaattctatgctggttgttgtcgttcccttctaaaccaccaacttcatcagtctgcaatgccgaaattcattagataccgaggacgaccctccacccaagctacacatcttgtcgtacgatgatgtctacggcctaaaccctgacattagttttgggtggtagcctacagaagcatagtagatatcaatcaaattgtcaaactagagcagagaacaataacataaactaaaatatacaaacctgttgacggtgcttgcatatacagaatttcattcggatgcaagagatattcaccaaatagccaatcaccttgtttcaacaaatccatataaccctgcactccaccactgaaagtcgtaccttgcattcatgttacatgtagtacaaagttattctcttaagttgcagttagagtcatgtatcgtagaaaagtaccgccaatatgtaatgattaacaatgacggttgtgagcgtaccagcataatccatgtattgtccttgccatgggttggtaccatttgttggtggatgcatgggagaaccacctgactaggccctgcaaatatcaggaagtaaatagttaaaaacattcgtatccatgcaaaattaaataattgaactgatagtagaaattcatccactaaaacataccggcctcattactcatgcgaggaatctccatgcttgtccctgtgaactggacacatcagaaagcatcaatagttgagaaaaataagaaaattgtgaaattacatggcagcggagacccagcgccgaatgacgcaaaccctcctttacctatagttgccctagaaatttgggtcatggtagggaccccgtggctagtccttgtaaatgcaattaattagcatgaagtgaaaggacatgtggacatattgaaaggaccttgatgtcgcctagaagggggtgaataggcaatgcggaagataaaactaaaaagggttggattgtctgataccaggttagagagtcctatggatcggattgtccaaactgagatcggattatttgacctacatagtaacaatcaaacaagtaacaacctaaaagctctagatccaattcacaagtaaggaggagagctcaactaacaacatgattggcgtggcacaaagcaatgcaacaagaaggtaaagagagtgaggatatcactaagatttacgtgatgatgtattttgcggagttcaaatccttgaggggattccaatctccgtcgagaagcttgcaaagagcccggtcttttttcaaccctatcctcgtgaggttgcacaaatccactcctcctttcactaagggtatctatttccttgcggaggtgagatccggccttcacaaacttctcttggccaaccacaagtagatcggtggcccaagaataacacctagctgtctaggagtcctcaacctccaagagtaataaacaccacacaacactttgacaaatcatagtgctcaagataaagaaaagtgcacactaggctcccaacctgcaaatccacactcacaaagatccaagtcacaaagaacaagggggatttgagatagagagggagagagctcaaaaatccaaagcacttagcacaaagctcaacccaaaacaagatttgaatgaaatgaatttgagcaactctagaaaactgttagtggggggtttataaagatccccccaaaatgtgaccattggaggggaatcttttagcccacgtcagatagtccgatactaaatcggatagtctgaaaatttaaatctccaaggcaatgagatacaaagaacgaatttccatgaaatatcggactttctgagacattggactatctgatgttaaatgggatagtctgatattttacaagcaaaaacttcatcctcaagtagagactcaggttccatgaaatttcgaggtctatgtttcatcagactatctgatccaacatcgaatactccaatacttagaaaaaaactcactcgagaggagttttcaaaacaagaaagagagtgaagttccatgaaaaatcggatagtctaatttcaaatcggtagtctgatgttgatgaagaaaaatgcaataacttttttactccgaagtccaattttgatgatcttggactttaaagaaacctagttagaggatatcaaatacaccataaaacatgagacaaaaccttcaagagatgttgaaaaacttgaaaagaaacacggtgtaagtgttgtgacatgtaaaacaactcgcagttggaatttgcttaggtttttcaactcacacaaagatgaattattttaaacactagtattcaaccaattatatgcatgtggtatccctcttaataatacagcatcctaaactcaaatgtaaaaaagcaaagttataccaataggaataccttcataccatacttggaaggttaccaacgtcaaggacatttgatcattgggaaaatctcatcttcttgatctttggcatttcatcttcaatttctcaaatgattgatgcggataatccatggcttcaaatggcctcgcacggtccatcacaacaaagtcttcactcgtccttcaccatcagtttcagttggtcggtgtcaagccccttgcttgctcttcaccaccgcatggtccatcgcagcagagcgtcacttgcgcttcaccgtcttgccataggtagtcacttcgtaccccctcatcttcaatctcttctctttaattctcatccatcgataagtccatcttctagcttcttcatcggactaatcacttgcttatacactcaataagcgcattagtcccttaattgtttgtcatcaattaaccaaaatccactaagggcatagatgctctttcacatatgcgtaacaatgttacccaatcgagccgaacacgtgaatgatgcaaatcctccttgctagtgtgaggttgcgacatctagagccttgggaggaaccacttgagacatgggacgaggcatctgaggcatgggatggaccattcgcgttccctctgtcatcaattcaaaaacatcatttagtcgtgcaacaattccaattgtcaaaaagtaagcatattgcacaaaaatgtcttacgtgcatacaacacaaactcaccctgccactgagaggtgatgggcattgagctttgcggggggtacctattcagggtgcgctacaaaacaatatattagtttataattgaatgacgcatattttatcattccataagaaggttttttacctagaactagggcaaacccacataggcgttccgagatttatgcgatcgttggaaaagtgggcacctcacgaaaagaaattgaccatcctgcatgagcagcaattgatgatcgtgtggaggctgaggggcgtgctgaggtggacagctgggaagaggtagacagccgctccggcattggctcgaacgtccttcttgtagacatctaacgaatgtcggcacgacgggaggcacatgattcacttacttttttcacgaagaaagtcgaccgtggccataacttcatggttagtacccacaatcccatctctaaacttctcccacaaagttttggcctcccttactaaatcccctgcaatttcggtatgcaaggaaggtagtaacaagtttagaaagtgtcttcgcatgaagaacgaaacaccgatgcaacaaaatctttcaatctgaagtagtacagtcaagtgagccagggttgctagctgcatctcatatatttggtcaaggttggctagtccgcgcttgtcgagatcctcgggtgaaaacagtcggatgcgagtcagcgatgagtactaggccatgtattttcgtaagtgttgtggtcgtatgccttgttctctgccttgttctcctgaacaacatcagcctgcgcttgcgattatgcctctatccatgggctcatccttgagtatatagaacgacaatacatgttgtcagcttgtctcttttgccttcggtgaaaatagcatcaataaaccattacttattgctcgtagaatttggagtaatgtacaaaatgaacttatgtgtgcacttctggtggaaccataagtccaatgggaactgggacatccagatctaactccagaacttctactagcctattaataactacattgaagtagcaggatgaggatgaatggaagatgtgatctgtgaaggctaaaatatggagctcctgcacccttctatttatagagggagataccttggactataatggccaaatgggccacccatcccggcccggcgtgagcatgaccaggcacgggcgcacggcccaagatcagccgagtcggcacggcccgaccaacacgccgagccatgttgtgcctacacattggctgcaccaacgaccgaggcatgacccaataagactcgggtcatgtcgagctgtcccaaaggcacgacaagcccaccatggtccttctcggaataagtctatttctcctccctagtctatttgggatatgtcctaggaattcactttgactcccttaactagtgactgaatctgattcgtatccctgaaccacaataccggatatctcgatcccccccaactattaaaaccggtgcaatttgactctctcgatggttttggaaagcatattagttgacgtggcgcttacgtagcggtattgacctgatctttgttccacgtggcgcttatgtaggattagaactaaaaaatatgtgtggtacccatttgtcattcacacagaaattatagtgggacctaatgacatgtggggaaaacatgtcatcctttctacttacattcttcctcccacctctctctcccttatctctttctcccccccttccccttttcttcggctggcaccggtaggcgggagcaatggcggcgggcagcgagcattattcccagagcactatcttggagccgttgtgaacgccgacgtggatccttgccgccacggaagtgttagatggatctccctccccttgagcccaacggctcaagggggccttgacccgcgccctgatcaagggcgcctagcccaatggctggtgggcccccgtcaccctgcgcaatataaagaggggtggaggctggggtggcacatgacacgaggtttgcgctgccaactccaccccataaaccctaatccgatcgagagggggcgcagccagtgacgggaatgcgccaccgccgcgccacgcctgatcgtcgaccacgactcccactgctacgaccaccgtcgccgtcaagcacatcgtcgccgccgtccttgtcaagcagagcgacgacaacgacgatggccaggacttcctcctcatccaacgcgtcaaccggtcacatccctaaacccttttcccttaatctctatttttttcaatcattcaacccaaatagaacaacccaactagatctaaacctaggtgatccaatagacaaccctaacaatggtatcatagcaatcctagcatttagattggttcgggaaagaaatccaaagatcaaaagaaagaacagcacacgatccgcacgggtcgaaagggagcgagtcgaataacaccct

SEQ ID NO: 5923 - DNA, 3938 bp, Oryza sativa
  unsure (1)..(3938): unsure at all n locations
atggtggctgcggccgcacccgacgggagtgggggcttcgcgcgccaatggctcggcgacggcttcgtgcttccctcgatcgatgctgtgcctaaagctcaggcagcagccgagcaggacgggctggacggccgacaatgctgccacaagacgggaggagtcaattgagtggttgctattgacctaccacggtgaaaggataaggttgacattggaaggctttatcgtgggtgctgcatcgtgggccttgacacacgcctgggctcctggccagtgatgcctggctcgttttggctcgcgagcggctcgtgagttagctcgagctagctcgttatgactaacgagccgatacatgagctcggctcgttaacaattcctaacaagccgagccgagctgagacgagctaaccacgagccaagcgagctaacgagccatgagcttttcgtccaaccctagatccagtacagtgtcctgaggcatgaggaggccccaacgaattatctgcttcgtttgtttgtaattattaggggatgttaacatgtttagttgctagtcacatattatcacgtctaaggttagacatatttgattatattgacagttgttggttatagtcatagttgtggtaagatttttttttctaataaaatgggtcccatatgtcattgatttatgaaagtgtggcaagattcccttagatttgctaaggtgtggctaataatttgatcgtattaacttaagcaagtgtggcaatatttattgataaataatggtaaagtatggctaggaagcaaatacaccggggcccctttgaattgtaggaataaaaaaacgaaggaataggaaaaacatacgattctaatagggatgtaagtgtaaaacagaggattacaaaatacaggaaaaacacaggaatgatcgtttgattggactgcaggaaaaacatagaaattggatgagagagattgtcggtgacatgaggccgggagtatcatgactagaggcttgaggcagacacaatcgcccacgtggcctggcaccctcggggggcgtcgggcccgagggtgatgtgttcgccctcctctttgtctccccgagggggtcggactgctcccgcctcggccccgagggccgaggcgccccgaccccttgtgggttttgcgccgcgtatatggggtaggtgagcatagcggggctcacctaaccacatttattgcggtttggacgagcgcgtcacgccgcatgtaacgcagtgcagcgcgctcgtttatccggtctgtgaccagtcacaaaccggtcagatcgtgggttaggtggcgacaggcgatctgacgcacgcctcgccccatcccgtcaggacgagggcttctaggcgctcgtccccagctggagctagcgtgttacctcccggagatggcacgttagtcccggtcagatatatgccaggcttcatcctaaccattacaagcaagacattgtatgaagaagggcgaacatgcagattgctaaactgacacgtggtggacaagaatgaccgatttgtgaccggtctgacactggtcatgtcgacggcagacagccatgttcccacgtcgcgcctgcttccggcggaagtggaggtaggtatgggccgtcccatcagaaggtcattcggacggcaaccatacaaatctccgtccatttatgaagagaagtcaagccaagtttgggggaagagagaataagtccccacacaaaaaagaagagatggtgcatgtggtatccccttgagatataaaaggaggaccttgcccacttagaaaggggattcggatccagaacgatcaaggctggattgagaaccagaggagagggtttctagagtaaaagctctctgaccctccagctctttgtagtttttcatacacagatccaccagaacacaggagtagggtattacgcttctcagcggcccgaacctgtatacatcgcccgtgtcttgtgtgcttcttccattttcgcgaaccttccacagaccaagagcttagaatctcacccagggtccccggccgaaccggcaaaggggggcctgcgcggtctcccggtgaggagccccacgctccgtcatctggcgcgccaggtagggggcgctgcgtgtgtttttctaagctctcgtattctttcgtgtgcgccaaccttttcctgttcagtccaatggctgaacaagcaaaggcgcacaacctctctccgagtgttagcggtgacgacggggagccgaacccacgccgtcgagctcgtacttcacccgccccttcacgccaaagtcctaggcgggagaaggcgctcgagagggccgaaggatccgcgacttcgacatccacgggagatggaaaaaggcggcgagatggggagcgtcgccttctcgtctacggcgacggcagcacgccccagggcgcgctccaagctgcgggcgcgctcctacgtcacccgcccgtcgccatgacccggagtctccagcccaacgttggctggacgacgtggccaaattggtcatgacggcacggcagcgcctagatgctggtgggcggtcctccgccgccaagacctctggtactgctaccaccggctccgcgtcgtcaagacgaagggcgcggcgagcggcggccgctgttcgccattcggccgccactccttcgtcagcgcctccgacccgggaagatctgcgtggggggtcggatgcccgcaccagtatcgagcgccggcgtaatggccgacgtgctgcccacgcaacggagggcgcctcctcgtccggggtgtcacctcaacatggacgcggggatcagccctccgtgcccccggttggtggtgtcggctgtagagcctttgtggcgagccttcggaacgtccgttggcccccaaggttccggcccaccatcgccgaaaaatatgacgggagcgtcaaccccgccgagtttctccaagtctacacgaccgggatcgaggccgccgggggtgacgacagggtcatggcgaatttctttcccatggccctgaagggacaggcgcgaggttggctaatgaacttgccacccgcgtatgtccactcttgggaggatttgtgccaacagttcaccatgaactttcaaggcacatatccgcgcccaggagaggaagcggacttgcacgcagtacagcgaagggatgatgagtcacttcgctcatacattcagcggttctgtcaagtccgcaacaccataccatgcatccctgcacacgcggtgatctacgcgttcaggggggggtgcggcacaaccgcatgctcgaaaagatcgcctccaaagagccccagactaccgcggagctttttcagctcgcggaccgagtggctcgtaaggaggaggcgtggacctggaacccctccggttccggtgtggcagcttcggccgcccccggatccgctgctcagacagggcggcgtgacaggaggaggaagaagaggtcagcccattccgacgacgagggtcatgtcctcgccgtcgaaggcgcttcgcgggccacccgaaaggggaggcctgcgagcgacagaaagaaggaggccggcgctcccggcagggagcgcccaaccggcaagtggtgcatcgtccacaatacctcccttcacgacctcacggactgccgcgcagtcaaaagtttggctgagcggacgaggaagtgggaggaggagaggaggcaggagcgccgagagggtaagtccccggcggttccttccggcaatcggcgaagtgaggccaagcagaaggcccccgccgaggacatcaatgacggcgatgatgacctaggtttccaagagcctggggccaccattggcactggtgatgggggagcgtgtgctcancgttctcgccggagcctcaaggccatgaagcgagagcttcttgccgcggcccctactcatgaa

SEQ ID NO: 5924 - DNA, 10843 bp, Oryza sativa
acatcttcaaatgtgtagacacccttcaataaatcttcagaatcaactatctacacgagaaatgacagtgcatgattaggaactttttgtgcatgagcatgtacaccgcattgtttgctgcaaattacagaccttcacagactggattgtttcttctggaagtgtctcagaacatagatcaatatcagatgaatttatttggtcatcgcaaggttctgaagtatcaactgaagttgcttctccaggagggggctctttgctataaactaagtcaccttctacagcctgcgaaatgcctgtcaagtacaccagttagcataaggaggaatgggaaaagagaagttcaccatataaaactacaaaaggtaacacgcctgaagaaaaaggtcaaggttagccgttatcagaaaattatcaaactgcatcatgattcaactaaaactgagtagctgtagaaggatgaagtgcactgaccatatttttcaactctggcactggcagcatggttccagaggtaactttggtaactatgaacgtaccttcataaaagaggcaacagcaaataagaaagacgcataagcaaaatatgagaattaataaattggtcaacaaaacagaacagagaaaaagggtaacagaaaagcttgaatatatcaaacggtatgtatattgagcagcagagaacaattttaaaaacaggtacatataacagatctactactgttcatgactaatgtctataataattccaatacaattttgtatattataaaatctacttagcttttgaggtaacagaaattgactaacccatcaatgtaaagaaacatgaaaagacgaagaaagttaaacaacatacatcattcgtaatgttcttggtatactctttaatgcttgcagatagttaccagggcatttcttcaaacattgaagctggaaacaatgcatgaaagaatatcagtttaacttccccaaataatgtgatctacattacataacttgaataaaaactaaaaagccaatgttttaaataattccaggttaagtaatgaaggaaaagaactacacttacaatagccttctcggctacaagatgtcgagggaagttccttagtgccatatcaatatcaccatgctccttgtaatgttcacgcatctcccttatgtcatctctctgttcggagtattaagttatgttgaacaaaagttggcacagctatatatccaagtatgcaactgctgattggataaaataaatcaaggatatctcctttcccttggatcaagaatcaaatttacagaacttctccactctcctctaagcaaagcagctccaccaaggtgagtaggtactgaaccacttccaaaacgctaaccaacaaaaaagatgaacttgatgagcttcaaaagtaaacacgtaccagttaggttttgaagcataacgaaaaggttctggcttcatacctgcaacccatagtagttgataaatccattctttcctaagccctccacagaagcctttattatgtcttctgattctgcaacaacacccctgaagaaatgcaggaaaatatcagctctccatttgtttggttttcttgaaccaagaaaagaagaggtttggtgcatgtgaaatatagtactgtttgtagtgaagtaatatgtagctgcaaatcaggccctccatgagctctaagattagtgcaaatcattttttagagcactagagaacatttttagttttttacattaaactaaaaggagaaataaaaaacaagtacctcagagtaattgtaaatcgatttcccattagttgaccaagaacaagtccctccttcacataactagaaaggaatgcaaaaataattagtatttagaataattacattgcaatgatatcaacaaagaggataatgcattttatcacctacctaaagtttccaactttaattccaaatagtcgattattaagtgcagccaatctgttggctgatatcttgaaaacagtcacctaaccaggggaaaacaatcagaaaagtaaccattgcaagaaaacgtaattacatgcagaggatcacaaccatgaaaaaggagtgagataacataaacaaatctgtcaaatagactaaaaatcactatgcaaaatacagcaacaacaccagcctttaatctcaaccaagctgggtaggctagagatgagaacaaagccaagcaatacaaactaaaggtgaaaagactaaaaactatgaacggtactagttaaagaaaaatgatcttgtagtttcatttcacaaaactcctttgccaagacaatactacatgtagtattccaaaccagagcagcttcacttatctcatctggttgtaacatcataataccataaattatgccttaattaaaattataccagtatttcttgcatacttgtatgcgaacttttaaacaaattgtacaaaaacccgatttatgtaaagaaaattgagtgagatggtatgcacatgaggaataagtacctgttgtgttgtaacagcacgtttatcttttgtccctgcaaacccgaatgaacgtgactgcaaattgcaaaaggtatagaaatcaactaggaatgcgaaggaaggtaaaaaagaagaatcaaagcattcagtagaaacaagaacacaatgttatgagttagcaaccgaggtatacctgaagtcctaacattttcccaattactcctaacgcttcttgtgtgtccttgttctctttgcaaaggtgaaacctggtcagcacaccagaatgacaactccggttataacgctaattaacagcaaaattagacgaagcaaaaacataatatttcttatacaaatttatacacatagattagatgttttttattaagtttagccaagtaaaatacacagcaagtcagatgaacacattcgagtacaaaggccagctaaagataccaggccaatagaaactatcaattcaagctgaattccaccaccttaggaacttcccaacatgatttggccagctagttgatcctctgctatcaaatggcctgtcatctctccaatcagaaccacccatgttcttcctcttccttcccctcccaccaccacttctcccaccggcaccccgccctcccctagctcctgatcccagccgcaccctaatgcatctctgaactccatcattgtgttcgaccgtgtcggtgaccaaaaacttgaagctcctcttgaagaaattatgcacctcctacagccaaaaacacgcccaaatcacaccatttccaccaatctcaaccacataaacaaccagaaactggaactgggggatcaaaccaaccgatcgatgagccttatcggcgtccggcgagagaataaccggcgatacatcagcctcagcccccgcggacgccttctcgaggagccccttcaacgcgtcgcaatccgcatcgccacagagcgcacggaacgactcgagggcctgcgagtggtccgcgtcggcggacggcgcccgcttgtccttctcactcacatccacgcactgcgatacacggcggagctgagctagcgcgatgaaaaaaaatcggggatcccgggagggagccgcggaatcggggtcgagagggctaagcttacctcgtcggggagatcaaaggaggtgaggcgggcgacggacccgtcgcgggcgacctcgtggacgatgaagtcggagtagcggtgcttgaggacgccgcggaagcccgggagggaggaggcgaagcaggtgatccccgcctccgcctcggtgagggaggtcgagcgcgccatgggaggtggccgcgcgtgggattagggtttgcgagaagagcagagtgtggaggagacgagggttttgcgagggaatggggagaggtttaggaggggaaagctgatggcggaaagacaaggagatatttgcaggtaggtccaaataataacgcgtaatattcaaaatggtccctgagagaaagcaccgaaattagtttagccgtttagggggtggttttgatacagggtcgtaaattttggcgtgttatatcgggtagtacatagagtgtcgcatggggtgttcgggtattaataaaaaaactaattacagaatctatcaggaaaccgcgagacgaatttattaagcctaattaatccgtcattagcaaatgtttatcgtagcaccacattatctaatcatggagcaattagacttaaaagattcatctcacaaattagtcgcaatctgtgtaattagttattttttagcctatatttaatactttatgcaggtgttcaaacgttcaatgtgacggggtaacaaatttttgggtgggatttaaacatggccttagctgtttaggtcgtattcttttttttgtttacgagtaatggattacgaggagacgcttccaagtttttaaacgctataattttttttaaaaaaatcttcatcaacatatattagaacttcatttttaaaatacaactttcaaccctgtaatatttaattcatcggttcatgttcttgaataattgtcatacacttaatccatcatccgagcagacaaagaacaggccctaaccttttctagagtaacttagttggagaagaatgtaatgttcatgatcaaatcatgaacggctgctaaaagatcaaacagctagattagcaatgtaacacgcgatgatgtcgtgctttaatgggcactcatcactaatcagaagctgaaaaggaatgcccaaaaagagaatgtccaagagttttatctttgccgaaagacgaatacaaatctttttaccactgccgcctcatgtcagctgacaaaataacatatcgtcattatcaatgtaccatttctctgatggtgcaaaaggagagaaaaaagatgcgggcagaggtaaacaaaacaagatcaaaatacaaacaacacatcgccttgctttgttccagtttccacaccatataatcatagtgtggcccaacttatttgtgtgcctgtaattcaaagcaaacctagcaagcatctagatccctgcacggaggaggtttcggctcaccgtgcaaggtggtattccctccagcagggccacagtttttccgctctgggtgttgtgtgccgcgctgcaaaaatcatcacaatcatcaaaatcagttcgcaacctaaaccaatggtggggcttgatatctataacatcaaactgagtaaaacttgtcgctagaaatatcaaaagaattatttcgttcaagagcaaagcttacaggaggggtttctccttttttcagcatctcgacgatctcaacaactcgtttaggagtgaggtcctcctgaaaaggggaaatggaaatgctcagttacagtacacaaataagtcttttcttcctctctcagcaaaaggcaggcaggttttgttaagttttatccactcgtcttttgttactctgttggcattagtgctttcagtgccacagtactgctatagcatggaagtttagcaaaaaaatgtagctatgttagcattatttctccaaagacgcctgctaagaagtatagaaacccaggggcccagcatcctataacatgcaagtttatattcttcagttgacaatgtttcattttgtgcataaacatgaactaacacgagtgggcaccagctgctaattcttactaatgctgtgatgtttctactaaaatttccaccgcgtgtactagcataagtcatcaacaatagataatcggatgcatcaatgtgtatacttacataatagttgtatgtgtaaccctctgaacctttagaataatcggccacagcaatcatgggagcattcacacagcagccctgtgaacatataacagaaagctgaataaaaagttgccttgtacttatgttttttcattagagtactgaatcattcactgacaaaatcctacagaccattcctattggctatagttaaacacttaactcaactagaacacctatttgcaagcatccaaaatgacagaaaattatagatctcgaagttaccatgcactccatttctccaacagaaaataaaccatcactggtcacctctgcaaatgaaagaaaaatgttaatgctatcacagagatagcaagagaaacacatgctcgaagaccgtttgtggtaacaaatcaggaagtgttattcttagttgataggataagttatgtgaataatacaaaccattccgtttaactccaagatgttctaacaaggcttcttcaatttcacgtgaaccacgaatcatgcaaggtgtggttccacacaccaaaaggtgatatttacccacctacatggcaaaatagggtgaaaagatgctagtggagggattaacaagtacaaaatactaagtcatgcaaagataccttagtccggttaaacattgtgtaaaatgtagcaacttcatatactctgattggtgcaacttcaacgatcttagcaatctgaaagtccaagacatgaaaatagtattgtcagaaatgctttttgtgagcacagtggtggtggaatggtggttgggtctatgtacaaaatatctaaaatgtaacataagctataacactcccagtagcaatgttattgtaatagtcctagtcctgaggagattaactcaattgtaattataattatataaatatgtcaactgatatgctgacaagaactttttcttttgtgattgccaacccccattctccaatgcctcttactattaaggctcctaatttcctagtgtcacccatcttcagtaggacgaagaagtgaacagaaacaaggccagtgcaataaggttttgatttatgaatgtctgctaagcaagtccaatataactatagctaacgtgggttgtaacaactaacaaatgttgaggtacatcactttctgaaaattgaagtattgaaaacaggatatagcacattaaaggcggaaaacagttgatcatcgaaagctcataaaaaagggacttacagcattcattgctgcaactggcacccatccaccatgctgctgctgggcaagatcaagcattggaataataccagactgcttgtagttgcttggatagtgagacaatatctcattaacctgaattagttattgaaatagagattttaggccagataaccaaaatagctgatacaattgatataaaccgtattcacaaaacctaaatcccatgtcaaaggaatagaacactataccccacgtctctattacatttggacatttgcagatttgcacatttctaaaggttttacatgacagataacgtttccccttctcaaataaccagcaaccagttccaacgtaagattatattattatctaatagtcctgaataaaatggtaccctaacagccatttctgaacatccgaaaacaaaactgaacaaattctgccacaactactccaaaaccagccactgttccaatccaaaacataaatcacagggaaatgaatgaacgagacgaacaacagcaccttcttcatgttggcctccgtgaactcccacggcatgtcggggttgttttccggcgaatcgaggtgctgcacaacaagcaaacccacaaatccgactcattatcatcctcagacaaaacagacagatcagggaagagggtagggggtggatccgagggaagggggaggcgcctcacgtacgtagttaagcgccgtggagaacagcctggaggagcagcccgcggcggcgtaggagatctgcaacgagacgttgcccccggagggagagatcaggacggcaaagctccgccgacgaacagcgaggagatacagaggcatttggaggagggggaggggggcactgaccggagaacgggacaagcgtcgcgccgcggccgattccgaggcggaggaggtcgcgagccctaagaggcggcgggccgcgaggcgggcggccggcggcagcatggttggcccgcggtgggggaggcgactcgactcaggcgaagaggggggaggggagcgaagttgtggccgctcgcggaggtaagtagctcggcgtgacgtcagcagcaccggcccagtgggctctcatgggcttattgacccaatcggcccaatagtaataattccttcgtgtactggcaattataacgatctttttttttttggttgggcaattataacgatctactgtccggatttcgtaccaataggattctgatatatcatacttcatactggattgtttattttagtacggaggaaatataccggtagatcaccaatcttcaagcaaaatgaatcgtcctatatattataggccgagtttagttccaaactttcaacttttccatcacatcaaaactttcctacacacaaactttcaacttttccgtcacattattccaattttgtggagattatggataccccataccaacacggcatttataatccgactgggtatggggtgccatgtatagatagaatatctttaaagggacttgggttaaattccaaacttgtatgttaaggaaatacccgggatcttagtcggttaagattgaatcttatctgtaactacctattccgttagggatatggactgtattttataatacggaccccttcccctatataaggaggggtccaggtgcctcttagggcacgatctgctcccagatcatacgatcaataatacactcggcaaatcaatccccggacaggagtagggtattacttcttgttaagaaggcctgaaccagtataaaattctttgtttctcaacccatccacttttccagcttgatagccacccccttttagtattgccaaaatcttgtttcgacaattggcgcgccagataggggtagcgtcaagttcttcgccgattagtgcgatgggtttcgtctccggcatcgacgacttcgtcttccctcccgggcaggcgttccggttcggcagcctcaacttcttcaccaacgacttcggcaagatttctcttcttgactcggattcgaaccagtcgggaagagaccaggtttccgccccgttcgtaccccaaacttggccgagatctaccccaagatcatctcaaccgagttggccccaaaccactcggacgagatccaatctactccaacacgacccgatgaagacaatagagcctatccgccaatcctgatgaaactcctcaacgatttggctgtcgttttcaccacaagagcgtcatctccccgtaggtctaggcgggatccgccctggccccgatccagtctagctctagggaagtcggtgtcatactccagcctctcggcacggtttcgacgaaacagttggacggctacctcagctcccccggtgtcgactcacgaccaacggagatcgtagagtacgacgacttcggctaccgctacgactaccgcaacctcgacgacttcgacgaaggctatgaagataactacacgccccctctacttcggcattttcatggccgacaacgagacggaaaaacagcgtcaagcccgagaagaagaagaacaacgcgtgcgacaggaagccaaacgtcgccgactggaggaggagcgccaagcacaagagcgagaacggctgcagcgtgagcaacaggagcgcgagcgagctgcaaaggaggcttggaggccgggcgacgagcacgagaactcatcgggcaacaagatgtcgaggggacggcggtttttcgcaccccccaacagaacgtggttgcagcgatcaccctcctcgacaccctcctcaaggaagacgcactcaatcaggccaatcacgtcgtcaacatcttgaaccagaccaagaccatgatcgcagcttcggtcccggttaactccgcgagtgtccgcacgccaactggcagccgagttccgcctcttcaatctcaagactatcaccaaccgagcctcagcgtcgtcggcgccggaaccagtcgtaggagcagggatcacgacgagcaatccgttcactcgcctcctgaccgacacagggagcgtcgagctgaatgtccccgctccccacatcgcaggcgtcccatcgatcttcgcgaaactatcaatcagcgccgtgcggcaagaggctacatcccccaccattcaccagatcgttacgacgacgacgtggatggagttgctgccttcacaagcgacctgcgtcgagtggattggccagccggcttcaagccgactggaatcgagaagtatgacggcaccactaaccctgagacttggctcaccgtctacagtctcgcaattcgcgcagcaggaggagacatcaaagctatggcaaactatctgcccgtggccctagcggattctgcccggtcctggcttcacgggctaccccgtggcacgatcggatcttgggcggaacttcgcgaccacttcattgccaattttcaaggcacctttgaacgccctggcacccagttcgatctttacaacattgtccagaagtccggagaatcccttcgagattacatccgacgtttttccgagcaacgcaacaagatctccgatatcaccgacgacgtcatcatcgccgccttcaccaagggcattcaccatgatctcttagttggcaagtttggacgcaagcctcccaggacagtcaagcagatgttcgagaaagccaatgagtacgcaaaagccgaagatgccgtcaccgcatctaagcagtcgggcaccacttggaagccgaagaaagatacgccgaccacaggagggagtggaagtaccaatcacaaggatcgcaagcgtaagcccgaggaacttgtggcaaccactacaccatcctcccgacaatgttcgcgcgtcaacactttcga

SEQ ID NO: 5925 - DNA, 5074 bp, Oryza sativa
ggggtgttgtagaattcgagctcggtacccttaacccgtccaacaccgtggtgtttgcgacggccaaggcctgcagaaggggctctgcgctcagtggggcaacggaaggcgtggggaagagccgcctcggtgaaaatgccgggcggctcggcccgccgatggacgtgccggactcggggatgtcccccggacctggttggtcctgagcgtcgcctgagggagtgggcccaagcgatgcgcccgcggcctcgtcgcgagctgcctcggaagtcgtcgccgcctcggcctggcggagtctggcctcctcctaagcggcttcttcagcttggtgagctcggacggccgcctgggcagcttcctcggcttcccgaaggcgatccgcggcctcttgccggtcagtttcacgggtcgcctcggaggatgtcgtcgcctcggcctggcggagtccggcctcctcccgagcggcttcctcggcctagcgagcccgggcggcctcccgagcggcctcctcggcttcccgtaggcgatccgcggcttctcgccggtcagaatcccgcctccgagcctctgcggccgccggatcctcggcctcagactggccggacttggaatggcgggagggacgcgacgggatctcgctgaaacagaagaaagaccagaagacgaacaagatgggtgagtgaaaactcgcgttgagagaaggaatacagccacgatgggcgtgggacgaacctgcgagggggtcggttaaacgaccaccttggaggggaaataaggtttccccgggatggttctgtcccccccatcttgcggagccgcttcttctttcgctccccctcgggctgcgacgtcggcgtggccccctccgggcgcctgctgctggcacgcgccgccccgccccctcggggaggagatgggggaggggttcctccctgcttcctcttcccccgggcgtcggcagggcggctgctccccgggcccccgtcgcggggcccaaaagcacgaccccctcccggggtagattgttcccccctgcggctcctgcccgcgccatcgtggcctcgaggagcccgctcctccgacgccccgaccgcctgcatgatggtcaggatggaagcgcggtctggatcgctgcagagggggaggactccttggggaatgagggatgcctccacggagctgagattcagcacccgttggaccactatcttgaagtcctcaggagcccagtcccatctgactccctggtgggtcctcatgtagtcttcggacccggtgtactcccaggcgccccgggcgcgccgctggagcggcgcaatacggcgacgaaggtagtcgccgtacaccatggcccctgtgagcccctgggatcgcaggcccgccaggcggtcaagaacggcatcatagccatctcccagatctaccggcgaccggccagatgaaggcttgcgccgggggatggctaggaagtcgtaggcgcgctttgtcggcgagggaagtgtagaaccagtggcttttccagtcatcccacttcttcgggaggacgcaggggatgtagcggttcagcaccggcccccgcggctggaagtagcagccaccaaccaccgacggcggttacaccgactgtacggtgaagaaccaccggaacagcagaagggatgggcgcactccgatgaacatctcgcacaggtgcgcgaagatggccaatgtcattaccgcgttgggggtgagatgcgccatctggagatcgtaaaactccagaacatccatgaagaaagaagaaaatggcggaaccagccctgccattgcaaaagggaggaagaagacggaccgccccgggtagcatggcgccgggcgtccctcgcccagcgtgactatctcccggccggtggcaggttccggcatgaagcggcgcggcagcccggcctgcctctcgctcacgatgcgggaaggcggcagcacgctaccatcgagcagagcggagccccgtgccatgacgccggaagaagaaatgtttgagagcgagcgcgtgtggcgaaggtagggcacaggaaagaaggagttagggcgcaagcggcgaagacaaggggaataatggcgaaaggaaggaagcaaatctcttcctcggtatctttatacccttgccaacgctgtgcccggctcctcgcttctcgcgcccactatttcgctccctcgtttctcgcgcccacgcttccactaatcccatacgcccgcttgcggcgcatgaggtggatatgcggctgaggcagtcgagatggaacatatcgtgcgtgcgttaattacgctcgccgaccgaagcgccatcaccatatctccaggcaaaacgaaccggctcatcccgattcatgtgctactcgagtaatgtggcagccttgaagaggccgctcattattgacagtcgagttaccgttgccggagtgcgtgatttgcgaccgttgggtttctgcccaactgtggagaccggtcccacctgtcaccaggctttgggaagtggcgtcacgcccgaccgcttctctcgaggagggcgatcgccctggcataacgccgggggctactgtcggtgacatgggaccgggagtatcatgactaggggcttgggcaggagcaatcacccacgaggcctgaccccctcgggggagtcgggcccgagggtgacgtggccgccccccctcttcgtctccccgaggggtcggaccactcccgcttcggccccgagggctgaggcgccccgaccccttgtgggtttggcgccgcgtgtatgggttgggtgagcacaacggggctcacctaaccgcatttattgcggtttagacgagcgcgtcacgccgcatgtaacgcagtgcagcgcgctcgtttatccggtctgtgaccagtcacagaccgatcggatcgtgggttaggtggcgacaggcggtctaacacacgcctcgccccatcccgtcaggatgagagcctccaagcactcgtccctagccggagccggcgtgttacctcctggagatggcacgttggtcccggtcagatatatgccaggcttcatcctaaccattacaagcaagacattgtatgaagaagggcgaatatgcagattgctaaactgacacgtggtggacaagaatgaccgatttgtgaccggtctgacactggtcatgtcgacggcagacagccatgttcccacgtcgcgcctgcttccggcggaagtggaggtaggtatgggccgtcccatcagaaggtcattcggacggcagccatacaaatctccgtccatttatgaagagaagtcaagccaagtttgggggaagagagaataagtccccacacaaaaaagaagagatggtgcatgtggtatccccttgagatataaaaggaggaccttgcccacttagaaaggggattcggatccagaacgatcaaggctggattgagaaccagaggagagggtttctagagtaaaagctctctgaccctccagctctttgtagtttttcatacacagatccaccagaacacaggagtagggtattacgcttctcagcggcccgaacctgtatacatcgcccgtgtcttgtgtgcttcttccattttcgcgaaccttccacagaccaagagcttagaatctcacccagggtccccggccgaaccggcaaaggggggcctgcgcggtctcccggtgaggagccccacgctccgtcagtaccctattgcataactcatttcctgctaaactgagagtataatgtacactaaaatgccacattttcattgaacccagtacatccatccattcactgcaacttgcccattccaattgaacagaacctactcacttcaactgcaaataaccatccaatattccaaacaaatttccattccagattcgacaacaacaagatgacagcaccacaaatgacaaatgacagcatcaccaatttcaattccaacccgatacagatgacagcatgacaacaacaagataagataacattcatttcctacccatcaacatggtaaaaacaacaacaacaagacctagaactaccaacaacatcacaaatatctctaactccaacctattattcctatccttcatcatccctacaatagcttccttctcaccaacagcattccttgatgtggccaattcctttctagctaaatccagctctgattccacagatcttccttcttgaacagcagccaatagctatgccttctccctcctgagcttccacacttcgtcccacaaatcgtttagcacttctctcaagaagctgctagtcggaccatcaacccaagcaaaaaaatcgcaacctccactctgcaacagtaaataaatgaaaccctagaactcagccaaaaaaattgaaaaccatatcaaaactcacccttgcgtctgcacatttgaagtagcggcggccgggattgtccgggctccacaaaatccacctcgccgccttgctaccgcacctgcatgccaccgccggctgatactccagaggcccaacccgatacgggatgggggatggagatgtgcgcctagaggacgccgacgagccctcactcctcgagcttgccattcgtcgacactcgtcgctgtcgccgcttcgccgccgtaaccctcaccgtcgtatccctctccgccgccgcttgtagtagggatggggaacgagcgagagagtagataggcgagagagcacgcgctatttattcccaactaccaccgacacgtcagcgatgttgaccgggtccaactgccacgtcagcgaaaaccgctcgcaaaactgccatgggagtcgggttgcccaggatttcaaagtttaggggtcaagatatctggttttgcggtttagggtcatgaattagattccgatcacttttgagggtcatgaagtgaacttattcaaactggtcatcccccgcccaggcaggccgcgtccgtgacgtaccactcttggcgcctgcgctcacgcaggccgacgcggcagtcgttctccatgtatggagtacgggaccctcatcccgctaggccggcggatgcggccgcctcctcgtc

SEQ ID NO: 5926 - DNA, 4194 bp, Oryza sativa
ccactctggcgccccaaaaagaactatttctgggataagttttttcagaggtctatttgcgaaataagttttttaaaaggacaaaaatgtgaaaaatccagatgtttattactactccgtattacggatatctgagatcttaattttatagggtgtttgccagttatagtaggtactttattgttcaaatctatcgatcacaatcaaaggtacttaagaattgacagaggtacttaaatgaaggaagggtaaaaacttttgcatgcatgctaacataagcaataaattaaatacagaacagaaaaatatctttgcaatatgaatatataggtacttgtcggtgacatgggaccgggagtatcatgacttagagacttgaggcagacacgatcacccacgtggcctaaccccctcggggggggggggggggtcgggcccgagggtgatacggccgcccttctctttgtctccccgaggggtcggaccgctcccgtctcggccccgagggccgaggcgccccgaccccttatgggttttgcgccgcgtatatggggtaggttagcatagcggggctcacctaaccacatttattgcggtttggacgagcgcgtcacgccgcatgtaacgcagtgcagcgcgctcgtttatccggtcagtgaccagtcacagaccgatcagatcgtgggttaggtggcgacaggcggtctggcgcacgcctcgccccatcccgtcaggacgagagcctccaagcactcgtccctagccggagcaggcgtgttagctcctggagatggcacgttggttccagtcagatgtatgtcaggcttcatcctaaccattacaggcaagatattgtatgaagaagggcgaacatgcagattgttaaactgacacgtggtggacaagaatgaccgatttgtgaccggtctgacaatggtcatgtcgtcagcagatagccatgttcccacgtcgcgcctgcttccggcggaagtggaggtaggtatgggtcgtcccatcagaaggtcattgggacggcagccatacaaatctctgtccattaatgaagagaagtcaagttggagggaagagaggatgagtccccacacaaaagaaagagagggagagatggtgcatgtggtatccccttgagatataaaaggaggaccttgcccacttagagagaagaaaaaaaggaaacgatcccagaacgatcgggggctggctcgcactttgtagcttcttcatacacagatccaccaaaacacaggagtagggtattacgcttctcagcggcccgaacctgtatacatcgcccgtgtcttgtgtgtttccactctcgcgaactttccacagaccaagagcttagaacctcacccagggcccccggccgaaccggcaaagggaggcctgcgcggtctcccggtgaggagccccaagctccgtcatctggcgcgccaggtagggggctctgcgagtgtttttctaagctctcgcactctttcgtgtgcgccaagcttttcctgttcagcccaatggctgaacaagcaaaggtgcacaacctctctccgagtgttagcggtgacgacggggagccaaacccacgccgtcgagctcgtactccaccgccccctccacaccaaagtcctaggagggaggaggtgctcgagaggatcgaaggatccgcgacttcgacatccacgggtgatggagaagggcgccgagatggggagcgtcgcctcctcgtctacggcgacggcagcacgccccagggcgcgctccaagctgcgggcgcgctcctgcgtcacccgcctgtcgtccctgacccggagtctccagcccaacgttggctggacgacgtggccaacttggtcatgacggcacggcagcgcctaggtgctggtgggcggtcctccgccaccaagacctctggcgctgctaccaccggctccgtgtcgtcaaggcggagggcgcggcgagcggcggctgttgctcgccattcggccgccactccttcgtcagcgcctccgacccaggaagatctgcgtggggggccggatgcccgcatcagtatcgagcgccggcgtaatggccgacgtgctgcccacgcaacggagggcgcctcctcgtccggagtgtcacatcaacacggacgcggggatcagccctccgtgcccccggttggtggtgtcggctgtagagcctttgtggcgagccttcggaacgtccgttggcccccaaggttctggcccaccatcgccgaaaaatatgacgggagcgtcaaccccgccgagtttctccaggtctacacgaccgggatcgaggccgccgggggtgacgacagggtcatggcgaatttctttcccatggccctgaagggacaggcacggggttggctaatgaacttgccacccgcgtccgtccactcttgggaggatttgtgccaacagttcaccatgaactttcaaggcatatatccgcgcccaggtgaagaagcggacttacatgcagtccagcgaagggatgatgagtcacttcgctcatacattcagcggttctgtcaagtccgcaacaccataccatgcatccctgcacacgcggtgatctacgcgttcagggggggtgtgcggcacaactgcatgctcgaaaagatcgcctccaaagagccccagactaccgcggagctttttcagctcgcggaccgagtggctcgtaaggaggaggcatggacctggaacccctccggttccggtgtggcagcttcggccgcccccggatccgctgctcagacagggcggcgtgacaggaggaggaagaagaggtcagcccataccgacgacgagggtcatgtcctcgccgtcgagggcgcttcgcgggccacccgaaaggggaggcctgcgggcgacaaaaagaaggaggccggcgctctgggagcgcccaaccggcaagtggtgcatcgtccacaacacttcccttcacgacctcgcggactgccgcgcagtcaaaagtttggctgagcggacgaggaaatgggaggaggagaggaggcaggagcgccgagagggcaagtccccggcggttccttccggcaatcggcgaagtgaggccaaacagaaggcccccgccgaggacatcgatgacggcgatgatgacctaggtttccaagagcctggggccaccattgccactgtcgatgggggagcgtgtgctcacgtttctcgccggagcctcaaggccatgaagcgagagcttctggccgcggcccctactcatgaggcgacgcgccgggcgcggtggtcggaggttgccctcaccttcgaccagaccgaccacccaccgtgcgttgcccggggaggacagatcgcaatggaggtttcccccactttttgcaacgtgaagctggggcgtgtcctcattgatgggggagcagccctcaacatcctttcccccgcagcctttgacgctatcaaggccccggggatggtgctccggccgtcccagccgattatcggtgtgacgccggatcacacttggccgctaggtcatatcgacctcccggtcaccttcggtggatccgccaacttccgcacggagcgggtgaactttgatgtggcggacctcagtctgccctacaacgcggtcctagggaggcccgcgttggtgaagttcatggcggcagtccactacgcctacctccagatgaagatgccgggccccggtggccccatctctgtccatggcgacctcaaagtcgcgcttgcttgtatggagcagcgcgcggaccacctcaccgccgcgtccaagcccgagggaggcgacgagaggcttggcacctccgcccccgccgccccgaggcagcggatagtcacatgcgacgaggtcccggtcaaggaggttgccctgggcgacggcccgtccaagaccacacggatcggtggtcttctggacggcaaataggaagacgcgctcgtctctttcctgcgggcaaacgctgacgtcttcgcatggagaccggcggatatgcccggggtccccagggaggtgattgagcaccgtctcgccgtgcggtcgggcgcaaggccggtccggcagaaagtacggcggtaggccccggaacgtcaagccttcatccgcgaggaggtggcgcgacttctggaggccggattcatccgcgaggtcatccatccggagtggctg

SEQ ID NO: 5927 - DNA, 3059 bp, Oryza sativa
attggtaactctataaaaaaaattaattatcatgacataatagacattaactctgaacatattaaattatcatgacatccccacgatgtgcaacagaatttaacttgatataaaaaaaagtgatgttacattgttttctaatttgcattcagtaatgcctatgatattttacaaatgtaactgacttgtccttcagatgcttctcatgttctacattggatgcatccagtttttattgcagctcactttgaatcttctacctaatgcttctaatatttatgcccttttttatttaatatgtgatgattaggtaatgcttagactagcatataaaagattggcttgattagggttctaaaattgaagttttctttgaaacgactaatgttattatttgctcttgccatagaagtggtttttcaggactcttgataatataactattggtttgggatgataaagcttcagtttaggacgatgagtgctgccctgtaggttaaaatcccattttaactaagttatgtattatttgactagcttgcactttcaccctcttcctttaaacatactgatagtatctgctcataaaattattgtgcttgctatgatttaggtattaaaatcacataccttttataatctatgtaaaagatgtacaaccagaaaccaataggttaacttgacagaattgacctttacaatcctacaataccgtccattccaactttctttgctaaataaatatgctgctgtgtgcattatttggttcacatacctgattattagaaaattactgaaaacagtttggattgtttacctgtttgtttttttagtatggataaatcattactttgcttttggttggtacctttttgtgccccccccccccctgctatttgagatgtttaattaatttcctcatattgggctaaatttgtacctgctggtggtccttcagttaattcattcacagattacttgacatcggcaattgcttctttgattcttacaatctgaatatataccaaaaaacaactatgttaacttgcttttttcacattcagaaaaagaacattactaggaaacaaggatgcttaattgttctaatattgttgagtagttcaatgccataagattattgactgccagtattgataaaaaaaattgtatttttgcatcacttctcaggcagctatgtacacgggggaagcaattcatcatagcaaaacatattgcacttccatttgcacatcaacaaaagggcccctgtgtgaattcggtgaaggcatccaaaccatattagtagaatttagccatgtgtaatatagttttatagtcctatactcctatgtgctcatctagcagaactgtttcaatgctaccactataaaactactatgtactgtctatcctgccatcaaacatgtggcacattttgctatttaggactgtccacaatctgcatatatgttgtgattagcttttagcctctataacaactttcaatataaatgctcacgtcacaaaacttcattttttgcactacactaaacctaaatctcacaccatgtcgttagcctatacttgaccttcacagaccttgcaaatagcatttgtttcagttacctaccagaaccaacagatgtaatcaatgattttcctctcctggcaccactggtgcaacgcgcgaagcgcgcgttcacctctagttgtctttatagtactaccatattggcattagcaccatatgctacacaaaagtatacttgtggctaacttgtagccggtcggattaagcgaaacgccacgcagcgatggcgatgatacaaatcaggacagcgacgaagggagtggcaaaggcttggaggatgttgaagctggagcgaagttgttgaagctgggcctccaattcctcgttgcggttagctaggttagcgaaatgcgtcacggtacctgcaacggactggacgcgggatatttaagtaatgtgcatgtatggagcaaacgccaatgaggaaatagtttagttatagattgtaatgaagtaatgccaagaaactaaaaagatcataaaacatcgtactgttcaattcctagatgcaattgaaattgaaaagtgaacagtacatgcaagaaaagaacaggataacaaacacatcaaaggtaggctatctatatatgaagaagggaaattaattcatatcttgcaacaattccaatggtatgtatcacctcaacttgaatttcatccctttccattgaaatatatgattgtaacaattgtaatttattttgatctttgcatggacagattctttctattcagaaattaacatttcaactttcagaaattgttttagcatcgtaacacatacttatataacatcgatctactcatggtaaacatgagttgttaagcccctcgacgaatcactagaacttgttaagtatacagtggcgagctgcactgtagtttaggcctaagcccatttaccttcccttcttcagcaacaagtaagaaacacacaccacttcactttacccatcagatccagagttccagacgcgtcccacccgtatcacctcatctccgccgctagcgccgttgttctgagtcgcaacgctaccgcgtcgtccccttggcttccctccacctcttggtccatctgccatggccaatttcgtcggagcgggcagcttgaaccacccaccaccccagcgcaaagggaaaggtgctctccagagcaccgaccaggtgttgccgttctccacatcacgcaacaacggcaaggagggaaaagctcgcaagagagtggaggaggtatattcagaaattagcatttaaactttcaaacatccctacacccatgcagaagcatcccaaaccagtttccaagcagaagcacatttaacaaaataggttcgtagttccacgacaactaagtgcacatagtgaaccgtgattccttcactatctcaacatatgcctcccattcggtctctccattcaactgggtaccgagctcgaattcgccctatagtaatcgtagcatcactcg

SEQ ID NO: 5928 - DNA, 2319 bp, Oryza sativa
tatctgaggacgtctccgctcggcgaggtcaacgtgaccccagcaccggcgccctgaagagacagggagccgtcaaactgcatcacccaataggcggtgtgaggcaattgcgaggggtcggagctggcctcggggactgagacgggctcgggagctggggtccactctgccacaaaatcggcgagggcctggctcttgatagcgtggcgtggttcaaagtgcaaatcaaactcagaaagttcgattgcccattttaccacccgtccagtaccctctcgattatgcaagatttggctgagggggtaagacgtaaccaccgtgacccgatgcgcttggaaataatggcgcagtttcctcgaagccatcaggatagcgtaaagcatcttctgggtctgagggtatcgggtcttggcgtcccggagggcctcactaacaaagtagacgggccgctgcacctttcggtggggccgatcctcttcgctaggggccgcatccttggggcgctcttcgtccaagcggcctcgcggggcgcactcgtcttctgtgccgacgacctcggggtcggaggacgacaggggcggccttcccacagtggcctcggggccgtcctgggggtcgggggctcctggcgtcgtcggacaagcgggcaaagggccaactccggtcctcaggggccttaggccaccgttcggctcgggggcctcttctccctgctctctcccgggtcgagtcggcacagggttaggctcggggtcagagggcgataggtgcggccttcccgcagtggccgccgggccatcctgggggtcgggggcacctggcaccgtctgacaagcgggcagagagccagctccggtcgtcgggggccttgggccaccgttcggctcggtggcctctcctccctgctctctcccgggccaagctagcacagggtggggatgcgcggaatgaggattgtcctcatcgcgctccacaaccaacgccgcactaaccacttgcggggtcgccgctaagtagagtagcaagggttcatttggctccggggcgaccagaactgggggagagctgagatacgccttcaactgagtgagggcacgttcagcttcctccgtccaagtaaacggcccggagcgtttgaggagcttgaataagggtagcgccttctctcccagcctcgatatgaaccgacttagggcagccatgcaaccggtgacgcattgcacatccctaagtttgttgggggggcgcatccgctctatagctcgtatcttctcggggttggcctcgatgcctcgggcagagaccaagaacccgagaagcttgctcgcaggtacaccgaacacgcacttatcggggttcagttttatgcgggcggagcggagactctcaaaagtttccgcaagatccgagagtaaggtctcttggttgcgcgtctttacaaccaagtcatcgacataagcctcaacgttacgtcctatttggctacccaaagaaattcaagtagtacgttgaaaagtaggacctgcattctttaacccgaagggcattgtcgtataacaataagttcctatgggggtaatgaatgcagttttttcctcatcctccctagccatgcgaatctgatggtaaccagagtatgcatctagaaaacacaaaaggtcgcaccccgcggtggagtcgacaatctgatctatgcgaggcagggggtaagggtccttaggacatgccttgttaaggtcggtgtagtcgatgcacatccgaagcttgccgttcgccttgggaacgaccaccgggttcgccagccactccggatggatgacctcgcggatgaatccggcctccagaggtcgcgccacctcctcgcggatgaaggcttgacgttccggggcctgccgccgcactttctgccggaccggccttgcgcccggccgcacggcgagacggtgctcaatcacctccctggggaccccgggcatatccgccggtctccatgcgaagacgtcagcgtttgcccgcaggaaggagacgagcgcgtcttcctatttgccgtccagaagaccaccgatccgtatggtcttggacgggccgtcgcccagggcaacctccttgaccgggacctcgtcgcatgtgatcatccgctgcctcggggcggcggggacggaggtgccaagcctctcgtcgccaccctcgggcttggacgcggcggaaaagtggtccgcgcgctgctccatacaagcgagcgcgactttgaggtcgccatggacagagatggggccaccggggcccggcatcttcatctggaggtaggcatagtggacc

SEQ ID NO: 5929 - DNA, 3831 bp, Oryza sativa
ggagttaccccgagaaaattgttcaaacttcaaacgttatttattcttgctataaaatattactaccacaaagtttctagtggaatggcagatcaacataccatcgcgtcgaagacaaatctctggtatatttttcacttgatcattaatgctgtcattgtatactctggtttcaatatcaccctcaacataaactgcagaactgaaataaggcaagaacaaagacagcaccaaccacagtaaaaaagaatttcaagccatagaactaggaaatggtatatagttgtatacttgtatggagaaaagaaaaagggtgatcttctcactgaaaccacgtacttcttcaccagcttctggacagcaaaagcacctagctggtcattatgaatggctatccgatgccactgagctggctttggcagatctgcatcccctactaccctctggtcaaacatgccaccagttccaactgtaaaaacagtcactgtacgaccattccttaaaattttctgcacaggaacctgtccgacttttccgcatattatagcctagaaagttgaaacaatcaattaataccaagttaagcttgaaaaccaaaacatgaagtatccttttcatattatacttaaataccctgtgaacaccacggaatccccagcccttcttggggtctacgctttggggttctaactctcgtcttgaatctgtataatcatcatcacctcccatttcactcttctcatcaatatcagaaaaggaaacagtagaactccaagcttgagattttctgtagaaatctacacagacaaatatttaatcaaaacttactcagtaaaaactgagtagaaatcttgaaacaaccatgaaaaacaacccaccaattggttttctctgctgttctaagaccctcctcaagcccttcagtaatccattgctgagagaattcatggtaaatctacgcacattgaggaaaaacgttaaataataaaatcataaaaataatcatcagaacatatatttttttcctattcctttaatggatttcaaaacaacataaacatcacagtcgtcaacttcattcaacattttcctggtagcagttctattctcaaaagcatttgttcagtgtgaccttctacaaggaaaaaactacatgaggaaataaggtgcatcaggatggcctatcacgtgggagacacttattctttatgatgaggcatcccaggtttgtctcaacagtgcagaggagttccatgacagttctgcttattctttcctgcacaaaaacaacttatggtcttattcagctacagcagctccattccgttggaacctcagggacgacatccggccaagacaaggaagctgctctacctgcctaagcggctgatccgcctagctaagctgcagcggcattctaggatcgtagtatccaataaccaccctcttcaggaggctgaattaacaccacctaaaatctaaataggcaatcacagaaaaattaacagcctactggactaaactttgcatggataaaatatgcaaacggtccaagatattctaccgagacattttaacaaacaccttgcaagcatcgcacactggccattcaggggcttcacgcgacgtcgacaacagttgcataccccatagaacagtggcagacccagcccaaaatggaaaactgcagccatggcagagttggaacagtagaacgagctcgggaaaaggacgtaccttcagccccgcgccggaggccttcgcgcgtcgccgagtcgcgggagggataagacggcgggacgacgacgacgggcgcagaccgagcgagcggggaggctatccgtacggatcgagggaggatgggaggaggcggctggcggcgttgggtggtgtccggtggagtcggccgcggcggcgctcgtgcctgggtggagcggaggagcttcgtagcgagatcaaaaggttgagttattgtgaaaactttgggccgggcctggatatttctgcttctcctggcgtaacgggccgaacctgcaccaaagttagtgggttgctgctatccttgagagtcgagacttctgcttctcatcatggttctgggttgaaacttcaaacttgagaaccccctcctcttgtcttgaaataggaaaaaaaatgataaatgcaaaaggtgaattaggtggtgtttgaatcttctgaagatgaagataaagatcgagtgttttacgtaaaacgatgtgataataacgtgtgattaattgaatcttaattattacaaacttgaaaaaatggattaatcttgttgaaagttttcatacaaaatacacagtttaacagttttaaaagattgccacaagtatccaaaatttgatccaactcttgttgagtaacgaaagtaacaaatctgacactgagttagagatggaaaacgttagggtgccaatccaaagagtggtgcattgatcaattcactctagtaaatcaatcttttacggttggtgttaagccaaagcaccatttcattaccaccgggaattagtagtctcatgctcgcgttggcaactcagtaacgaaagcgcatatagcctagtggttacagtgacctaagtagtacccaaaggtcctaagttcaaatctcctatggagcgaattttagattgggttgtttgcggggctaaattccctatctcaatggccgtatatatccggttggatatggaaaccgggtagaaaatacccttctctaaaaaaaaattattcttccctgataagagaggctaacaccttgtcacgcgttggtaacattgcttaattaataaaactatatgattcaattgataaagaaatacggaaacacggggtataagaatatgaagacataatattcttggtaataaaaaaaacatcttcaaagaatcagataaatcctgcatttcaaatgatgaaatgagacataaaaacagcatataaacaacgaaaattatgaataggactatgctctacgctgcgactcccaccaggcacattattttacctgaacatagattccagatttttcttttctattcttttctctaataaatgtatcaaactatccttacaactattcgcctatgcctcttagcatttagcagcagaacgaatgttactgaaatatgagatgtctgcacaactcaatgttcgtgacttcagagtcaacaggttgagtatgttggttatccgaaagcagttaaatgaactagcatattcaagaagcatcagtgtcccctgtagatttcttgtactcaggcttgagctcatgcgttccctggtttggtcctcgtttgttgtaaaaacacagatcattcagaatctccttcaggaattgctgcataaaacgaagcacaaacaatcacaaagcaaccattgagagtaatgaataaaatatttgttgttcataggaacaccacaaataaagtatcttaaccaatgtttttttcacttaaaaatagagacgccaaataaatcaagaatatacctctggctggtcagtttcttgcaccagcgcctttagtgcccaattgggctgtctttcaaaaagcttgaatataatattttccagttccctgcgatccctacgtattctttttgcatcagatggtttggttggtgtttgcttcttcttctcctgaagagcacaaaattaaatgtgttatgagaaactttaactgatgatgagtagttcaagatgaagaggccgaccacatgattggcatttggcaacatggtaaagataaaaaaaaaagtagaggaaatcaagtactgaactcattttataagccataatcagag

SEQ ID NO: 5930 - DNA, 4974 bp, Oryza sativa
gcggaggtccggaggaaggtggacgaggacgcgcacgtggtgatggggcgcgacgtgttcgtgctgtggttgcgcgccgggttcgacgccgcgttcgccatggggatcgtgctcgttctcgaccggatcaccggcgacgagctcaacggcgacctgagcgaggacctcgccgtcgccagttcgccggtgtaaaagctttcggtgatcggatcaatgggttcatgcttagagatgtgtaaaatatgtatcatcttgcaaattcttttttgtatgttttcttgtcgaagtttgaatattttgccttgtgaattgagcttgtagctttgagcgaaatgcaagttactcctaattacgttagcctttgacagtagtaataactatagttaattattttgcttgttctttcatgccttttggattatttttgtctctgaatagtactagcagtttatagtttggtgatctaacttaactacgtttagaaaaaaggtttattttggagtcaacaaggtggaaaccaagtggtatccatgtgtggcagcgaagtgaagctgtcgttttcataccaagaaaatggggaggtctttttttttttcgtgggtagtaatgtataactactaattcacataatcgatttaatatccctttcactttcggtgtgaattttcaaaacaatgacactttcagagctggatttgcacaatggaaacatcaacataccccaacaaatgggcaagcgaaacttctgacgttgggctgcatgaaagaggagagtcacatcactactagaagagtcttagatatgcataattgcactccagattgattcctatacagatatatactggcactgccagatgttatcacaactctaacccatataggattattattaccttattaaaatcccagcacatttggataagaaaaacattatcttcccagttgccatgctctttaggccactatggcccaggacccatgtacggatgcataacaccaagttagtgaagacacttgtcaggatgaaaaagacatacctttctccacttaactgtaatacgacacattgacagaccatcatgaatgatgtatttttctcatttctatataaaagaataagatcatgagaagcgtcaaattttccacatctcacagggtttgctgttcgtgcatgtctatcttatggcccatctgttcaatctccaaacaggagaaaatacaaaaggcacacatctcaactgtacagcttccgaatgctggcacaaacatgcaaatgatttcggtggcatgtttggaacacccactgggtctactgatctaggggtctgccagaagtcacaagttagaaccaccggcttatgtcagcactagttgaaatggaaaaaagaagggtttgtgtccatcttatggcaaagaatcaatttgagtgccaaactgccaattctatgctatgtgaatcctctgtattcataatctatgaaccgccaccactgttgataccgaagtagatcgtcttgcgactgaaggcattcatagcatagtcgactcggatttgaccaaggtctgtgttaaagtggattccatatccaaatccaacaccaaatcccggttttccttgtcgaagagctggattacctgccaattttacgatgaatgatcactgctgaacagtagtgtacaacagaaaaggaaagatccacacattatcacagaagtaaacatatgtggggtgagaacaaagttaaacgcaacttgacattaggatatcaagcattcaagaccccacgttttcatgaatagggatgagtgtactcattcgtaaggttgtttaactaatctactatgattctgattctatatctgtgctgtatagtacagtaacatcgggagcaatcaaatcatttttctgtcgatggtctaatgtgttaaccttattagtttactctcgtcaagtttcattaagatggattggtcacagttacatcctaacatctcggctaagaaatatttccataaattccactggggacatacatcataatacagtagtaggctagtagctggctggtggctgtaagcgaaatccctcatttactttatggattatacagttcatttattggacaaggctgttttaagcactaatttagtatatcaacctcattttctacttaagtaaaacagaaattagtgcataggaaaacagagggagtgaagcacttaccagggacatgacaagcagatcctaagtcactgccgcagtccatgaaaatagaaccctccagatgctttgccttcacagaaacagatagttcaaatttttatgtttaatctgaatgtataatattacaacgcaaatagctagagtactatgaatactggacacttcgcactaatcatcacaaaaatataggcacaatatgaagctgaatgatttttcagttgtgtaagctccaaagcaccttcagggaaaattttaagcaacagcgctagcttacactgaatcgccagcaatgatctccatatctactagaaccctcagatgaccattatttccctctagtaacagcactagtttcttttggttcgtggctcagcttgaatttcatctctaaccaaccctacccaaaattgcttcagagtaaaggttgttggtgtcatcgtcgttgttgtgttgctgtagtgtttggttgctatcttaaatattttctaaatgatcaatgttacaccactttaaacattaagtaaaacctcaggcatctattcaataaattgccttcaattataaattccatgtttgggctcaatttctctatggcattccaagttttagttacgagctgaaatagtgtttcatacataccaaaggaaccgtatattcacagttagcaattaggcacagtcttcctgcaccaactgcaccctcaccataaccccgtacgctaccaagtccgcctattgcaaatgcttgatatggcgccatgtcccccacaatggaaccacctgtcaagctgtgagataggaaaagattaattacttctgctgaggagtttggcactttgctggagaacagtaggtgcatgcattacctagtaaccaaaaatgttggccccaatttcatgcctttcgaaactgcacattttactctgttgaaggtcagagattttggtacaagtggcaatccttgttccatttggaggttaacctgtcaataagatctatatgataaagtagatcttacagtaaatatgttaaaatatagtaaacacaaacatacttttaagaagctattatcattaacatctgcataaccagactcttgcttcaagataatcatgttatcatggaggttaccactgcatgataaagaaaacaacagacaattataagcaccttttgagtatattaaagttcttgaattgtaaaatactttagcacctgcatgttagaggaaagccatcatggtccctggctatggagcgtccctcgttattaacaggccggatatgctggacaaaaagggcaacagatatgatcaaatgaacttggagaaaagataaaaaaaatataaaaataactaaaggcaagccaacaactggatttgggtagatgtccacctcgaatttaacactggttccggatgtccagtttgatgttgatggttcattaagctcaacaccaagcgacaatcgactaagatttatccctctgctccctgatcgtgtgaagttgtcagccggaaagccatgcaccgctatttccggtgtcattgtgtgctgattgctcaaaccagagcaagtaagaacaagtgtgaacagaagaatcaactaatacaaccaaacaatattttatatgcaaaacataagtaactcttgtatgcaaaacataagtatctcagaagtgcatcaacaatacatacttacataggtttcctagaaaaaaaataaaatagactactagagtatgaaacagcaactagcattctctatggagatagaattaggtgtgacttgtccctaaggttcttctcaatatcctatcagtgcccaagacccactcaactttcatgaaagctaaacatccgcaacaaaagttatgtcacaaattcaagcttcagtccatagtatgagcacatataaagatattatgtttactgattgctctgatattatagcagatactgaccatgtgatgcaacagatcagtatgaagaattataacgcacttgtgctatgtcacttgagcatttctgttcaattccagacaagaaatttacacagatacattgaacagaaagccaacctgaatgacaaatgactgttgtgataaccattcaggccttggccgtctaaaggcaatgacagcatttgattcattgatacccttatccaatatgacatctaacttctcgctcctcccaaataggcttggatgtttgagtgatatcctgtggacacgaattcttaaaatcacagtgccaaatgcaaaaagaagtggaaagacataaacagcaattcagaggcgcagcacatgtgtgcgcccatggaaggcccaaagatcaggcaaaattcaggggcgcttgagcactgagcagctatagaaacacaactatgcgagagcaagcatgcagaacatgtttgacacaaacacggacacaccaaggcacaggcacaagcagaggaacacatgaatacaacctgtctgcgagtgcgcaatgtctggtgcacgtatacaaaaatgaaatttaccaacgagatgcaaaccaacatgcttaccttccgacgatttgcgagaaggtggcgccagagttcctgaaaacaacccaagaacacaacacgcaaacacaaagtcaagtcagacatccaagtgccaccgaaacacctctaataggcaaaagaccgagcacctcatgggcggcagcaggagcgcctcgcagagcatgtgggtgaggtcgacgtgcacatccacctt

SEQ ID NO: 5931 - DNA, 3623 bp, Oryza sativa
acccaaatccttccaaatcaaatccctccgcaaaagtctattttgcctccccaggggcgatgggccgaatccctctagggccatcttcccctccctcccccggggctctctttctctttcttccttttaccggtccgcccgcgcgccgcgcgcgcgtgcgcgagaagcgcgccgagcgctcccttcccctccgctctggccgcgcgcgtgcgcgtgagccgcccgcgccaaaccgagtcctccctctccggtccctcgctgccgcttcccgcgcgccgtgttcacgtgcgcgcgcccgcgtggtcccgcccttggcgcgcctggccgtctgggtcgcctggccctgggccccgctgccctgccgcgcagccgcccggccccgctagccagcgcgcgtgcccgagccgcgccgctcaaaccgccgcgccgcccgttgcttcccgcgtgcgcgtgccgtggtggccgaccgcctggtcgccgccgccgtcagcgcctgccgcgcctgtcgctcgtgtcgccgctccgctccacaccgtcccgccgtcatcgccgtcgtcatcgcctcggccccgcctctccgcgcgcaagccgccaagggacggaggcagagccctgccccctctgccgcgacgcccccgctcccctcctccttttcccaaagaagcaagggggcaagccccctttctctccccctttttcctccttttccctctcgccggcgtcacctctgtcgccgttttggccgctagccggagcgccagctcgcgccttgaccgccctaagtcggttcccaaaccgacattgccgcccttaaaacccaagcctccccctttcccttcatctcccattcgcctccgtgccattgccgccgcccccgtgctctgttcgccgtcgccgttcgtcgttgcgcgtgtcggaggagccggcacgagcaaggacgcggaagaggactgcgggcgcgccctcttcctcggcccgaggccggagagattactcccgcgccgtcggcctctcgtcactgcgcccgcccgcacggtagagcatctccccgttctcccttctcgctccatctcctccccttagactcgggtagtagcacgagtagcctccccgtagttagccggcgccacctggccgttgccgtcgctcgccgtgtgctcgccgccgtcgccgcccgagctcggaagcgccgctcgtcgccggcctcgctcggcgtagttccacccaatccgacgctagcaacggattcccgtggccgcgtagatactctcgccgccgggaattggccccccgtgacctcgtcgccgttttccccttttcccgccgccggttgccgccgccgcgattcgccgccgtcaagctccctccggcgaatccgagccgttggctcgtctccccttgtcctgtgcaaccacccggtgtgctcgctttcgcctgtatcgccgtggttcgctccgccgctcgccgcggtcgtccgctgtccgttctggccggcgtcgtcgtctacctcccgccggcccgcgtggcagccacgtaggcgccacgtcggcgccagctcagccaagaccgggtcgagccgaccccggtcagcccctccccgtgcgcgcgttccaccgcgagccgtgaggctgcgcgtgggcccgccgcatccgcatccaccgcgaaccgcgcgcgtgcaccacgtccctctcccaccctagcgccgcgccgcgtgctccctccgcacggtgagccgagccgctgacaagcgggtcccacccgggaccgcgcgtggtgagcccggtccaccggctctctctctcctccctcccgcgcgcgcgcgtcttgggccgctctgggccgccttcttgggccggccagcccgttaagctcggccgagccgccctttctctcgggtcgcgccctagccgcccggggaagtctattttccctccctccttccttttcttttcttttctttttcgaaaaggatttaattaaatccttttcctttagaccaaaaatccaataatcttagaaattcaatatcttcccaaccgtaagtccgtttgactccgttcaacttccaaaattcctcaaatctcgagatctatctaatggcatgcttagaggtcattaatagggctttattttcgctgtttgttgagttgtcccgtttcgcgtgtagtttcggagcccgaagacccgcagtgcgaggatttcgaggatcaagctccagatctcgagcaaggcaagccacctttgaacatcttgagcctatatttgaaatttaattatgttgcttgaaaaatattatgaattgataggatcgcacttaatctgttgtcccgtctgcaaggcagattggtagacctacctaatttgttggatttgatccttcctttgttaattgtgataccatgtccccttgcaaccatctagttgcgtctcgatattcgtgcacccagtgcgagtatcgacggacgccttcaaacttaaaatctgaaaaaacaacttgggtaaaacttgagttttacaaaagacttggaaaacccgacacctgggtcggtgcttgcgaactaaataaatttccaaaaccgcggaccggggaacgtaccgggtgtatggtttcccgctcttgcacttaaggaccgtttccttggaatttcatccaaacataagacaagtacgaccacatgggtagaatgggacacccctggctgagtaactagcttatcaggggagccttgatgtcgagagacatgtggattcgccggggtggtgtcggggaggacccctgggcttcctggcacaatatggtctgggacctaacctgttgttggtctgggacccctctcgtcggcatatggtaaacctgtgtcagctttggaaatgccttgtcatgaaagcttggaggtctcccgacgtggctgatccccacgggctgggtgatccgggttagtaatgtcgtgtgggtaaagtgtaccccctctgcagaggttaacaaactgttcgaacagccgtgcccacggtcatgggcggatgtgaggtgattcctagcgtagttttgtttaactactgcttgtgaaattgctgttgtggaaaggggttcgatgtttgaaaaatctgtagctgatggaatcagctaggcccgggtggccgtttgaaagttgttggcccgggtggccgtttgaaaagctgttggccgggtgccaacctcgtttcaaaatctaaagactgatacattgcacatactccgaccggacgagacgcactgtctcatccgtgtcgtttgagaagcactcatttagttgtttcagaaaagagttcaaataaaatcaattgcaaaaacaccagcctctccttgaagcctgcattaaacacttatttcccctggcttgctgagtactcccgtactcacccttgctctatataaataatccccccagttgctgaagaagatgaagcggatcctgctgatgaggagttcttccaggagcaagccggctacgatgagttttagggtttcggcctagttcccaagtcgcgcctgtgttgtttggtccaagtcctggcttccgtttcccttttgtatgcagttgtgagctcgggacctgtccacagcccaacatgactgtacctct

SEQ ID NO: 5932 - DNA, 4585 bp, Oryza sativa
ttgatcatggacttttgtgtcctttcacggcataactttccatagctcaccaaattttcactgtgaggcttcatgtcaaatttatgctccacttttccttcacatgaaaatttccctacaacacacaaaggtcatttttgggtgataatcaaaacttagatgctattgaaacttgcaagatcccccaaaatgtaagttgttataaaaaatccataagaatcactggtgaccagtaagggtaactttctgactgggaacgcagtaaactgccagtgatagctcacctccagtcaagattcttgaaagcttactacttactaattaaatcaatccggacaccattgactttggcaaacaacatgatagtatttttcctatatattggagcaacttggacaaaagatgcacacacacgaaggattatgtgaaggccccttagcacaagtgctaaatagatggctactaaacccaaaacaagtttaggaaatactgatcttacaataaccacctagtcacccatgcttcatagtacaaagcatgcactcaaacttgtaggaagccccagacataggatcaataaatgtccaacaataagcacctagtcacctactcattccagtctgattcatgctttatagtacaaaagcatgcacttaaacttgggggaagccccaaacgtagtatgtctaaactcatacaggtaaaatcaagtatgattgtatgaacacagacttctgacatacaggaacgagtaaaaactatgtctatcaggatagtaatatgtacagagaaaaagaacgcaagcagtataagttaacaagctgggaattggactcctaccttggttagactcagagaaaacacacattggtacaaaatccttggacatattcaaggagtaactctttggtgtattgccagtgttagtttgagccatctccatcttgaactgccatgccaatagcaccatgttataatgaatgatgtaactataggcaccacaagcaaaaagaaatgagtgatgaaactaacatagaacggggaacaattatcaaacagagcagagcagtatgacgtatcccgctctaattaaacctctgcactcttcaatgcatctgattctgtctagcaattcgcaaatgggaaatcaactgaaatgttacccatccaatcaatcgtattatcacattcggcagtcaaaccctccaccactacatctatgttacggtcggtgcagaattttgtcccatttttcccaagcataatgcatgaaatctacatttgaggttcatacattaccaacccccacggccatagggtcatatcattttgctcgaagagaatgtactaccattcgaatccgcaagggagagggagtgggcgggggaggcttgcctggagggagggctcctcggagcggaggaggtcaagggagaggacgaccttggcgacgacggggttagggttggagccggcggcgtcggaggaggacacggcgccctgccaggcgtgcgagacgaccggggggcacttcatcagccacacggagcgctcggcccgcgccgtctcgaggtacttggcctcctcgcccatcccgccgccccacgctggtggctccgcgctcgcagtctgcccggcgattccggtgtcggcggcggcggcggcggcgctagggcacggagcggcgggcgatctggcttaacgacggagcgagcgggcgaaggggaggcacacgcggagggcgtgacgtgcagttagatgaacgaacgataatccggccggatcggatcaaacgctgtttgcagatgcaccgggctttcaggaatgaatcggttaccgacgaaagttgatagaattcgaataaattttactacaaattgactcagatgttgttgtgaatatatttaatttggttttttaatcctatcgatagatgatacttgttctgttccaaaatatacatatttctagtgttcaaaatttataccacaatataaatattttttagcgtacttcctcatctcaatggatcacaagttcacaaccatcactccagtcattttctataccatctctagtttaatttctatgcctatttccttctaccgatcatgataattttatatctaatcttaatcggcttaaatttatagaatttgattgtttttttatgaagccgtgctaggagctagtgcttgctatctcataatagctccatggatttcatcggaactgttttatgtttcttgggctttttcgttgcggaattagacctcctattaatgttggctaattggcttattcataagttacatcggcctgccgcttagtcgaaagctatgcaacaagtctgcgatagtttaaaactggaattggcacaatactgcgaagtggtcgtcttcgcttaatttaggtcagaccttgatgctgcgactcaggcattactcaatagatatgcaaggcttacaaaagtgcccaaacaaccacaatacgaaccgtttccaattgaaaaacaaattgttaaattgttatgatttatgctactgtaaacagcttatgtgatcagattttatattttagaacataacttataatttactaccccttcgtcataaaataagatcacttttggatcctcctatttataaaagaaaattttataaagcaaccattgtatcagagtttgtaaaagtaaatgataaatgtattaggagtagataaagagagaaataattacattatattttaatgaagttaacgtattctagtttttttactggtacgtgctagattggtgaaaaataaacgtttgttggtatagatggagcattcaaatgcggaagcgaggctgctatgtaggccacgtctcacgtctgtcaggttcgaaagcaaatgcatatctgtcacaaaacaaatcgtaataggcgcgcgtatatatatgccttcggttaacggccgcgacggccgtcggcccgcctcctccacggtcaccggctagcctgtgagcttctaccgcccgcgtccgcatgagaacgacaggtgctcgacacttggccagcagccagctcgcgttaacacatggccgcgccgcccccgccgccggacacggccaccgattcgattcgaagaaggtacgacgtactgcgacccaagctagatcgatctcctctcgttttcttcaatctccttcattttatactactgcttcgccgatcaaatctgttgttgttttttaatcaaatctgaccatagttgattactccgtactgattagttgtcttgtcctgctgttttacttagtgtacatggtgacagcggaggtaggttaaccggaaagcattttttgatgctgcggcctgcaatcagtactactccctatttctgtattcactcgttcattgtacttaattttttttataattaatattcatattattattagataataaaacataaatactttatgtttagctcaaataaaacaaacgatcaaatattatagacgaaaacgactcttaaaatcggacggagactactcatctcacagttgcggggaccaaaacttgtttagaaaaagaggtgaaccatgacgctcaggctgtcacgctgagcgccctgtgccccgaaggtgggacagaggcggtgccgaaatctagaactccggagcccagcacgaggggaagctcgtggcagtgtccgcgccacgtggcaggcggccgctcatccgtcgtgctcaattgtgcaaaccgttctcaattttcacctgcaattgtttttttttaaaaaaaaatcacctgcaattccacatcatgctgtcatttggcatgttccattccatcaagtgtgattagactaagttaattttgttccgtatgattacagtgacggaatagaatgattctacgagagaacccgtactagtttagttacgagtttatccaacaagtgtattgcatcgaccgttgtttaggttatcttcacaaccgtcggcatccaatctttattccttacttacttggatgatttcgatctttacactagttaataatcgaattaacaagtctctaacttggccactgaccgcgggcggacggcgagccctagctaccactagctggtggccccacaccaccgccaccaccaccacgcgacgaagacgaagccgtataggtgaaacgtgtgtgtatcacggcgtctcccaccgagaaaaggcgacgcgattgcaaccccgcgcgagatcgacctcgcgttccactcccactcctctccaccttcaaatccacgcgagttgttgagcgagagagagagagagagagagagagatttgatttgcgtttgcgttttgcgtccatggcgcagcagcagaggatggtgatagtgggggaggagcactgcggcggcggggaggacagggagctgacggtgaggaagacgacgctgttctgccccggcgacgggctggaggcgtacgaccacgggacggggacgctggcgttcagggtggagacgtacgggcgcggcggggtgtgcggcggcggcgcggcggcgggggacctggcgctgctccgccccgagggggagcccg

SEQ ID NO: 5933 - DNA, 7019 bp, Oryza sativa
ggcgaattcgagctcggtacccggaagaggagtccacggggattgatttgatagctcaagggggcgaggagagggccggggagcggcggatttcgaggggaagtggggcggcgtcgtgggggtgtggcggctcggcgtggcgttgattcccgcggggagagagggggagtggggcgggatgtggtcgcgaggtggaaggggtctcgggtccacgccggttgggacgaggggaggtgcgggatcggcggagggagtgggcggcgtgggcggcggttggagctggccggaggttggggatgacaggtggggtccacgggtcccacctgtcggcctgagtgagaggggaggccgggagggaggaaaagcagacttgcgccaaaaaggggaggcaagccgggccgcgggaggggaaggagagaggattttgggccgagcccgaaagggaggaaggggaagtttattttgttttctttttatttaaattgatgcaatgacctttgtgctattaaaactatttctcgagctccgaaaattcacggaaaattccggagagtacattagggcacaaagaatattacaaaatattcccggccaatgatttttaagggaaaattttaattctcccaacatttcacttggataaattgatttaacttttatttaatttctagaaaatgtattattaattgatttttaaacccgaacgaaaatcggggcgttacaaatctaccccccttacaggaatctcgtcccgagattctgggatggctagaaagaaagccggtgctggtgggcggtctgactgatctgcacattgaactgccacattctgcttcgaactgattgattgactggttgatcaaacctgcacgattgcactggctggattcgacctttctgttcctttgctttgccaaaactggaccgactggttctgcttgaactgacctaggccagaactgcggatactcctgaaacttacttatcttggactgaactgttgaggttggcaattttggtaacctgagaattcaccacgctggctataagaggatgaaaattgaatctggcatttgtaaatcatttaccctatgtccgcttggactggtcccaactcaaatgacaagtaaatccaggaaacctgcttgacctgtctaagctaagcggttgaactggcctcatgggtgtaccttagaattcaatcggttgcccggggatcggcttaattcttctgataccttgcaacttgcttcttcaagtgctaccctgattgcggcactggttgaaccttcaactaaaacagcgacgaagtgaggcaaaactcttctccgagacctacccccttacagggagtagtcttacttccgcgtggctgggatcagttgaactgttgtccttcaaatatagccaacacttctctgatttacaaagagccctgactttgaaaactgaaaacttcatcggtccatcaaattgaagcaatggcgatgcactttcaccccgacaagatttggaacttaacccttagttgatgataggaaattccacataaaagtgactctcatttagctcatggacacactgactcttgactgcaacacactactgctggagttctttccgctacacttgaccttgcatcgagctttgcatctcccgcatcaatacatccatcatctaatcttggacaccaaatgttgatcacgagcagggttcttctggcactgggataccttgtagctttcaactgaaccattgattggtgactttaattgatcttatctctgacactgaccatccgctgccaggacggaagagaggtggaagagaggggttgctaaagataaggtactaaaccacttgcctactgttatgttgtgagtagacttttattgttcaagttgcttaagcaaacaacctagtatggtcgcatccccaccaatgatgcaaaccatacccctacacacaagcaaacaacacacgatctagaaagctaacggaactactcttctgggaaagattgggtttaggtcaacttcgggaaaactccacttgatcttcgcagaacgacgactctgaactgatcttctcgctccttgcacgaagcttgaggctcgaattgacttgacttccgaacagacatgaagctgacagctggtcctctaggtttgacaactaaaagaattggagagattgggaggagaattttgaaaaaccgtttcacaaagaaatgccgaagggcgagaggagacaatttgcaagtagggttttcagaaaacttgtccttacggtttgaccatttggctcaacctacagtcaagttggctctgataccactttgtcacgcccagaaatttagcccaaatttccagactattttgtgtattaaatccctgtccaggaccagccagggtacacaaaacgacaagtaataaacagttccaaacgtaaataaagcgtaaaatacttacagaagaggcacttagtcctcacaccgaaacaaaagcagcagcagcggaaaaaggcgatcctagcggggcttcagctccactccacaggcaaaactcaactggggtctgagccttggtcctctaactccatcttcagctcagaagcactacacttctgaaaagggggaataatagcaaggctgagtacaaccaccgtactcagcaagccacaccaacgatgcagacgtgcaagggggaacacaaggacggtttgtggctatttgcataaaggcggttgtaaaacattttattgagcaaaacagtaaaactgttgagtaattaaagtaatattaaatctccactgatcaacgctacaccacgttgaacaggcccaaccaacccacctgtactacagtgcattgggtcgatttattaggtgtgagactaatcacggtgaatctggtcgatcgcccataaccgcgggcacggctattcgaatagttttactctggccagaggtgcacaactgtacccacaagacacaacccaccgacatgtcaccgcgtcatcatgtgcccatgatgcacacgtcaccatgtcgagtgattgtgacgagacccttcgcataaccctcccctaaccatccacaccacgctaaggtttcacccccacccctcaaaaggcagtgggcggtcccctcttgcgccgcggtgaatccggcagctggacaaccggacaccccggccgacccaactccatcacgcccaccctcgccaccggtgcctaggaaagggtcgagctatacttcagatcaagcagttacccattcccgcttgtggcaagcgctgtaagtcttccagggtttcccgtgaaccggtccttaattgctatgggtgcgactcgcaaaaccatgcatccacagcccaccattcagtcgcattttagttggataattacgaccataaaacatggccagatgtctcgagcacgcagctcaacaagatactagaatgtctaatactgcaattatcccatcgactgagctagtggtaattaagcatggctaagcatatagttctagctaggtcacataagtaacacaagctagtcaatttattacccaaggttgacaaagaacagatatcaagtaaacatggcgcaagcgagcagataggaaaaccctgatcccatgtaattagcaaaacatgcatatttatttgtaaacggtaaaacatttataaattgggatcaacatgctcaaggagaatgtgtgacttgccttgcttcttcactttgatcttctgaactcttttcctcgcgaccgcggacttccgaaacgacggaaactacacgctggcacgcaaaacgaggaaaaactctaataaacaccaagaaaacagtacataaaaagtaaacaaacatgtagagctcaattttagatgaattttgcaagttgaatggctcaattcggagttcgaatgaattagatatgaattttagaaggttttgagccattttaatgaatttctagaattattaccgatttattgcgcaatttaaatcaattatgacgtcatccgacgggggagaggtggcgccggcaagcgggccccacctgacggtgactcacgggtggcgggcgcaccgtggaccgagtccacgcatgcgctggtccgcgggcgcaccacgtggcagacacgtggcggccacgacggacggctagcggaggtggcgccgacgtggcgccacagaggcaccgacgcgggcggcacgggaaggccacgtggacggcccagatcgccccgaaggaggatcgggcggccacgggcgagcgggagccagctcaccggtcggccggccgggagcgacggcgcacggcccgatggtcgccggcgacgaccaccggcgcgacggcacgcacgggaggcgacgaaaagaggggaaagggaaaggagatgaagggggtcctcaccgaggagcgccggcgacgggacgaccatggggaggcgaccggcggcggaaaggatggcggcggccgacacgggaggcgacgggaacggcggtccgacgacgcccgaccatggcggagccgcggccgagggccggcaagacctagggaaattattggagcggttagggagggaaataggcgaccggagcggcgagaataccacgccagagaggagaggaatggtggggctcaccggcgaccgagaggtaccacgttccggtgggtttccggcgatgaacaacggtgaccgaggtgctgcacggcgctgcgaggcgagaggtgaagacggagcgacgcggcggcggctaaggcgacggtggcacacggctggaggcggcgtatggtggaggtggctcgggatgcacggtggaagggtggttgcggtggtggaatggggaaacggagcggaggccggggtagagcttggcacggcgttgccgacggcgcaagcggcgaggtgcggcgacgactaacgcagcggcagcggccggctgaaggcggtgtgtggcggtagtggctcggcctcgcgatgggaaggtggttccggcggtggaggagggagatggagtggatgccggggtgcggtggggtggtgtgatgctataggtggtggcggcgcagcgcggcagcgacgggagcggcggtggcgggcggctggagatcgccggcgagcggcggcgaaggggatcggcgtggagagctcggtagagggcgtgggggactcgggaaaacggggaaaaaggaagaggagtccacggggattgatttgatagctcaagggggcgaggagagggccggggagcggcggatttcgaggggaagtggggcggcgtcgtgggggtgtggcggctcggcgtggcgttgattcccgcggggagagagggggagtggggcgggatgtggtcgcgaggtggaaggggtctcgggtccacgccggttgggacgaggggaggtgcgggatcggcggagggagtgggcggcgtgggcggcggttggagctggccggaggttggggatgacaggtggggtccacgggtcccacctgtcggcctgagtgagaggggaggccgggagggaggaaaagcagacttgcgccaaaaaggggaggcaagccgggccgcgggaggggaaggagagaggattttgggccgagcccgaaagggaggaaggggaagtttattttgttttctttttatttaaattgatgcaatgacctttgtgctattaaaactatttctcgagctccgaaaattcacggaaaattccggagagtacattagggcacaaagaatattacaaaatattcccggccaatgatttttaagggaaaattttaattctcccaacatttcacttggataaattgatttaacttttatttaatttctagaaaatgtattattaattgatttttaaacccgaacgaaaatcggggcgttacaccagatccatgcttcacagaggtacttcgtagaaattccgctatcaaagctcggccaacacataggaagctaaaaaaggatctaatcgagcacatatggcaacgctatggaaacaaagaaaattagactaaaggcattgtaatataattattatatttatggttcctaaaaaatattgtaatcgtgtatcttattcatgcttgatagtattatatcaaatatatagccacacaatggtatacacaaatgcatttgtagtttatcaaagctacatgcaaagcattaaatagcttacagacagaccctctgtctgtgggttgtatgagctgtctttatatccgtctggatgataacttcgaggttcttgaagacacacccctgtatgtgggttgtacatgccctaacactcctactactaccactacacgaatagcaagttgcccccaatccgagacgtgcatctctaccagcaaaactgcgtgcgactttgacgaattctgcctcagcgagtatgcccattggctgcaacaatataattcgcttcacggtcgctgaatttttccttcccggtttccattgaccttgtactggtttgtgtgtgtcggtatttcccttacaaaatgatgagttggtgtgtgcgcgcaggcgcagcgcgctactggttcaaagcaagcagccacaccttccgcgaaccgatcgttcgatcggtccagccgcgtccggtttaatataaaccggcacccgtaaagcgattggcaattcaatcggtattggattgatcaatcatcgtcacctcgttttgcttgtctacttcgatcgccgcctccgcagccgtcgtcggagaggaggaggaggaggaggaagaggaagaggaagaggaagaggaagaggaggagtgggagatgaagaaggaggcaggggcagggagcaagctggggaggtggctgggggcgccggtgcgggcgctgtcgagggcgtgcgactcgtacgtgcggaagatgtcggcgtgcgcggggcacatgccgacgcacgcggcgggcgccatggggcggggcgggttcgcgccgggggcgatgcaggctacgacgttcagctcgcggtcgcggcgcggtggcg

SEQ ID NO: 5934 - DNA, 9848 bp, Oryza sativa
accgcctttatgcaaatagccacaaaccgtccttgtgttcccccttgcacgtctgcatcgttggtgtggcttgctgagtacggtggttgtactcagccttgctattattcccccttttcagaagtgtagtgcttctgagctgaagatggagttagaggaccaaggctcagaccccagttgagttttgcctgtggagtggagctgaagccccgctaggatcgcctttttccgctgctgctgcttttgtttcggtgtgaggactaagtgcctcttctgtaagtattttacgctttatttacgtttggaactgtttattacttgtcgttttgtgtaccctggctggtcctggacagggatttaatacacaaaatagtctggaaatttgggctaaatttctgggcgtgacatctgggttgtcgcttctttgcacttcaggcgggagcactatcgttgcacttggattataattcaaatccaagacatctctaattgcttccttctcatcttccactatcatattgtgaaggataacacaagcttgcattatgttgataacgtccccctgcttccataaccttgctggtcgacgaataatatcaaagcgtgattgcagcacaccaaatgcgcactcgacatctttcctcgccccttcttgctttaatgcaaataatttgtcttccgccaactgaggggccgtcactgtcttcacgaatactgcccattctggatatattctatcggcaagatagtaacccatgtcatattgtgttccgtttacgttgtagtgtaccgttggagcttccccttttattgcttgaataaatagtggcgacttgtttagaacgtttatgtcattctgagacccggcagtaccaaaaaaagcatgccatatacgaagatctttagttgccactgcttcaagaatcatagtaggaacgcctttgttaccactagtgaacatgcctgcccaacctttcggacaattcttccatggccaatgcatacaatcgatgcttccgtacattccaggaaaaccacgagcctcattttcttgtaagattttttccaattcatcggctcttggcaggcgtagatattcgtcaccaaacttttcaatcaccccttcagcaaattttcccaaacattccaaacaagtgcttgcagcaatcctcaagacttcatcaagttgatcagccgcggttccataacctaacatcctgatagctgctatacacttttgaagcggtgaaagactattcctaccagttgcatcaactcgttgggtgaaataaggagaccactcactaagttcatgtacgatacgcagaaacaacggccgtctcatcctaaatctcctacgaaacatttcatcggtgtagataggatttgcggaaaagtaattagcgacaagatcatcatgacctcgttctcgatttcttggtatgtacctccttggtccactctgtcgacgacggcgagatacggacgaagcttctccatcacctgcagccttgaattcttctgctagcaactcttcgatgatctcatcctctgccagcaactcttctacggtgaacacttcaaaattgtcggcttctaggaagtcatcatcttcatgcggctccatttacagaatgaaaaggagtagagggtacggtagtggaaaggagcacatatacataatgaaaaggagtagatggttccattttatagtataaaattgaggcttgaattcacgttcacattcacagaaacgggcatgcacataactgaagcattcacataataaaggagcacatatacataatgcctgtaactgaagcatgcacattcacattccagaaagaaactgaagggtacattcacattcacataagcaaattagtcctctcggcactccaacagaaactgaaactgaagcatgcacattcacattgcaacaactgaacctgaagcatgcacattcacattccaacagaaactgaagtgcacattcgcatttacaaatcacattcacattaattcagaaactgaaactgaatgagacctctcggcattccaactgacctcacaggatgtatatatctaccaggatgtatacctcccagccatgaccacaatcaaatcaatatttagctcccagtatatacctccaatgatcaagctctgaatttatttcctaaatttcccctttctgatcatttgcagattctcatcaaagtatatgtatagagacatacactgaacctgctgaaagattatatatactcatctttttccctagattatatatgtatagagacatatatgtatagagagagtacaaaaagaaaaggaatgcaataaaaggctaatatgctcatctttttccctagattatatatactccatatcagtagtatagtgtatcactgaacaagctagttcatttcagttacagggttctagctaactaaatctctgcatttgagtttggctcgcttttgcgaattatctcatggcagctagttcatttcagttacagggttctagctaactactgtaaccatataacaaaggaagggattactgacattaataatcaggtagtataaacagagtaacatctagagatagcttcatccaatccacaatcaattcataatataaacaaccatcagatttttatttctctcaaaagttgaatataacctcaatatcattaggataaaatgctgcatgatgcaaaaaaatttagagtcaagtaattaaattgtagaatgccttttccaaacgagctggggctgccgccgccgcatccgaggcctcaggtgtgcctcccttcttcttcctacctgcagccgccgtggacatctcagcagcacccaaatcaagcgaggggagttggagattgggggagtgggagattgggagagattgctgcgctatatgctggagcaaatttcccggattgggggagtgggaggggagttggacgaacctggatttcgcggggaaatttcccgcgcgcgcgctctccgcgcgggatcctgccgcgccgtcgcctcgggacgacgagctcgtacaacggtgctgagcttgcctcttccgcctcggagcacgggtcgtcgccatcgcctcgcgagaggacgcagctcccgtcgcttgactcaaccggggggttttttgcataaaagacatcacagagacggggcaaaaagacccgctgtacgtgcccttagcctggccgaccgggttgtagtacaagtatagagcagagacaactgtattttgatttttgcatgtgcagctgctcaccaggagggattataaaaacgaaactgggtttcacacacacaaaacgtttaacgtgcacgttggttttatggttttgtgtaccacttggcaggattgattcttggaacttgcagtgtggatatcatcaccgtagtctactactggatgcttatggtggtgtttggatccaaggactaaattttagtccatgtcatattagatgtttgacactaattagaagtattaaacgtagactaataataaaactaattgcataaatgagagctaattcgtgagacaaaatttttaagcctagttaatccataattagcacatgtttactgtagcatcacataggccaatcatagattaattaggctcaatagatttgtcttgcgaattagtctagggatatggaatgggttttgtcattagtctacgtttaatacttctaattagtgttcaaacatccgatgtgacagggactaaacattagtccctggatccaaacagggtctatatatcttctccgacgatcatgggcggatccagaagaagatttaagaggggacttatctccttcttccttcttcaatctcccctactctcattttctctttattattgccctttcgtctccccttctatcaatggtgatctagcggggtagggggactcgagtcctcccagcacccacgctggatccgccccaatcgacggtaggagcgagtattaaaaagtggataggtctaagtgtttagatggagaagaaagaaagaaaggaaatgcgttgtatgcacaagagatgagccatgtattcatgatgtagtacatatttatatgttactattatatgagtaaactatttgattagctaaaatattaatttttaaagttagtaattgctgtactattaaacttgttctaatgctagagttgatctgatgactcgaaaaatggagtttaaggctgcgttcgagcgcaggagaaagagagaaagatagttttgttttccgcgcgcacgcttcccgaactactaaacggtgtgttttttgcaaaaaaaattataggaaagttgatttaaaaaatcatattaatctatttttaaagtttaaaataattaatactcaattaatcatgtgctaatggctcacctcattttacgtattttcccaatctcctcaatcccctccttctcaaacacaccctaaggcgtcaggtgtatgatgcaacagcaaaccgatcaacagagccatggttcaatgcagctagctagtttagtgtaatcgcacaatttcttcacccatctactaatatgcaaattgattaagactcaccacacacggtaacagctataagtctacaaccgatgtaccgaccggcaccatttgcatgcgagtgcgcgattaattcaccaaattatcaacccatgatcatcaagttgccccatctttcttgggacaaggaaaaaacacgaaagtgtccgtcacagtctcgttttctccccaacttttgaacttcctttcgaagctagccggattgtgtacgtgatcttggtgttgtttcgatttttttacttgattaatggtgttgtttccatgcacgatcctacccaaccctttattatttcatttcatcggcaaatgtaatgcccagtgacggaatttgttctgaccatgggactcaagaactgttcggctaaaaacgtcactcatttttatccaaatcaaatggaggcacagagaccggcaaaagtttgtggaagtaaatgcaccggggtgttacgagagtcgtgggtgtatgaccttattagggtttaaattccaataccaattctatagaaatttagcgaggctatgaattatcattggtctccatttatttaaatgcatgctagaaaatattttgtaggcgtgtaagattgcgttcagaagtgaggtgagaaactttacctccccgtatgtaaaacggagcgatttactaacgcataattaattagctaaaataaacttgaaaatagattaatatgatttttttaaagcatatttttttagaattttttgaaaacgctgtttagcagtttgaaaaatataaatgcagaaaacaaggacatttagcattttgagaagagcgcgcgtggaaaataagattagatggtaaaagaataccaaaatatggtttattaactactattagtacgtgtgtggtgatatgtgatacatgtgtgggtgggtgcacagagatggacaaaataaaacgagaccgaaaaccgatttaaaaaaccggaacactaatcttatgtttctagttcggtcatcttttgataaagaccgaacatttttttaggtgtcttcagtcgtctgtctcaaaggaccaaatacccgaagtgcccaaagatagggcttgcttagttcgctggccaatttttttaagtatataggcacatttaaagtattaaatgtagactaataccaaaacaaattacagatttcgtctgtaaactgcgagatgaatctattaagcctaattaatccgttattagcaaatgtttactgtagcatcacattgtcaaatcataacacaattaagctcaaagattcgtctcgcaatttacatgcaaactgtacaattgatttatttttcgtccatatttaatattccatgcatgtgtccaaacattttatttgatatttttggccaaaattttttaggatctagatactcccataatctaagtatgtgttttgttttgggatgaggtaagatgggttggactcatccttagtttcggatgcgattatctcgtctgtctatttagcacgagggatgtgatggtcttactttaaagaggatgacccatatgtcaaagaaaagtgggttggattgatccgctagtttttgaggaaccagtccaatccaaatctcaggagaatatccatttcagggatcatcccctctcacctattcccaaaccaaacaccttaaaaagtgagttcgatccaatccaacccactccgtcccttaaaccaaacacatactaatctaaccatcccaagtgcactttaactctcttaaatatatattgagccgatccataccccacaaccgaaaataatactaactcctacaaccattaaaaatgtgtaaaatctctgtggcccaagtggcctagtccaagcacctctcccactttcccacgtataggagccaactcatgaaaagaaaaacaaccaaaatttaaattttcaaatttaattttgaagttgatttcaaaatattattaatatatttttaaatttacttctaagttgttaaagaacacacgtttaaatgttttacctaaaatttattttttattttctaatgaaacattttagctcattagaaaacttgggcaacagactaggtggtgttattttctcctaatatgtagatgaagttttttttacgtaaaaacggggtggtattaacgtataattgattgagttttaattattataaatttgaaaaatagattagtatgatattttagagcaactttcatataaaaagttttcgtacgaaacgtatcgtttagcagtttgaaaaacgtgacataaaaatcttaatctttatccaactcttattagagaaaataagattacgttattacctaagggtgtgtttagttcacgttaaaactagaagtttggttgaaattggaatgatgtgatggaaaaattggaagttcgtgcgtgtagaaaaattttgatatgatggaaaagttagaagtttaaagaagtttggaactaaactcctgcaatgttccaagtttcaactcgtttcacacgagccagtgtcaccgacaagcaggacccacgtggcagattttggcgccgccgcgtcgcctctactccctccagcggtcagcctccttcccaaacaagctaccgcccagattgaacttgaacgaaaactctggagggaaaactcccgccaagataaaatcttcccccaaatccctcctccttctcctcgcaatcattcctcccaaatctgaaatcttgcaaggactccacgcccgagagggagaaatcgagggatcggcaatggcggacacggggagcctggagaagatggggcgagagctcaagtgccccatctggtgaatgtttgattccccgctcgatcgattcgatttccttttttgcgcttcgtctttggattcgcgttctaggacgatttttggttcttgggttcatctctcttttttctcggccatcttgttttctcctgatgttttgttggttgattctctccgtggtcctgaaactatttctcacgggcgattttcttttcgttcgtgtggcttgcgatttgttgtgctttgtattgattagaaatcttgttcttggcagcctgagccttctcagttcggcggtatccatctcctgcaaccacgtcttctgcaagtaagtcttcatctctcactattccgcctcgtcgtaatgcagttaaaattcacagcgtcctggatggtcttctccatttcgggcttatatgctgaaattttccccattctgcagtgattgcctcacggaatcgatgaaatccacgtcgagctgccccgtgtgcaaggtcccgttccgacgacgaggttagtgttgtgctcttgctgaattgtgtctacttaatcacgtgataggcatgaaaaacacacgaattaaactaactgcctaggtttagtgtcactcatggatcggacattgaactattagagtttcttatgtactccaaattcgtagtaatagaatatgtcacgtccggtcctagattcgttttttatgggactgaaggagtagtgcttatcggactgccggtgataaatttgcttttcgctgagcatgggcagcacacctcattcagcaatatttcaaaatttgatatgaagtactgtatttgatgaacttgacctttagtggaaacttggatatgataccttaatggcttcagcttgatatctacaaggtccaaaactgacactcaagggcttggtttgcttgcagaaatgcgaccagcacctcacatggacaatctggtcagcattttcaaaagcatggaggctgcagcaggtaccaatgttgtctcaacacaggaggctcctgtggtaaaacttgcaggtaattgtgttgtagcatgttcttattctattttctagcatatgtgcaaagtagcaacctcattgattgatttagttaaagtgatttttttgtaactccttttttgtactacactgttcaattcagttacaatgtttgttttgcatctcttctgtgctacattgtcaacataagttaacagtgattgttctgtgcttctttgtctgtaccccattattgaattcatttcaacataatgcttgctggataattggctctctatgaaaaaaaatctatgcttagagaagatggatagttgtcaatctttagctcactatcttgttcatgtttgaagatggatcagattgtgtcaacagcgggaaaaattccaaaaggtcacaaaaatcattgacacgaaaaaggaaggtaacatccgagatggaaaaaaatacagcaaaggatgctacagcttctgcatcccaacctactacaaagccttccttctctactaacaaaagaatacaagtgaaaccattccctgaatctgagacaccaataagagctgagaagattatgaagcctgaagagccaaaaaataatctgaataatgatgttgaaggaaagaataaagcagtggcatcgggtcaacctggaagtccttcattgtcaccctttttttggctaagggaacaagaagaacaagaaggctgtaccgctgagacgttaagtgaaacgcaatctttagacacacccttgcgtcataatgcaccctcttttagcgatattaaagattctgatgacgaaatccctttaaatacaactccaaatgtaagttcttctgaccacctctaccgttctttttgaatttttcttttggcttctcattttgctacatgagtttcagagcaaagctgcggctacagaactctttgacagtgaaatatttgaatggacccagagaccatgctctcctgaattgtattccactccattgaaaaagcaggtattttgctaagtgcctaagtggatcaagaggcactatacttttctcacttttttcctcttttatgacctgttgattttcatttattttgcatttaatatttgatgactcagctattttgtctgttcagagtaaagctaagagtaaactagatcaaattgaagagaagggtgatgaagaagatgtgcatattggtggttcatttgataagctgggtaatgcaagtaatgcagctcagcttgtcaatacaaaagcaacaaagcagaagagaaagaaaacaagtcccagtaacaaaaacagtgcaaaattgtccaatcgtgctgagccctgcataaaaaagtctgatgccaatcaacaaggttcaaatagacgtaaaagtgctgccctaaaatcttgtcagaaaagcagcagtgctgtagggaggaatactt

SEQ ID NO: 5935 - DNA, 9516 bp, Oryza sativa
  unsure (1)..(9516): unsure at all n locations
agcgtggcggtcgggaggatcgacgaggacgcgccgtgcgagttcggcgccgaagacgcgcgcctcggccccgtggcggcgccgccgcacgtgcggcggagccgcagcgtcgcggtcggcgccgggcgcgccggcgtcgggttcggcgccggcgccggcgccatgaggatgggaccgggcgtcggcgtcggcgtggtgcgcggctgacctgaccgacgcgagtgacggcctccggcggcgcgtgcagcaacagtagcacgcacgcgtcgcgtgtcgtcgtcgtgtagtagctttacctaagcttaggcttgctgtcttttcatggttcgtgaatcgtgaacacgaattatttacagctttttttgtgtgtaattgtgtcgctttcggtgtgatgtgtagtatatgtacatatcctttccttgtgattactagatttgtcacgatttggaactaagcagccagtttgacatctgcacgttactttccatgcatatcagcatatgcatgtgctgtattatcccagcaagtttggtgtgtatttcttgatttctagtagtagtttatacttcatcaaaagaaaaattaacctaaaaagaaatataacctcctatagtataataaatctagacaaacctctatttaaatttgttgtactatgtgaggtcaaattttcttttatattggtttttttgaacgggggagtatgtactatttgaaaattataaatcgttgcaaggcatctgtctccaaccaagtggtcgatcgatcatagaaccaacctactccaattatctatccaatgatccgtacgttaagtttgaccttctgggatgagccgatgtgtgcacctgtcgaagtttgggcgcgtccgacttttgcatggctacacgctgtggcaacatcaggaattcaggatcgtcccagtacctctcactgtcccagtgatactcagaccctgtttagatcacaccaaacttgctttaaactcccaacttttcaaatcacatcacatcacatccaaaactttcctattcacgtaaactcctaacttttttttcaaagtaccaactttttccaaacttctcctcaattttagaaactaaacacaactttatactacagaggatcttacggctttgtatagggagctaaaaatatgagaaaacaactggggaacatatgaaaaaaaatggacgtcagagctttggttattggagtagtttatttttctaaattttgtagctaaaattatttagggtgtgttcgctggagctagatcctaactagcacagtgcacacggaaaacagagcggtcagttagcacgtgattaattaagtgttagctttttttttcaaaaatggaacaatatgatttttaagcaactttcgtatagaaactttttacaaaaaaatgcatcgtttagtagtttggaaagcgtgcgcgcgaaaaacgaagtggagggagccaggaaccagccctcctgaacaaacccttagattcgtccaaaacagatattgttgatgagcttattctggtacgtgaaacatgacggatcatttggatataaataataaactattataatcttgaaaactatatttatttgattttacaaaaattctacatataaagttttttaagaaacacattgtttagtaacgaagtagcatagttgagatcaattttagaaataattctatatataaagttttttaagaaacacattgtttagtaacgaagtagccaagtcaagatcaatccgatccgaacgcagcctaagaaactagagattatagtagaaactacatgcgcacttactaaaactatcctaaacttgacctatgcgacagggatggactcccttcgacgagtttcctccgacaatatcgatccagcaaccaggtcagctcttttcttcaccactaccctcctccatgttgccgttcgccctcgtcggcgccgaaaggcataaacctgtcagcgtggcccgtctagttttgtcccagtcccagcaccagctcaccacttgctatcaaccgcgcgtctcttgcgatcacggtgtagtctcgccaaccacccctcctccgccttccagaccatttctctaagcccaattctccatgtggtgtttttttctcctgaagataaagataaagataacgatgaagattaactgttttatgtagaacgtggtggtattaacgtataattaattgagttttaattattacaaacttaaaaaataaattaatctgatattttagagcaactttcatatatagagttttcgcacgaaacgtactgtttagtattttgaaaagcgtgatacgaatatccaaaattttattcagtttttgcagtgaaaactaacgggtttgtctcctcattcacatccggaatcctaaaccttgaacctaatcccacagctggtcgcgacgtggtctgaaaacgttcacgcgcgcgatggacgcgctcacgcgcattcgttagttagttagtttggatttccggtggaatgcgatcgggagacgggcaggccaggcttccgaccgagacgccgccgaggccctagagcgcaactcccaaggctgtagaacaatccgtggaccgcagcgtctctcagccactcaccacggcgacgtgtcatcccatccagccatccgtcgtaccccacgtccaaatcccagagcaccaccacatctcccccaattttcccagccgcgaactcctccgagttggttggcctacgcgcctagccagctagcgacaatggccgcgtccgccgccgccgtggcatccaccgcgccgccgcagccgctgcggccgcgccgggggatagccgtgccgtcgtcatactcacaccgcgcggcgacgcggccgcgcctcgccgtctcggcgtcctccaccaccaccggcaccaccgagacgacgagcgaacgcggcggtgccgagcggttctacttcaacttcaccgggttccccttcccgctcgggccgttcctcaaccgccgcaccatccgcaccgaggtaattaaccccgcctgaatccttctgctctccggcggcggcggcggcgcgtgtctaatggcgtcgaacgaagcaggcggtgaaggggaggatatggctgttcgagcaggagcaggcactggggttcagcagcgtctccaccaacacccgcatgaccgtcatcaagctcaagtccggcggcctctgggtgcacgcccccatcgcgccgaccaaggagtgcatccaggcaagcaatccccgatctcccccgtctcctccgattcagcctcgtctcatgtcgccgccgtgcagcttctcaaggagctcgacgcgccggtggagcacatcgtgctgccgaccttcgcctacgagcacaaggtcttcttcgggccattcaccaggaaattccccagggcgcagatatgggtggcgcccaggcagtggagctggccgatcaacctgccgctggagttcttcgggatcttccgggccaagcccctccaagacgaggacgacgacaccccatgggcgggcgagatcgagcagaagatgctcagctcgcctgaagttggtagcgtcactgtcaccaaccaattcgagcttctatttcatcagcaaatggatgcaatttttttttatagctgtgtgcaatggtgtgaatttggtgatttcagggattggaccctatgtggaggtggcattctaccacaagccttcgcggacattgttggtgacggatgccgtcatttttgttcctcggcagccacctgagtgtatcagcaaagagtcgttgctggcatctgccaagaacggcttggcagtgaagattttgagcaaaggaaaagaggtcccagatgaaccagttgtggacaataagctgaaccgtcagaaaggtgattgtagtgagtttgatctgtactgtctaattgcggctatgagtgccatgccatatacaagaatcactttatttttaatgtaacctctgaaaagggtggggagttcctgcttttcattaagaagaagagagtagtgctcattaagaaacaaaaatgactgaaactagtgaaatatagtgctcatggtttagcagaaatagtgttgtagcacactagatcggtatgcaccagcctctgtttatcttttttgggtctggagtgcataacgatctttgttaaacaaaatcgtaatgttcactgctttgtttctgtttctttggtttgctgcatgacattctaaaaaaaatccttgcgaagctcatttggcaattccattctctgtgaagcttcagtgtaagggcttgaggtattcccatggactccatatgcctactatatcgccatatcggttatgaggtctttactctgtattatcctcaatgctgatattcagtttttttcgtcttcgctgtaatgccaaagattattgcctgtcctcagacatttaattttctgctcaaagcataagcatctgatgaaaattacagcataatgttttcttttcatagaatagggtcatatatcttccgcattgaattgataatactagaacattgcagtaaccttgttggtgtaacaacaggatgggagcgaatggtactgcaaatattgtttcttggtccctcaaatcttctggagccaaacgcaagttttgctcaaatgtctcagaagttgattgtctccccaattgtgaagacacttgttttcagcaaagttccagagaaggtatgttcatgtggtgaatggaaactataatacactagtatctgctgaacctggctgaacattaccttctgtgcttttgatctataggattcataaaacttagaattacaacttgaatgttttccacgggacgctacgaccacacattttatcctttgggtgtcaatatcttcagcttgtcattacaagctgcctctagtcagaagcatttcctttttcagttgcaaacctgcaatgtgtatgtaaatgagtcaatcatgaaaagttgcatgcccagactagaatatgaagcagctttaggcatccttcctatgtgctaccataatttatgcactgtctgactcattatctaaaaaaattgcactggctgacttgcaagttttatataccattgaagtgctgaagtggaatgacctgagatcccaccaagtagtatttctgatatttctattttgaaaaaataaaaaaaatcttaattttttgaactagcattttggtatttcacacttcccatacatttctcccaatgtcaagccattgaaaatttgaaatcgtctgcctctgcaggtgagagactgggtcgacaggatcgctgcagactggccattcaggaggataatcccagctcacttcgcagctccgattaacgcgaaccggtccgacttcttggctgcctttgctttcctagatgagttcctccccgagcgatctccagcatcgcccggcctctcactcctctttgcctcgctcatgggcaaggcggcgagctacttcccccctgatgacatgaagaccctgtcatccctggacgagttcttggtttcagttggtgctgtcaagaagacagtttcaggcagaaagcgatgatacggagagatactggcagatgtgttgttcatagttttgtgttgagatgagcttgttgctgctgtacatggttaacactactaaactgtactccctccatttcacaatttaagtcattctagcatttcccacattcatattgaagttaatgaatctagacatatatatctatctagattcattaacatcaatatgaatgtggaaaatgctaaaatgacttacattgtgaaatggaggaagtatgtagttagcctttatccaggattatattgtatataccttactgcagtctatagaagaggccaaaatgtttacaactcagctgaacatctgatgattctctatgactgggtctgggtctggtctatttggcatgactccggctacaacttcagaaaagtccaactaacggtttcagttctatctaaaaaagagtgaagttgctgaagtgattaaaaaattaactagtgatgtggagcaggtttaaatcgctcactatgtagcatctatgtcgataattcaagcattgtatacgtcattagttcaattcttcgtaggaactacccgtgagcttgcaaaatatatctgtttattataaagagatttgttgttcctgaccctgcttcacctccacaattttattacagactacgctcttttgtagttagattgagaaggccctatgagaatttctcttgcccgggctagcagagaggcattcatgtttgtcattttaatgggggtggtggggttcagtttagcatttagagagcacaagattagaatgctgtgcacggtgtctgtggagtaataattccttgttcagatcgagccaagttcagttaatgcagaaggtctgcatccatgagccgtcacaagccaaagtacatcatcttctgtatcctcacgcgtcagacattaaccccattataaccactaaccaacgcgttatacaacttctgatctaagtgcccactccatcactttcctcagatagtacacgcttttgcactactaacagcgacttgtacatgattttttcttaaagacacatagttagatccacatcaactctgaaaatgtgaagaaatagtagttcaaagctgcacacaatcacttatcactgtattttacatgcctttgcactactaattgtgacttatacatgttcttttccctaaacaaacatgattagctccacatcaattctgaacttgtgaagaaatagtagtacaaagctgcacacgatcactactactacaactgtattttttcagactgagaatgtgtaaacctcgattcctactccactttcctagtgagcaaaaccatcaaaacgtccccaaaattagcacagctcattgcacacgctcgctggacttgtctgaactctgaactcagaagtcagaactgacatccttgtcaggcaaaggtagttaagtcagttaccatcaaaagatctgaagaacggtaacataacgaccaacagtgacaaattttactggagtacgttaactccctgtaactgaagaagggttcagattgcaggctgtaaaataaaaactggagcagtaaatacgaaggcaggtcaaaaccgtgagagttaatgcgaaggggtgaaactgacgacgagccgccattaatttctccaaccttttctccgtcacaggatgaggcagagcaccatttactcctcggcgccgcgacgccaacggcgacgccgaccacagggtgatcatcatcagatcagaagcaaaagagcaggatatatacacacgcatgacctcatgaactactctcatgtacagggtaaagagatgaaaaaaagaagatgatatgcctttggcttctcattgatgatgtccagcccatcagccacagggagaaagagatggattatggaaatgacaaattgtatacagacgtcactgctgccagaaaagaacttccaattttttttctttttttctgcattgagaaatgcaggccaagaaagctacaagaaacatggtactagatgttgccaagaattgggaggaggaagaagaagaactagcctatacatgcaattctatctatgttattgttgccatgctgatgtagtaagcatcgatcctccattgtaagtcctttccgagctccaagaaagtgcacccggaaagcaagaacaagagaggacgacgtcgacggatgatgagcccggctgcatgccgatgtgtccaagaaagcaagaactgaccaacgcctcgccgtcgccggcgtcctcagttgtgcagcgggttcggccccgtcgggacgagccgcttggcgacgccgtagcgcaggtcgacctcctcgtcgcgtcccggcggcggcgccggcctgcggtggtggcgcctgaccccgccgcggtggcgcatgagctcgtggcacaggggcagcggcggcacgggcgccgcctgcctggacgagccgccgccgcacaccctggcgaggatcgcgtcgacgtcgacggcggacatctccggggcccgcggcgggcgcggctgctgctgcgcggaggcgaggacgagcagcgacgccaagaagacggcgcgggcgacgctccagctccaccgccacggcgcggacggcgccaatccccccatggccacggcgccccttcttggtcaggggagagagagagaggaagaaagaagccaagctcaagaagacgacggcgcgcggcgatggcttggctggtggccgcgggcgatgatgatgatgagatgagacggggacgcgcggcgcgggggaggtgggctttaaaggcagcggtgtgaggtgcatgaggaagctggaaaaacaagcaacggctgctagctgctgtgctgaggtgatgggcgggctgatggggtgatggctcggtcgctcgcggagtcgcgggatccccgatttcccaactaaatttcgggtggaaaaaacgaagcgagacgggcagttttccccgtgcgcgcgcgtgtacgggggttagtacgtacgcggagaggaggaacccaacacccgtgacgccgtgaggacgcggaactcgaccggggccgggatgacacacacagccgggtccgggccagttcaccgcgaaagcggaaacgcaatgccgacagaatatttcgctacagtcggttacgtgaaggctgcagggagaaaactaaacggagggccagttttcaccgcacggatgctgctcgccaaaggtccatcagaatggcagtgttcatcaccgcactgatgctgctagctgaaggtccatttagaatgctcattcgcttggcagatttggtttgttcttttaaactttttttaaaaaaataccgaatagcacgagatagtatgtttcatatcgatatgccgggaaaaaatttcaaagactacaactcgaaaagggttattgttagaaaaagggaaaccaaaacacnccnccacttgctttaaactttgagataatccaaaaaatgtcactgacaggcgtccaaatccaagaaataatatcgacaagtttgagttccaaaaaataccattgtacaagcgattttatccaaaaataccattgttgttaggattccatccataccgcaccattaagtgctacaggatgaacaatgtatttatcgacgtggaatggatagaaccctaacgacgatgacatttttagacaaagtcgtttgtacggtaacatttcttagaactcacgcttgttgatggcatttcttatatttggacgcttgtcaataacatttctttaattatctcttaaactctaacttttggtgagctgaaactgaggactgaaatacattgcaaataattcagtttaagaccggggaatttgatttttggttagctcggtttagtcttcagtcatgactgaaacatctggtagttttatgagaaaaaaaaacagat

SEQ ID NO: 5936 - DNA, 15056 bp, Oryza sativa
ttctaccagagagttcagagcggcgccgacttggatggagtggacaatggacttcggccttcttcttgggctgttttcatcaaaagcgaagaatgcttatgctttggattttggatttttcttttcgagcaagagaattctcctacgaaactgattttagggtaaaatctgtttgagtttatggtttcggtgataccaacattgtgacgtcattactgcgttgctgttgcatactccctccgtctaaaaaaatctaatcatggggtttgaaccgggacaccatccaaaaaaaaatccaatcctagatttgaacctgaacatgtgtgtgtctaagttcaaactcaggattggttttgtttttttgggacggagcgagtatgatcataagtttaaattttgtttccatatttactagtaccgctttagacgtaatcttacctaccaataggttattaattactctctccgtcccatattgattttttatagaatggaggatatatgtgtctatttttctattatatctatgttaaataaattgatgtgttacattgacatagtactatattccgttggcttggagtgttgcttttggaccggaagacttaagtttaattcctattatcatttgtgggtggtcaatttttatattgcacggtgtctataaagacaatctcaccttagtccacaaataataagaagttggaggaagtactaaccttatttagccatatagagtattgtgaagcaaacatctaataatgaatagttatacgtattacacatgatcttgcttcgaacatgatgatatacccgcaagtatcatatctaacaccacacagatattagaaaagcttgcctctaaccctgttgtcgtcaagcccctccaccttgccttgtgtctcgtgcttgccggcgagaactcaaagatgatactatccttcctactatggtcgctagattaggaggtggggtgtgcttttctcatttatttaggacgtgtctgctccatggacaactaactagttcacgcttctcgcgtgggaaagtggtcttccgcagatgagcatagacgacgccaccaagcgaggcggctttgtcattggctagattcatgacaagcgatccgaaacccttcttcatgttcctgttctaaatccaccgctttcctcacccccctcgatgctgggggacggtgttgtggagcaggtgcatccgatcgctgccatcattgatcgtattagcggatacgctgatgaaaacgtcaacgttagctggtgcaacctgatggaaggctgccttgagaacattgtcgctctcgccgaggacacaaccaaacacaaacatgcggaagctatgcagacccacattgtcgacggagggagtaccatgcagggacgagggacatgtcgcgtagcattcccgctaataatatatcatatttattacacttttttacgtatcttgcttgtttgctagaagaaaactttcacacttaacaaaacacaaaactgtttagcattaaatggaaaaaacaagtaagcttaaaaaaaactttcatttcgataacttcaattggaaacttgtattttttattaagtacgcgcttgattgaactacaaatgatgcaatagtagtagccaatcggagtctagatcctactagccgtagcaactctgtcccatatatacaaccgtgacgataataacttatttaaattttatatataggattgaaacacaaatgtaacttatttaatcctctcggccaactaaactttatctgtaaaatctatactacttatctaaatctgatgatggatttgacactgttcttttcagtttattcaccaaattattgaaacgattagttgcttcacactttgaaaaatatgtttttcagataatttttttcacgacattgtttagatcacttttttttaagctacttgtaaaatttataccttagaatgtttggtttatttatataattaagtagataatcgtaacaacattccgattccgtttgataatatataaaccaaacaggtaaaacaggagatgtcataacgcttgagtcgcagataggtaacgcttgtgttcggtatcttgtccaaataggatccgaccgattacactctctttgggaaaacacttgaccaaatcttacccactaccgaacacaaccctagtgcactagctatccgcctggttttcgagtttccaacgagccagaaggaagcccaatttttcccaaaagaaatccacccccgatatcaaaatcccttctccctcccctctcgccgccctcctcctcctcctcgtcgccgtcctcctcctcctcctcgattcgaggggtgccgccgccgccgcagctccagcatccgcgagaggctcgcgttggggatcgccaatttccacgccacggtggccaatcccccgcggcgcgcgctggtgggcgatgcgatcggatgaggtgttggcgacggcggcggcgctgcgtggtggtggagaggaggaggaggaggagggcgtcgagcttccccgcggcggggtttcggccaccgcgcctaggaggaggaggaggagccggtgatggcgcccgccgttcagccgccgccgtccccgcccccgccgcggcggccccgctcgggccctccaccggggctgaagaatctcggcaacacctgctacctcaacagcgtgctacagtgcctcgcgtcgacccctcccctcgctaccttctgcctctccttccggcactccaatctgtgtacgaaaccctagctcatactttcttcctgttctaattgattgtatgtatttgggcgattcgccaggaagctgatatgttcgcctgttggcatgcaggcaagaaggtgttgccgaacaaggacaaggagtgtgtgttctgtgtggtggaacggcagatctcgcggctgcttcggaccgaagcaggggcgctagactcgccagcgaagatcatacgctgcctgccgctctttgccgagcatttccggtggggccgccaagaggatgcgcacgagttcctgcgctatattatagacgcttgtcacaccgctggtctgcgcatacgcaagcggctacctgcgtcaaacgccaatggggacgctggcgaggaggaggtccgggtgcaagggccatatatggtgatgaaggagacatttggcggtgcgctgctcagccaagtgaagtgcctcacctgcaagggagagtcaaacaagaccgacgagataatggatatcagcctcgacctgcctggaagcaattctgttgctgatgcgcttgcccgtttttttcagcctgagatattggagggttcaaacaagtacagctgcgaaaggtacattttatccgctagttagttgctgataaattgtcaagtggttctaagtcgcctaggcagtacggacgtgggcatggcagcatggtgtctagctccttgtcacactacgcagcatgctggaggcaggatggcacctagctcctaatcggactatgcaaccgctttcttgttattaccacgttagactggatagtgacacgtagcgtgagggcaaactaactacttttttaactgtattttggtatagcttaattagggcttgtttttgatgagggatctagatggaaatataattattctaagtccaatagtaatttttttatttagtttcttgaaaaaaaaacacactaatgttttgttaaaaaatctcaaggtattttgttaagaaaaacaagtgtattctggatattttgtaaaaaaagttgtagtgttgaatgcctaggttttcgaatgaaatgtccaagtttcaaaatctgctaggaatgtttttgctttccgcttgattggactgcttaacccctgtggaaaaggtaagccagttacgttttccttatatttcactggaatcaagttttctgttcaaatttcctggaagatttcttatcagggaatgattgatctagtggtcgtgtgcttgcttaatcttgctgacaacggctttaacatttggtacatttacaaaaaagaacctgtgttccaaaggaaattggaaaaccttgcccaatttggaggtccaattgcctttcctatattggcagtggtccatccaataatttataagaaaaatcaatatattatataaaaagcaatcattatacattttacaaagtgcgcactcacttttcacaaagggaaaagtaggtaatagatagctagcctctttaaccttgctcgttgaggtatttcccggacggggcagtttatgcttataaaggaatgcaaccctgccaaccacacctttagggtcttaggggattaaagtgagctcaatacgagaacctgttaatattaactgtgctatcagtttccatttatattcttttcatgaagccactataatgcttgcccattcatagttttgaacttgggtttccgaaattcttcttatgtgttccggacatgccctaacttgcgaaaggcaatttttttttgtatcgcagatgcaagaagctcacctcagcacggaagcaattgtttgtccttagggcacctaaggtgctcgtcatacaactcaaggttatcaatcttcattcctgatatttttattctatagaacttgttattgattaagatatgttgctgatgacctctgtttacttccattctggtttgttgccactagagatttgagggaataaatggtgggaagatcaacaggaacatagaattcaaagagactctctttctttctgacttcatgtataataaaaaccaggttcagaatatcctcttgattgttacattagtatttgttgcttgttctacatgtagttaataatgtcaaactagtcgtggaaacaagttatgtcaatcgtagcaatccatcaagcagtgaccacatgctggctgtttatgtaattttattgtgctacttttttgcatttatgctacagcatgaagtcataaatctttaaggatcattttttttctgcaattattgttaggtgaactctccaagaatgttgtttaggatcaagaaattctggattatatatgtcttatagttatattttgtggcgtttatgtggtatgaccctacaagagcttcataaagttgcaaagaaaagttccatagggtcaaactacatctggactatgacacagcattttaggattattcttcacttgaaatcactttcatccgcatttttcattgtttgtttttaacatttctgctaatatttcataccaagaatcagatcagtttgttttaattatattgctttgcatggatctgcaggattcactgccagtatataatctttttggcagtattgttcactcagggttctctccagattctggtcactactatgcgtatgttaaggtaataataggcttttccccagtacttaaagtcttcaattattttgccctgacatctaactaaatgattgttgactatgctcaggatgctattggtcgctggtattgttgtaatgattcccatatctccccctcaagctctcaggatgttctatctgagaaggtctacatcctattctatattctgagtaccaaaactcaaaagcctagtacaaatggttactcttctagtgcagctaaatcttccaacagcaatggaaatggcatatcaaatgccacatctaatgagcccctgaagataccactagtaaaacagaatggactatgttctagtaaaggtattgcaccgccacccctgaagaatggcaagattgcaccaggtatgcacctcaagccaatccacttgaagaataatggaacggggaaagtttcttcaaatggcaaggcaagcatcattccgggcaataagctagaagttagtgagggtttaacactgccagcagtgaatggccgtgactctggaaaatatgcagaacccggtaaaatgaatgctaatggtagtgtttcttgcaataagacggatgttaattcacagagagtgttgcccaatacgaatggaaatggaaatccaattcacttttctgatcttcaagagaccattgatgctaaggctacatgtgctgagcaatattctgaaaagtcatctattgccagtttggaggattctaaaaatcctgtttcatgccatgaaatgtctgcagtcatagtaaaggatgtggtatcttcgggtaaggacagttcttccttgaagcaccatcttgaagaagggaagtttaaggaaatgtaagtctctaatgggcaggaactattttgcttttgttatttgtagctatttccatgaagcactgattgtccattctgctttatcttttctctagcagtttcagatgttatacaacttgctgattgtatgtctgaaattttatgaagttatactaacaattttcatgctacaactacaattattcacacatatttaaaaaatgtttactgcagtttgtagtgtatgttgtagaatcttcacacatattgttcattggaggaatatgtaatggttgcctttttttttgtttttgaatttggaacatctttttgttgaacttactgtgcgttttattatttaattaaaaacaggcttgctgaatcggcatcttctgagcttcacttgtctggttgggtggatgatgtccgtaatttcatgcacactataaagagacgccgtctacaaaatacaggcacgcctcaagatagtgacacaatgaggtactttgatgtgacatttttgtgcaactttatttttttttcttacaagattctataggtggataagctcgtatgcctttattctttggttgttttgctagttatatctttttgtctggaaatgtttccttcatgttctgcattattgccccaattcaaccttgatccataactatgcgttgctagaattttggtatttcgtggctgcagcatcagtattatagttttagttactgacaaaatacccatgctttgctatgggtaaaagaaaatatatattatgtcaaagacatgtttgcttatttgaatacatgatattcatttgattcaaataaacattagactattgtataatatcagaaaatataagggactaatttgaaaaaagtacaaaagtagtggtgcactagtgtcttttatagtactctctccgtttcggaagccccacactgccacacaagtcatacgtcaaacatgattcaatggcttccatttctcttctgtgctattgcttacatcattcaatggctctaatatttgtatatttctctctttttttggcaatgcagaaaggagctgataagcgaatctggaagaatatttaggtcaaaaattccagaatcgctgagggagcatctcattcaagccctgcggtcatattaccaggacaaattttcactgggaggataaattttgtgcggcggttcattagaaacttaagaaaatgtatctgtatttaccattttgtagaatggcaaattgatggtggatgtatgttccatgtggtatatgtttgctctggtaattacctgtttgccttctttatttatttattactatatattgctctgcattgctaacttatcttatgcttggcggttcaggttcaacggaatcctgttggtcaactaccagctccttgtgcggcttatttttgaggcatttttgttatccaaatgaggttgagacgtagagtggccaaattacatgtaaaatattgtcttctttttgctgttgctcctgattctataggcttaaacaacaccaacaacccccattccttcccttctgtctagaatgtagaaattgttttttcccttctgtacaataatagttcgcagattagcagtgtatggggtttttgacctttactgaaggaaaagcccgtttgtggcttcagtactgggtttgttctgaattagtgtccattgcatagaattgctggtaaaatcatcagaatataaattatccaaaagcaacatgtcgtttggacaattagacttaggacttgttaggtatcgcgccaggacaagcatgaatgtttggttagctaggggaaaaaatagcttagcatagcatccaaacaggcctacatctattagttaccatgttcactgtgctgatcatccaattgccattgctttgactttgcgtacagcagcacggacatttgaacatattgctggttggtgcgtaatgggataagagagcatcgaaaatgaaaaaaaaaagaaaagaaaagggaagtagaacaataaaaaggggtggttcatgtttgcttgtcgctggcgtctgaattgttcttcgtgtctgcatcattttcgaatcggcgcgtgtaagctaagaaagcggactgaaaacctttaaaatcggatatccatccccgttaatcattgaatcctgaaaacaaatgttttgcatgcattgtacatcgaactatcaatcgacaatcgttcgccatcccacataaattgcatcttgcctgtttcaaaggtacaaaaagacaaacgatcatcttcaagtcctcgaaaacctgatgctaacatttccaagatcaaaacggtgtcacgagctcgaattatttcggcaacttgcttttgtattgttggaagttggctggccagcgtctcctaccggagcaaacgagccaaggagcgcgagcgcgacggcgagccgctcgatcccgcgcaccgacggctcggatccaccctgccgtcgccgccgccgccggccaaccaccgcgggcattatccggtattccggtgcagcgcgcacgtagtacgctacgtagacgtgagctggtttgtcacctgtcaacctcgcgctgagacgagcggcagcatcgccagcgagcagcatcatatcctaccgaacgaacgcccatccaccaccaccgcgtttcacctttcacgccaccaccgccggtgagctgtgtgatgggccgtactactgctggtgtgtgttgatttgatgctctcacgagctcgtggtggactggtggtggtgtttgtttacacgctcaaagattaaacaaatatttgccgatgggtttgttggtcagtagtgtgtagacaaacaacgcaattatctatttcgtccgttttaaaatatttatatctaatatacgacgggatactattttagtataataaatttgaataaagaatattctagcattactatgtggtaatattttagaacggaggttgtactcctactgcaataaaaaaataacataactcgaacacgaagtcgtcacaaaggacctgcctgcttcccgtcggcacatccctgttcctgcttccggcgtgaatctgaacttgtttttgtaagaagctgttgtgcttaaatgggggtacatagtctaagggttcctttaatctgacaggatgaacaagatcatttcaagaagagcatgcaaaagtttttattcacttaacaaaggaggatttacaaatgcgaattacagttcggttatcacgatgatcggccgtatcgattgagttggtccagatttataaaccgccaggttcaaaacaaattcaaaccaaaattttaacttttggtaaaatttatttgagttctacccaatttcgtcgataaccctagctttaactgcagtagtaaagaagtacttactgcacttaggctgagttcggcacttcatttccctaactcacttctttcgttttacttatacaaaagttgctttaaaaatcatattgatcttttttttaaaaaaatagctatacttaattaatcatgtgttaaaagaccgctctgtttttgcgtgcaggggatgggttctcatcttgcactgctgaacacagccttactttgtctactagagtattacttctatttcaaaatataaaaacttagaatcggattaaacacatattatctaaatttgttgttttagaaacactaaaatgtgtattttagagtgaagtcggtactagcctctgccttgcctagagattcctggcggtcctggagtaggtacggcgccgttaacatcccatcagccatcaccaggagtccaggaaaaggaggcaatcagccgtctcctgtctcccccgtctccgtgcgggcaccgcacggcatctgcggcatctgcaggcgctgcactgcagcagcagccacccccaccacatccaccaccatttcccaagggaatccccacccgaaaaggccgtgaaaccggtcgttttccccgcaccccccacctgcgccttcacctgcgatgccaagccggcaggcagcggcgccccctccctcctcgagatgccaaagcacgcacgcacctgcgcgcgcacacgaaagcccgcggcctcgcacggctcggctcggctcggctctcccgaaggaaaggagaaaagaaagacggggagagaaaaaaaccgtgcgctgcactgcaggcagcatcagtgcatcaccaccaactggcgttcgcgtcccctcgctttatccaatttacaaatggtctttattaaacaaaaccgatggttttcttttgaccctttttgtcttcattaacacaggaatctcgcgtgtattgtgacagatatttgtgtcattatgtgcatttcttgaaatgtttttttggggtataatttcactagtagtattttaaattggtttttaggctaaaaagtgagtagcatcttttgtccctggataatttactagaccttaataggagtattcagtacgattggcattagtgaggatttcacagtttttaaataaaaaaggagagaggactgacaatttgcagctcgcaccgacactgcatagataattggcgtcttcagaactgacaaaactgacttttgtttttaaaattctctcttcaaatttgtttgtaatttgagaaaatttgagggatcattctgcattttgccgaataaaagcgagtctgcaagagattgccaaccgtccacctctctctctctctctcccacgccacgccacgccacgcttctcctcctccagatccggttcgcctcgccggcgatggccgaagatccggcggggtcccgccgctggcggtgcgacgccggcgacgagcacggctgttggctctcctcctccgccggcggcggcggcgacgaccacttcgaccgcctccccgacccgctcctgctcgtcatcttcaaccgcatcggcgacgtcaaggcgctcggccgctgctccctcgtctcccgccgcttccacgacctcgtccccctcgtcgactccgtgctcgtccgcgtcgactgcgtcatccccgacgaccccgcgtcctcgtcgtcgtcgtcgtcctcgccgtccgccgcgccatcctcccctacggcgtccgcgcgcgcgcgcaccgtcttctcccagatcgcgcgcatcgtgctcggcggcatcgtcaagcccatccaggcgctcggccagatactttcccccgccaactccgcctccgtcctcgcagcatccgtcacctcctccccctcctcctcctcctcctagtcctccttttagccgccgcttcccggtgacgtgtcgcaccactcgccatcgaaggtgctccgctccttcaagaagttacgccgcctgcggatcgagctccccgccggcgagctcagcatggaagaaggcgtgctgctcaagtggaaggcggacttcgggtccacgctcggcagctgcgtcatcctcggcgcctcctccgccggcaaggacggcggcgcgggagcagctcccgctgttgactgtggcgagtccgacgagacagggagtattccggagtcgttctacacgaatggggggctgaagctgcgggtggtgtggacaatcagctcgctgattgctgcgtctgcgcggcattacttgctgcagccgatcattgccgaccacacgacgctggagagcctggacctgacagacgccgatgggcagggagtgctcaccatggacaagtggcagctgcaagaactgcgggtgaagccggtatcggcatctgggggctcacacaggacgctgatgccagcgcttagcatgcggctgtggtacgcgcctcacattgagctgcccgggggtttggtgctgaatggagcaacattggtagccattaaaccaaccgaggaggcaacaagggacacggttgggagtgggattgctgggtctgcaggtggatgctgggtttcagatgcctttgaggagccgtatcggacagccgtggggatgctcctgaagcggaggacatatagccttgagatgaactcgttctaagctgatggcaatttggaagttctatccgtgaggtaaattctgcactgcattcaatactatgtttgtctaattatcttcagcaattgctgtttgcgatgccatgctttggcttctcacattgtagcatttgcttcaacaacattgttgcttattcgtggaaaaattaacacgcgctcaccagtataaacttgcatagtagtaaacagcacgagtcttcgaatttctgaaatttggtttatgaggcttgccatgacttcagttaggttgtcataatcaaacaaaatagcacaacctttcgctaatttgaatgcgaggttgtaaggagttggaggagatctgttgttttagctgactcgttatatccttgagtcttgtggttattcctactagtatatagcaagcttcccgtatcagtttacatgatctggatatgcatttcttggctgccaaattaatggaacttgattcacatcatatcttccactaacatcatgtgctttgaaaatacatcgttttccacttgacatctaatcacgattttctgtatccagcagtaacaaatgaacaaagcatcattcatttttcttgaagaatactctgtagctgaaagtattcttttttgcggtaggcacaataaccttcactgaactgcactgaaataaataaaatcactcatcagtggtgatgtacaaaacatatatcgagttttattttattttttgtccatgttgcttatgagaattgttcctgtaaattctgagagtctggcaatccaccaagtttacatccagaaacaaaggggcgttgcatgagctactgtctttctttgcaactagtagaagcaaaacaacctagatgaccaaccctctttacttaccttaatgtattgttacagggtatgaatcacgcataccaatatgtgccacggtctgtaatcttttgttgttttttcttaccattcttgtataagaactgtagtcatcaaggaccatccattccattgctagtttgaaattatgcaattagggaatagaaaagtaccaaaaagggttaggctattaaaaggtgtgtatggtttttatggtgagaatggtgttccaacatttatgatctatgtactgatcatttgattgtacatcaccaccacggaatcgtggatcacccagtatggccccacatgatacatactttacttctaaataactaattacttaaccagttctcatggtggaatcttctgcacctccttgtattgttggagggcgtgtcacatgccacttccttaactcttgagattcgttttagccgtagatctgctgcacgagagaatagaaagaggaaggaagatcccacctggatgcaggatccacttgttttttttaaaaaaaactttatagatcattttgaaaccctctgaaatagtcccctttcatttcgcaaattgcaaaaaggaaacaaaatcagcaattttacttaagaaaatgtccaatgccttgttaactcatgcatgtgcacttggatacttgatgcaataacaaagatatttgaaaagcagagaacatatattatgtttgcattatgcttgttgtgttttgcaagatcaacagttccaccattccactgtatgtttccatggtgtagtagtaagctttaagcaaccaatggatttgtttttggcgtgttgctaacatcttatatttctctccttttcaggatgttaatttattgcaagttgcaactcaaagtactacgcggcataagaaatggagtagaagttcactggctgcctgttttactccggcacacgccctacccagacatgctgcaagttcttatttaacgcactacttgtcttgagcatctgtcagcaaggacctgaacggaggctatacaaccgatgatgacgagaagccgaacatgcatcctagtttgttggaattgctgggctactcaatgttgagcttgttgtttgcctctttgaggaagcccgtacctctcccagacgttggtagcacggataatttgtgccatgccaagctgttaagtgctaatcctaatttatcttccagtactcaggagtcctgtaccgtactttttgcagaaaaagtttgtagtagtacatgcgaggttactctgtttctgtacatcaatattcaagggcacaactagcagaatcttgtgtaattgagcactgacgtacgtagcattatcaattatgcagtgaatccaagtgcttacgcatgcatgtgtttttcgtcgctgcatcaatattgctctgcgttttcctcatgctgctcgatgtatgtcgtctcgcgatctgcgaacagtattttggattggatggtgttgtttgtcgcgcgtatcggtgagaaactgagtataatggaaagccagatcgagatcggtggcatcgccaagcgcaagcggttgcctcgcctggagccggacgacggtcgcctctggtcgagtgcctcccgtccgacgcacgcgggatatccgtgagctagcgccgacggaccacactgcatatgcttcgcgatcgatcacggattcgcaggcgcggagggagccacagcccacagccatgtggcacgggacagcctgagctgccgggggaaggatcatgaagaggaccttgaattcgttcgtggatgctaacaatcttgaacattgccaaaacttatctccactgcaaaatttggtaattatcttctaacataaagctcggcaaaagtaacaaacaaaatacaacttgtgcttctcgaccttatcaaatattgaga

SEQ ID NO: 5937 - DNA, 8758 bp, Oryza sativa
tcaaattgaagagaagggtgatgaagaagatgtgcatattggtggttcatttgataagctgggtaatgcaagtaatgcagctcagcttgtcaatacaaaagcaacaaagcagaagagaaagaaaacaagtcccagtacaaaaaacagtgcaaaattgtccaatcgtgctgagccctgcataaaaaagtctgatgccaatcaacaaggttcaaatagacgtaaaagtgctgccctaaaatcttgtcagaaaagcagcagtgctgtagggaggaatacttcaggtagaagaaacaaggcctctagcaacagcaagccaattcatggctctagtgataactccccagagtcatatcttcctaaggagggtttggatgttgaagcacctgacaaacccctttctgaaaggatccaaaacttggagaaaactagtcgacgaaagggaagtgcaaggaagctggaaatggcagggaaaactatttcagatactacagagaagaatagtgagccaagaagtaagagagtcagaagaatgtctgaccacgctatagctaaaccggttgaagttccttcaggatctggaaatgaaacagaaataccacagcttcacaccctcacaaaaggcagcattcaacgcaaatcctccaacgctagaagacatagcaaagtttgtggagaacaggaaggtaagaataaacttgagaacacgacaatgacacctattattttacatgggaaatgccaaaataaagaggcagtatgtacagctccttcagtaaggactgcatctgttaagtacaagcaagcaaaatttagcgaacaaccagattgttttggaacggagaactttggaaaccttcaagcatgccctgcacgtaatgttttactgaagaagtgtgaggtatctactttgaaggtttcctgtgctttctgccagaccgatgtcatcacagaggtatcttctgacttctgccgtgtttatatgcaaatgtccttttctccaaatctaacatattccctgctaatgaacatactcctagaagataaccaaatctccctccttttctcttttaggagtctggagagatggttcattatcaaaatgggaaacaagtccctgcagagttcaatggaggagccaatgtggtgcactctcacaagaactgccttgagtggtttgttatcctttctagtgcaagataatatcagaaaaaaaaaagatttcagtatgcaatattaatctgaatattttttattattttcttgaagggctcctgatgtctacttcgaagatgattctgcctttaatcttacaactgaattggcgagaagcagacggatcaaatgtgcttgctgtggaattaaaggagctgcacttggatgctttgagatgagttgtcggagaagtttccacttcacctgtgctaaactaatcccagaatgcagatgggataatgtaagtccatatggtgttctttatatatattttgaggcagtggtttcaactataccagaatcatttctgaacgtttgacagccataaatctgtaccttattgttttgtttcaattttttcattggcaggaaaattttgtgatgttatgccctctacatcggtctacaaagttacccaatgaaaattctgaacagcaaaagcaacctaaaaggaaaacaacactcaaagggtatcttttgaacctgttgtttgaaacatgtttcttaatggttgaacattgacatgtacgagcacttactgtagaataaccggcttttccaggtcatctcaaataggatccaatcaagattgtggtaataactggaaatggccatctggatcaccacagaagtgggttctctgctgctcatcactttctagttctgagaaggtgctttcgaaaattagtcttattttcctgaccctgatcgaattaatggcatttccttcatatgcattacaactgaaacaaaatgaataaattactcaggaacttgtatcagaatttgcaaagttagctggcgtgcctatttcggcaacttggagtccaaatgttacccatgttattgcatcaactgatctctctggtgcttgcaaacggacgctgaagtttctcatggcaatcttgaatggcagatggattgtctccatagattgtaaggccatgtgctactaatataactgtgctgaacagcctatattcatattgatctggtgccccttgttgctaactgacaactttgtgtcataggggttaaaacttgcatggagtgcatggaaccaattgatgagcacaaatttgaagtcgctactgatgttcatgggatcactgatggtcctaggttaggaagatgcagggttattgacagggtaaacatttcttgccattgttatgtacctcattttcttgcaaggatcactaaaaaaatcttttgatagaacaaaattggtgttaacctgaaaacagtgccaaatctacttgtccgttggaacaattttagcttgatataaaagaggacaagcagaaagtaccaccaacatgatatgttgctatgaattaaaagaaacaggccgtaatacttcatgcagccctgcacttatgcatgccatagaataaattcatagacctggtgttgacaattccacacatttggaattttggatgtgttctaacttctaagcaatctcacgtgggtattttttacgcctaacaatcacattgttttttgttcttttttacccttgcagcaacctaagctgttcgacagcatgaggttctacctccatggggactacacaaaatcctacagaggctacctgcaagatctcgtggttgcagcaggtggaatagttcttcagaggaagcccgtatcaagagaccagcaaaagcttcttgatgacagctctgacctcctcatcgtttacagcttcgagaatcaagatagggcaaaatccaaggccgaaaccaaggctgctgatcgcaggcaggctgatgctcaggctcttgcttgcgcttctggaggcagagttgtgagcagtgcatgggtgattgactcaattgcagcctgcaatctgcaacctctttgaatctagaagactgcctggtgccaaaatgcgagttcgatagagtaagaaacaagatagaaatctaagatgcacagggctttgtaatgagacttaaattatttgaaaataagtttactatgcgttgcaaaagaaactagactgcatttctatggaagttgactggatagtcatgcgccagatggttttcctggcctccttttgtaatccgttagtgcacaacacaaacatacaagaatgatggcatcaggcaccaaaaacgtttagcaacaataacaaagattaacaagataattcttagtagcttattgaaaacagaacttgagtaggcttggcgagctggatcaagtgacattggccctatttgggagagttaaagattctgagaatttgatggagaagctaggttgttcttataatataggtgacaatttgtattgtttggagagttgtagattctacaggaagttgtagttaccggaagctccccaaacagacccattatcagtctttaggctgtgttctaatgtccaagttcccaacttcagattttcaatagaaaaagttgttgtaaaaaaatcatattaatctattttaaagttttttttataatacttaattatatgttaataatcaaccccgttttccatgcacggggaaaagtcggaacatagccttataagttaaactctttagacccaaacacttggcccatccacctttacaatctttcacaactaactcggcccacttaggactcacgtgccaaaaacatggcgtcgccaaacaaaaactatgccaaagttatttgtaccaaagcgtgtaaatttcaacttgttgttctgatagtaactactctcaacttgtcaattactccctccatcctaaaatataataacttctccaccaacattctcttctcaaccaatcacagccctccaccattcaattttcccacctgcctccacttctcctccaagcacaacattcctctatttaatcctaccaactttattaataaccgtgtccaactctaaaaatacttatattttaggacggatggagtacttatactgtgactgcaatttactctttattttactattagttgccacactattcacattacacagttagttcaatggtgatctaacatacccattatcggtctttaggccatgttctaatgtccaagttccccacttcagatttttaatagaaaagtttttgtgggggctccagccccccaacatccacattgtatccgcccaatggacaaatgggatggacaaataaggagaactgctatattgcatagtccccatctttcagtagctacggagcaacatgtatctgttatcccattgttttgcatctgcatcgtaagaatttttcgctatccttgtcggccccttgttcaccataacctactacgaattagacaatggttttctccgttaagcatggattgtcgtaaatagagccaaccttgtatgatatgaacgatgtcggatccaccacgacgggccgatgtgccaccgctaccatcagcgcgagctcactgctgttgtcgctctgcttgtaacttgtgatcgatgtggtgtggtgggcgagcttggaggcatcacagttgcattccttgcctatggatagtctaactgcatggtgatcccgtcattctcggcaatccactccaatgccctcctagatgtgtggttcaaggcgatgtcggcgtagtccaccagttgctgctcagatagagggacgaggtgctctgtcttgatgtagtgggcgctctccacagttgccatggccacgaaggcccaacacgaatccatattgtccaacttatacataggcctggtttagttaccaactttttcttcaaatttctaatttttccatcacatcaaaactttcatacacacgcaaacttccaacttttccgtcaaatcattccaatttcaatcaaacttccaattttggcgtgaactaaacacacccataatccacttacataaaatttattgtttatttcataatcaccaataagactcatggtgtaagcacatgcaaggtttgccatttcgttttacatatttatattggggctaaaattttgaaatcttagaaatttcaggacacaaaatttgaaatttagatagattttgattgagtttgaataaattttgaccatattcaaatttttatagaaaatttcaagcgaaatagtttcatgccaggggtccgaaaatttggaaattttgaactaaaatttcaaacgctaactacaaaagcatatagttactagtgatatgatactccacatcacatgtcagagtaaaatattaagggtcacaagttaaacaaaagatagttcataaatgcctatggttaatggttaatagtacctcctgtcacaaaataagtaatgttttagacaactacacggtcaccaatgcacttgttttattataatattttaaaattttatttaatataaatctaaccatattatttttgaaagttggatcagaatatttaaagaaaaattgatcatcaaagttgtattccaaaaatttgtgaatgatggagtacaacattggagtagtacactccaatatggtgatcgtggcaacgtggtacctcaacttgtttcaatatggtgaccatggcagcgtaacacctcaacttgttgagttccatggtgatgctctccaattctcactcgagagaacggggagggggcatatgtcccccacgaccaaaaaagctatctcatacgacgggaaaatcaaccaagcctcatacgacggtaaaatcaacggtcttggtctctcgtactccctcctatatataatatatttgaatatattattagacaaggttttcaaagttgaactataaaagttaaatatagtatatttttactagggaaagtgaaacaacaatccaggccatgcttcaaaattttccattccaaaacatcctggttgttcaatatattttatgtgattgttcttaacatcccgccatacgacactataagcatgcaagtgaccagcagcggagccaaggcccggccaggctccgcctaagatgctgtagtagattagcacttcattaatcatgcaacaatagaatattttttaactaattaccctaatgaatgtttgattagttgagaaaattagcaaagcatataattaaggctcatgccatcacatgtttgcattctatatatgccatcacagctcatatacaagcgtacagctttgataatacacaataatcgtcatatcgattttaactcttacaccaattagctcgtactgttaattttacttgtgtcaatggtaaaatggtccgtagagttgtacaagttcattttcatttgtagtactagtcatctgtcagtggcttgcccggggtcaataaaattttttagatccgctactgcaagtgagcatgtggtcgctcagtcactcaaaacaatgtgtagattcatagaagctatgattatttcttatgcaggataatgagtaccggaaccattggtctattcatcatttcaaacggtctattcatcatttcaaacttgcagctcatccaagtcttcattggcaagcttgatgcaaatgattcaacaacatcaagttcatccctaaggatcataaacaaaagataaatacatctagccttagaattatttgaatagaatgctgtcaaaaaacaagaatttgctgacgtgtttaaaacatgcgaaaatcatcatcaaagacattctttttgataattcatcatataccacagttcaatctagcatgtatatctataaacctagaataacataaaaaattacaacgagcaatcagcgtagccttacagtacatgggcacattattagcattcgcatttacctctcacccagatgtccaatgtagacaaggacacttatgagaccccccgaactgacaattctgctggcagcttgcaaagccagctcagttgtcttagctacagtgatcattgatttatctcatcctagaagatagcccaagttgaatgctacaagcctagaaaataaagagtccttaataattcaatcaaaacataaaagatcttaattacttgatccaataatttcaacaataatctgttatgaaccctgttaacaaatgagtaggtagcttctaataccaatgaatcagaatggctagctcacctgacagggaaatctttagggacaacctcctccattctactttgacagattgtaaacaacttgacaagttctagctgcaaccaagaaaagttattgcaacgaccacaaaactgcagacatttcatgaggcaatgatgctttgtttctatatactaaggtctgagcataacaccacaaaaagcatatagagtacccaaaaaaactcaacacatatgagtatagttagacctttctttactgtatatcaacaacattatctgttcattttcattttcatttctcatttctaaagaacaataaaaatatttgaaaatgagagagaaaaataaatgtatcccgtatctaggatagttaatttctaacacaatgtagcagcaaaatcattgttcccacttcccctgaagttgctgcaaatgcatacctcatggctattgacggccattttcagaaaagaggaagtgctggctatcgcggactcctgaatgtccaacccatatacacgaccttgtactctttgtctctttcatcagctaccattttaagcatagcgaatgtatcattgctgttcctgcatgtggcatcaaccacagtatcccctttccgaacaatacttctccacaccctaatcatacaaccaaaagacaaagatatgaatagctaaagcgtacatgtattcttttacacatctccggttaaatcctagagagcatttcccattaatggaatttccatcccatactctgtcaaaaaagaatcccatttcatagttgcccagtacactgtaaattgcactaatgtagtagtagtgcttacttttaggctgaaaggtaaatatctcacgcataacagaaacgaaattgctgtacatttgtcgaatgattttcggtggctggattcgtcgttttttcggccgtcccattacaaactgtccgtccgtccatcgtgcaagccagccagttgctactccctccgtttcaaaatatttaacactattgtctttttaagtacgtgtttgaccattcgtcttatttaaaaaatttaagtaattatttattattttcatatcatttgattcattgttaaatatactttcatgtacatatttagttttacatatttcataatttttttaataagacaaacggttaaacatatgctaaaaagtcaacggtgtcaaatattttgaaacgaagggagtatcatacttaagctgacacttttttaacctaggaaaaggatagctatccctcgcccccgccgccgcagctcaaccagcttccgatcaagacacaggccaaatttctcggtctcggagaatgtccagctcgtttggctcgcgagcttgcagtcgaggaggcatcgaaggctcgcgagattagatgatttttgctaattgagtgctcatgggaagaaacaaatcttgggaagaccccggggatcctctagagtcgacctgc

SEQ ID NO: 5938 - DNA, 17342 bp, Oryza sativa
  unsure (1)..(17342): unsure at all n locations
ctacggctgcatccgggtgtccctcgtcctgtctctgctgctgctcgccgtcgaggtcgccgcctacctccaggggtggcacctcgaggaggtggcgtcgctcctcgccgtcgacggcctcttcgccgcctcctacgccgggtggatgcgcctccgcctcgactacctcgcgccgccgctccagttcctcaccaacgcctgagtcgccctcttcatggtccagagcatcgaccgcctcgtcctgtgcctcggctgcttctggatcaggttcaagggcatcaagcccgtgccgcaggccgccgccgccggcaagccggacgtcgaggctggcgccggcgactaccccatggtgctcgtccagatgcccatgtgcaacgagagagaggtaagcccaaagcaaagctccaatcatttgctccattgccctcttaagttggaatttcagattggctgttcattctcttgctatatgtacatttgtatcttcctggatcaaaatattcgaattattttagctgcaattgggattcgatcccttagttctagttctcctctgcgcgaattcagcaggaggattctgctgattttgtgtagactctgcattagattggtttggatctttgacctgtgttcctctttgacccggagatgttctgcattaacaacaacttgggtggtttctgaagttttaagttgctgtgatcttgcttgctcaatacactataacaagagcaaaaatttggtgtttttaaggttgaattttgccgttgggtgtcgtacctttcaagcatacttattgccctgattctctgtctggatgttgtcgtcaaccagaagacatgctaattgaacatcaaactgggcagcatagcgtactccttttaagactagagcgtgctacgcacaatttggaaatctgaggctcaattatctgagaggctaggccaattcaattgattccatttcatctggatgtttgcaggtgtaccagcaatccattggggcagtttgcaacctggactggccaaagtcaaacttcttggtgcaggtgttggacgattctgatgatgctaccacttctgcgctgatcaaggaggaggtggagaaatggcagcgggagggcgtgcgcatcatataccggcaccgggtgatccgggatggctacaaggctggaaaccttaaatcagccatgaattgcagttatgtgaaggattatgagtttgttgtcatatttgatgccgatttccaaccacaagccgatttcctgaagcgaaccgtgccacatttcaaggttggactcaactgaacaatgctggcagttgtaaacacgttgttgctttgcttctatgactatgaaccgtattagttatattttctgacatcttgaatgttgaattccaggggaaggatgacgttgggttggttcaggcaagatggtctttcgtaaacaaggatgagaacctgctgactagactacagaacgtaaatttgtgcttccactttgaggtggagcagcaggtgaatggtgcattcctcaacttctttggattcaatggaactgccggagtttggagaattaaggcgcttgaggattcggggggctggatggagagaacaacagtggaggacatggatattgctgtccgagcacatcttaagggatggaagtttgtcttcctgaatgatgttgaggtacaatcaataatttcttcgtggcttaagcagaatctgcattgtataaatgtcaaagactaataatttgattcatgtgatttcccttgcagtgtcaatgtgagttgccagaatcatatgaagcgtacagaaagcagcaacacaggtggcactcaggtcccatgcaattgttcagactctgctttgtggacattataaaatctaaggtacgatacttttcttctgtagcactgtgaaagctaaaatttccagcaatgcatgtactagcatagcctgtaactgtagtttctttgctagagtcactttcccaatatgttatgggtttaatgagaatttacaagatggagtagttgttgagaagcatcaaccatggtacctttttacatgtttgggcaaactttatgcatattatcttatattgaggcacaatataagaaaattgaacaagatgatgagttgctaaccactcaagcaagttaccaatgtccataagaattctctgtcggttcacttgattgaaatcatcaaagaacttatcacaatctcgtaccaggacatatactaattaagttttttttatcccttcttcatatttgatttctacctattagtccacagtttttatactgtttcattggataattaacctaatatcgctgcctaatttcttgtgcagattgggttctggaagaagttcaacctcatattccttttcttcctcctccgcaagctcatcctacccttctattcattcacacttttctgtgtcatccttcccatgacaatgtttgttcctgaagctgagctccctgcctgggttgtatgctacattccagctacaatgtccatcctgaacatcctcccagccccaaaatctttcccattcattgtcccataccttcttttcgagaacactatgtccgtaaccaagttcaatgccatgatttctggattgttccagctcgggagtgcctatgagtgggttgtcaccaagaaatcaggtcgttcttcggagggcgatcttgttgggctagttgagaaacactccaagcagcaaagagtaggatctgctcccaatcttgacgcgctaacaaaggaggagtcgaatcctaaaaaggactccaagaagaagaagcacaataggatctacaggaaggaactggcactttccttcctcttgttaacggcagcagctcgcagtttgctatctgctcagggaatccatttctactttcttctgttccaaggggtctcattcttggttgttggtctcgacctaattggtgagcaagtggagtgatagaagatgaagagtttaatggggttcttttttgtttgaaagaaaacactttgcaagcatcaaagggctctttgtaaagggaagagtgatgcaaatgttcgatgcttacacatggaagctttgatccctattctaggggtcaagattcatcacatatactgaactgtggagatgtagatagatatagtttggattaagcctgtgggatgcttttattccttcaggcaattcttttgtaagaatcttttgtgcctagatgggttcttcttctctcttaacaaactttaccttcaaatgaagataatacatgtttctaccatgtactttgatcgattaccttgggtatccatatacatgtcagattgtccttttttttcatccagtatatagaattaatcacttgttcagaacatcttctattgtcctcctgtttgttgtttgtgaatgaatgaatgataatagtatgttctgaaagaacttttaccttactcccaaatggagcccctcattaaggggcctttgctccatgctgtctttggctttgtcatgtgcattggctaggccaggttgttttgatttctgttactatcattgaaaaagacaagtacgcccaagtgtgctccttgaattgcaacagtccatgtggaggcaaataggaaatactacaagtgacctgtaaaccttgtttggcctgttgcctgatggtgcatgttctcctaaccttccaattgttattttcatatcagaagctacctactcaatatttcctctccactgaaaagtacatctgtttgatggcacggctcttgtattatttaccttcaacctctagcaattgttttcttgcccaatggaacgcacatctgcttgagaagcttctcacagaactcagttttgaggcagtgattcttctcctccatcttctcctggtccaaagtataaaaaaaccagacagctttcactgcatatcaggccagaaattctgaagatgtgatagggaaaatggatatgaaaatgctcgccggtggcgcgtgcagacaaggcacatggcgccgattctcgcgaggaaagagaccctgtgtccatcgctctccgagatccaggacataatcagacacccttactaggctgctgctgctcctccgttcgccgagttctcgtcgtcgtcgtcgcatgtcgccgtgacaccgacgtgccatcagcctccctcccccctcgttacgcttgtttttcatgcgctatcaccgcgatctcgtacgtattggcatccgggagaagagaagaagagagagctgaatttgaaagcaacgggtgcctgcctgcaacatgcatgggatggtgtgttgccctttgccatttgcccctcccccatgtgatcgcctcgtccagttccttaatctgctttggccgcgtttgactgcccccgcgcgccggcccgcgcgacgcacgcaggcacccggcgtcaggtgcggattttggtgcgtgcgcgactctctcgcgaggtacggcgcccatgcgtgtccccagatgcggctcacatgggctccatctcacgctgcccccgccgcgccaagctaggcagatgctgagatgctcccctccctcgcgctgtgcgtgcgtgagaggcgccgcagacgcgcggatttccccggtgatccggttggttttgtgctgctccactgggttggctgctgtgtgcgaccgtgactacgttgctctacggggccgtgccgtctgccaatctgttggcgcggtcggctggctccgcgatagattatactacccggcaacagcaaggcagctacagcgtctacagcctcacgcggcagcagcgatcacctgacctgaccgtccttcctcgccgttgaacatctcttgccagttttactgcatactaatagtgctctactctagtggttgggccaaatgaatcgccattggttgttcaacaatcaacactcagcggtcacgtgtggatgattagcattattgaagcggatatttgggatctcaagcatgatgataatccaaagtacggtgagcaaacagtagactcttgtcgtacgaaaagagcggcgacaaggaaacttcagatcaaacacagtggttgtagtacgtaccttgggttataacagcacgcccagagggctctatgtacaggcagagaggtcaataatacagatgtagtcgccatcagcattaacacgagctgaggcattgccctatcattacggctctaagcagggtatcccagactgagcaagtttgggggttcatcacttcatgggcctaataataacaaagtaatgatcccttaatgcgtatctgccgctactgaaatgaagccagcatgtgcttatgggactgtcggaaagtgatgattgcactgggagtctgggaccataccttgagcccgcctagctacttcgctatccctttattgccatcgtcatcgtcatcctccagatcactgaacgatacatcttcctcctgtcccagtgaagttctgttaccttctgtgccaaccacctcttctgcatcgtcgtcatcatcaggccattcatcaacttcatcttcatcagtctcggaatgaattttgggctcgatggctaaactcttggtttcatttttcactgacaactcttcttcaattaccgacttgtctactatttccatctctgtaattgcaatggggaacttttcagcctcgacatctggcgagatatcagaactgggttcttcgaacgatgaaacctctggttttccagctttgttttcaatgcttgaaggttgtatcactttctcttcagcaggggcagaggacataatcacagtttttgatgattcctcttcctccggaacctcagatcctcgcttattcttagtctgtaaactttgcagcaattcctcccttgcttgtaggatctgaatggaagagaatgtttgaagtggaatcagactaaaaccttggcatcagaaaatgtaaaccgaggaaagaagttgactgtgttacaacacaagaactgacaatgcgcccagctagtcaaaataaagctgcatctagattagagatactgggtatactaccctggtacacccttcaatttatttgtgtgtaaacataaggggtggagtagtggaactagatatggtacaagtccaggccagccaactattttgggctgcctttgcctatccatggtgataatgagcacaaattaatgggccagttccaggccttggaccatggcataggtggcccaaggtctcagtccaccgacaccgccactgcacataacagtacttgagggtagcccattctaggcacaacctgtatgcgctaaccaagtcatcaaataaggtatttcacatgtgaaggggtagggtggttatcaagaatttcgtggtaactaagatagtggtgctaaactactatataagctggaatggctcaatttcctccccttcttattttggtttaagaagctcatcatgcatttcaaggaatacaacagattccatgataaattacttgttaaaaaaatattaattgcacgataatggaattacctgtggtgttgaaagaagttcagcgtcttgcttgttgagtttcgagtgcagaagcacaaaatatatcttccagaaacatgcttcactcatatcagtagagcaaatggcagcttttatatctgacaggcttggcacaaggtgctccatggataatgcatgcacatactgagcatccgaaagttcaaagtctattaaaataacacatttgttagggagtagatcataacgttagcatacagtatgacatagtattatactgcaagatgtaaaatagtagtgttgattattatcttttgcagctttgattctcaaagaaagctggattttcgaaaaggacacgaagcattcaagaagtttgctgtttaaagctattaaacacggtactaccttctgatgaataaatgatattcttgagacattatatagatttgaacaatgaattcattgacagaactttaataagtatataaaaaatatgcagtccaccagacggccattatccaaaagaaagatgagatttgaagccagtgtacatacaggctatacttgcaaaatatatgcttgcactaatacaccataataaacttggtagcattcaacagaaacataatgaaatttcaaaatccagtatgatcttaatctgtttcatttcctgtgtggaactaagccatcttgtcattgtaattagtattacttctgaatttccataattaattcatatcttcctagtactattgagtcagtctcgaagaccagtgcacgaaataacggaacataaaatcaactaagaatgttaactttggaatggaaacatgagtcataaacaaaactctgggccctgataattgtctcctcaagtcaagcaataatgcacaaatccaacataagtactagcacaattcagtataacctgcccgattttccacagaacatgtggacatcaccaagtccagcatctactctttcaaattgttattggttttatatagtgaaatgatgagaatatttatcaccggttacgcaattttgctcaagttgacatgacagccctcctaagaaatcataagttaacagcaaagggtttcctgatttcccaactccaatgaattatcttcccacaaatcacaaccaaattcgctcgaattgagaccagaaagtacaagcattccatccctaatgcaccaaattacacaaagtaagtctgagacatcaccaaggcagtgaaacttaccatctgcatagcgctcactgatgaacagtgggaaatcgagccaagtctcgggcctggtcgagatgtgccgcacgaacaccacaacctcctcagtgacgccagccacgggctccccctcgtccgcatccccctgcccaaatggcaggagggaggacgcgatcttggatatctccgccaccgctttgttgctctgcagcatcgagatgccgctcctcaccctccccccaatctccgccagatcgctccggatccccgcgatccgcggcgactgcgctgactcctttttcccatccctacccttctcctnctcnctcccgngcggggtggaggactccgccgggggcgggggcccgaggaaggaggcgacgccccagagccggcgggtgagggtctcggtgagctcggagatgtcgtccttgacgccgcggcggctcggggtgtcgggctgctcggcctcgtcggagtcggggtcacgcggggaggaaccctccggggaggacgccctgtcgccggcgtggtcgggctcgtcggcgtcggggtccggctcgccgcgcggcgaggagagcgtcgccgcgatggagcgcgcgagccacgacattggcgcgtgcgtgcgtgcgaccgtgcgggtgcgtgggcgaagatggagatgggtggcgtggcgaccagccgaacttggggctcgtgtcgtggagcgtacgccgcgggtggtggtggatcagtctggggctctgggcgactcctggtgtgttccgagccgtccgatcggaaagcgatggccaagatgatgtttgttatcgggtgtgggtgggggtaggtgagaccgtgagcctttgagaggcatatcaagcactttcagaggtttatcacagattcagaattaagaatatggagatctagagtttgtggtcactttggtttgtacgaaatttgtgggaaaactggaggatttcaatccctatataggttttgtcactgtcatccattttggaatggagaattgggacattggaaaagcagaggagattttttcctaggaattcaaacatctgtgaacacctgtttttttccttagctaggtccgaagcaaatcagcaatggaagatataaaggaccataatttgaggacacttgaccatagttttgctatgattaacaacgtaacatcctgaaaatgtgtcattttctaatcttgcaccatgctgattcttatattcttaataaccttctaaacctaggaaaatataattagcaggacctcctaaaactaacttgcataaaacctctctggtatttagtcccttttgtatttttcatttaaaaacatatttggtatttcttgttggaattctgtttcgaatattaaactttctttcgactaaagctcttttattcaaaatttagtttgaaaaccatttttactattatgaattatggaccaagaaatcctccaattttgccttgaacctaaaccgaagtaattccaatctcattggaattaattgttagcccatcctttgatcttaaactcatcctttaattcttgatccaaatatccaaattcctcattttaatctagccatcaatttaatctctgtggcttgattttctcttcggcacaagaatagtattgttgcaaatattgtgaataattgctcttgtgctaagaaaattccaacttatactcttcattcaatttccctttttagccacaaatatacattctaccaattttagaattggagccgagcagctgtgctgaaagctgattgggatttgggagccggtgttcagagtacatgaaagctgattgcagaagagactttagatagcaacctgtagcttgtactactcccgaagagttttggttttctttttgcttctgcaatataaacggatttacatgcttcaataatatggtgtttgttgtgacttatgaacatggtgttatagacagggtttaatttttcgtttggccgattctatcggacatcattgatataccgaaatttcggtccgaaatttctaaaattttgaacaaatgttgatcaaatttaaatagaatattaccaaattcacaaaagaataaaaaataaaaaaatcggacgaaataatattgtatcgagagtccgaaatgaccaaaattcattccagaatttcttacactggttgtagacatacatatgtgttttacaatctatatatccatctgttcttggttagcagcatatttaggctgtgttcgggagtgaactctctgacacgcaaaactaaacagcgtttagcctataattaattaagtattagcaaaaataaatttgataggattaatatgattttttaaagtaacttttatatagaaatttgtttgaaaaaacacatcatttagccgtctgaaaagcgtgagcgtgaaaacgagggaggtgggttaggaaagtagagataaaatcagccttatctattctgtcttctgatgaaacaacggctcaattccatgtgcagtcggtaaccgtggcttggcgtccgttccaacgagctgaggaagacatcggcttaactcaaggaaaacgcttggctgcagcaatgtgatgggacacgcgtcgcgaactagcaatttcgcaccaggggggcgctgattgtcattttttcctctcttagtctctcttctctacagcacatgtatgtatatactatatatatatatacatgtgtataaattttgtatatacatatatggtttatatgcagtatatatatacatgtgtgtatatatacatataattttttatatgtacacacttttaatataaaaaaatatacacatgtatataaagtttatgtgtgtacgtataaaaaacctaaaatatatatatatataaactttatatatgtgtatacaaactttgtatacgtgtataaaatattgatatatgtacatataaaaacccacaaaatgcacgtatatacaaacttatatgtgtatataaactttgtatacgtgtataaaaaatttgtaatatatatgtataaaacacaaaaaatacacgtagcatacgagtatacaaactttgtatacatgtatataaagtttgtatttgtacatatacaaagttagcatacgtacgtattaaaaccgaaaaaataaaaaaacaaaaaaacgaaaacagaaggtacggaataaacacagaaaaaaagagagggaaaaaacgggagccaacgcgcagtccgccgcctcctctcatgtcgcgcggagggacgcgcgcggtgcggcactgccgcagaccattttttgccagccggaaaatctatctgtgcttataaatagccattatccaaagaacacaatccactaattagtcgaatccagagctattaactcctctccgttcgattggctcctgcgtctgccatccatggccatcttgaatcactccgacgccgccttccctgtagctgctactacgccactactcggccgccgcccgctggacgccggcgagttccggcgccagggacggcaggtcgtcgacttcatcgcggactactacgccggcatcaacgactaccccgtgcgccccgccgtcgctccaggcttcctcgccgggaagctcccggcgacggcgccgtcgacgccggagcccgacgcgctcaccgccgggctgcgcgacgtccgcgagctcatgctcccggggctcactcactggcagagcccacgtcacttcgcgcacttctcggcgacggccagcaacgtgggcgccctcggcgaggctctcgccgccggcctcaacgtcaaccctttcacgtgggaagcctcgccggcggccaccgagctggaggtcgttgtcactgactggctcggcaaggcgctgcacctgccggagaggctgctgttcgccggaggcggcggcgggacgttgctggggacgtcatgcgaggccatgctttgcaccatcgtcgccgcgagggacgagaagctcgccgagatcggcgaggagaggatcggcgacctcgtcgtctactgctccgaccagactcacttctcgttccagaaggccgcgcgcatcgccggcattcgccgtggtaactgccgggagataccgacgtgccgggagagcggcttcgttctcacggcgacggcgctgcaggccgccgtggccgcggacgaagcggcggggagggtcccgctgttcctgtgcgcgacggtcgggaccacgccgacggcggcggtggaccctctgcgcgagctgtgcgccgccgtggaggggcgcggcgtgtgggtgcacgtggacgcggcgtacgccggcgccgcgtgcgtgtgcccggagttccgccacgccatcgccggcgccgaggccgtggactcgttcagcacgaacccgcacaagtggcttctcgccaacatggactgctgcgcgctgtgggtggcgcggccggcggcgctcgtcgccgcgcttggcaccgacgacgacgtgatcctcaaggacgcggaccgcggcggcgaggcccgcgaggggcgaccaccaccaccacgccgcggtggactacaaggactgacaggtcgcgctgagccgccggttccgcgcgctccccctgtggctcgtcttcatctgaaaagaaaacgctggcttgcgcgccgtcgtgcgctcccacgtccgcatggcgnccgcgctcaagcgcatggtgcgcgccgacgcgcggttcgaggtgcccgtccgaggcagttcgcgctggtctgcttccggctgcgcggcggccggcgccgccgcacagctcgtcggcggcgacgagctcacggccagcaacgagctcaacaggaggctcctcgaggcggtgaacgcgacggggcgcgcgtacatgagctccgccgtggtgggcggcatgtacgtgctgcgctgcgccgtcggcaactcgctcaccgaggagcaccacgtccgggaggcgtggagcgtcgtgcaggggcaggccgccgccgtcttggccaccgccggcgccgccgctgacactgctcgtaccaaggaccacgccgccggcgacgaccatggcgcagatcagccgcacgcgatgacgacgacgacgacgatgggatgtcgctccggtccatgggagctgtgaactgtgtatcgaacactccgttcttacgctgtgtatttcctcttgggcaagtaaattggattacctttggttagagaggacagctggacatgccagttgttttttcaaaaaaaaaaatcgtatttgttaggcgagtttgaccggacaattaattataaattagtttttgatgatatgatatgccggatatatatatatgctgtcggtaccttttccattgttttggaggccgtacgtctctaaaatatttgatgatcagcgtaaacgttttgcacgagcttataaacaatgggcggaaacaaaaataaggcaattgggtgattgttgggcatgctcttagtagtaatggccactttgaatcaaaggaattataaaggaatttcataggattgaaatcctataggaaattttcctatgtagccatttgattcaaaggattgaagttttctaaatcctacaaaatttttatggaatggcttattgcatataggttttgaaggaaacttagcaagaggtccaacctcttggtaaaaatcctttgagtccatctctgacggagcgtggggctcctcaccgggagaccgcgcaggcccccctttgccggttcggccggggactcagggtgagattctaagctctctgtatgtggaaggttcgcgagaccggaaacacacaagacacgggcgatgtatacaggttcgggccgctgagaagcgtaataccctactcctgtgttttgggagatctgtgtctgaaggagctacaaagtatgagccaacctctcccttgttctgggttcccaatctggaaaagtccagtccccgatcgttctcggatcgttccccttttctaagtgggcaaggtcctccttttatatctcaaggggataccacatgcaccatctctcttttttgtgtggggacttatcctatcttttcataaatggacggagatttgtatggttgccgtctgaatgaccttctgatgggacggcccatacctacctccacttccgccggaagcaggcgcgacgtgggaacatgactgtctgctgacgatatgaccagtgtcagaccggtcacaaatcggtcattcttgtccaccacgcgtcagtttatcaatctgcatgttcgcccttcttcttcatacaatatcttgcttgtaatggttaggatgaagcctggcatatatctgaccaggactaacgtgccatctctgggaggtaacacgctagctccagctggggacgagcgcctagaagccctcgtcctgacgggatggggcgaggcgtgcgtcagatcgcctgtcgccacctaacccacgatctgaccggtttgtgactggtcacagaccggataaacgagcgcgctgcactgcgttacatgcggcgtgacgcgctcgtccaaaccgcaataaatgtggttaggtgagccccgctatgctcacctaccccatatacgcggcgcaaaacccacaaggggtcggggcgcctcggccctcggggccgaggcgggagcagtccgaccccctcggggagacaaagaggagggcgaacacatcaccctcgggcccgacgccccccgagggtgccaggccacgtgggcgattgtgtctgcctcaagcctctagtcatgatactcccggcctcatgtcaccgacaatctctctcatccaatttctatgtttttcctgcagtccaatcaaacgatcattcctgtgtttttcctgtattttgtaatcctctgttttacacttacatccctattagaatcgtatgtttttcctattccttcgtttttttattcctacaattcaaaggggccccggtgtatttgcttcctagccatactttaccattatttatcaataaatattgccacacttgcttaagttaatacgatcaaattattagccacaccttagcaaatctaagggaatcttgccacactttcataaatcaatgacatatgggacccaatttattagaaaaaaaaatcttaccacaactatgactataaccaacaactgtcaatataatcaaatatgtctaaccttagacgtgataatatgtgactagcaactaaacatgttaacatcccctaataattaacaaacaaacgaagcagataattcgttggggcctcctcatgcctcaggacactgtactggatctagggttggacgaaaagctcatggctcgttagctcgcttggctcgtggttagctcgtctcagctcggctcggcttgttaggaattgttaacgagccgagctcatgtatcggctcgttagtcataacgagctagctcgagctaactcacgagccgctcgcgagccaaaacgagccaggcatcactggccaggagcccaggcgtgtgtcaaggcccacgatgcagcacccacgataaagccttccaatgtcaaccttatcctttcaccgtggtaggtcaatagcaaccactcaattgactcctcccgtcttgtggcagcattgtcggccgtccagcccgtcctgctcggctgctgcctgagctttaggcacagcatcgatcgagggaagcacgaagccgtcgccgagccattggcgcgcgaagcccccactcccgtcgggtgcggccgcagccaccatcgtcatcgtcgtgtcctgcggagtcctcgtccctactgccgcgcaagtccccgccgccaagcaccgtcagccgtcgtgcggagccatcgccaaatccacgtgaagcaacccctgcgtcctgcatccatcatcgtgcagagaggccagtgcctccatttgttccattgatgagtgaactgatttgcatgcagctggaagttgggagttaaatgtttaattttctactccagtttgtttgatttggggatctcttgctttgcttgatttggggatcacttgctttgcgtttctttttctttttcccatcgattaatttgtcgagctaaatgcagatggattttggttggttttggttttattttggttggaggggtcttcccaagatttgtttcttcccatgagcactcaattagcaaaaatcatctaatctcgcgagccttcgatgcctcctcgactgcaagctcgcgagccaaacgagctggactcgagattacaaacgagccgagccgagctagacttttagctcgttaggataacgagccgccaggccgagccgagccgagccgagctggctcgatatccagccctaactgggtcaagggacaagagacgtcgcgattcagatctctgttgtgatttgcagctcgagaaatgcaaagcaatttcgtctgtacattccgattttcaacaatcaaagagatacggatatgtcggacgaacggagagggtacgtaccatcaaacaacttaattatcaaaatatggacgattattaatcgaaatctgatgtttgtgattcccgtccgctcttcatataagagcttcaagcgtacacgtctattatacgaccgacaaatagaaaatggctgattaatcgctaatgacggaattatgtattcgcaagcgagtgatagagcatgcattgtctaaacgtgacggatcgctcatggtatacgtataaacggccataccaaccgttgatccgtttaaattagatacagtaacggtaacgtaaacaacgtttcgtgtcatgctacagcttgctatacatcaaacggtggtacgcactcttgcaatataggaccataaacagtggttttgtgtgtgatctgtcctgtctaaattagatcaaacggtgagtagctcttaattaacttacagtcactataccgatccgggaccggggacatcgagatagttatgtgatatatgtgatttgtcatgatcccgaaagaggtaatatatcgacaattatagatacacaagatagatctgtcattcctatacatcgggaggacacaataataaacggaaaatggttctaaactctcgagtggatgtttcagtgttttttccatataatttaaatagttatatcaaattttaccaatcctttttttttttttgcagggagcaatctcaatatttgataaggtcgagaagcacaagttgtattttgtttgttacttttgccgagctttatgttagaagattaattaccaaatttttcgtgggaggataggttggagcttgttcaacattggaagcatcaccaacgaatatccagggctctttatgatccttcctccggcatttgaggctcgtccgtgccacatgggtgagggctgcggctacctaccttgctgctaatacatgatcgatcgcgaaccatatgcatttgttgtacgtgccgtgctagcttacatgatattccgtgtgcgtctgactggaggacttcaccagaggcgacccgtgctcggttacaagcgaggtacccactttgcgctgagtgatgccgacgatcttgatctgg

SEQ ID NO: 5939 - DNA, 23688 bp, Oryza sativa
gccaccccagggaggagggcgccagcatggctggcgccgccgcctccattcctgtttctctgtatggagttgcaacggtgtcatttttattttattttttcggatgttttttcacactcaggatcacgatacaaccaaccacaaaaaaaatttaaactcgaactaccacttagctaagtctgaaaatatctagcataccacttagtctactttgcaccttcactaaaattagaccataactcctttagtaaaaccctttgatcagcatgttaaacataatgcactctaccactatatgaaattacttaatctaattcaaaatataaccacatgaaatgacatatatataagttaaacagtacatagagatgcaattttttatttttatttcatttttttatatttttttcacactaaggagaacataggaaccaagtgtataaaaaataaactcaaacggataaaatatgtgacatgtagaattttccaaaactctaccgaaacggacaaaatatgtcatctattaaaataggcgtaactttctcatacggactcggaatcaggcaaatagtatatgcacggacatctacagaaaatgatacatccgattctcccccgctacgccgggttcggcgatattaaaacctccaaattccgcttgcaagattgtgttttcgaggagagaagtttttcggtggagctttggaaaattccacatgccacatatttcgttcgtttgagtttattttttacatggttggttcctgtgagttcctaagtgtgaaaaaaatatcaaaaaaataaaataaaaataaaaaagttgcacatctctctcctctgcactagttcggagagagaggagaggagaggaaaaattctacatgtcacatattacgtccatttgagttcaatttttctatggttggttcttgtgtgtccctaagcgtgaaaaaaatatcaaacaaataaaacaaaaataaaaaatttcgggagggggggcgccagccactctggcgcactccccctagccacctcagcatcgccccgccacgtcggcagggggacggcgccaaagaggctggcgccgtcctgttgaacgacggcgccagccactctggcgccccaaaaaggactatttttgggataagtttttttaggagtctatttacgaaataagtttttcaaaaggaccaaaatgtgaaaaatccagtaataaacatggtacgtactatcagggaaagcagatcgatggcgtacactggagccaggaattgaaggcaatgttgttacgacgttgattatcctagcgactctctggactttggcgccggtgggtcatcgtccgtgtacgtacagatctcgccggttttggtccaccgatcaatgccgctctacctaggaagtcaaggtaactaattaagtgtttgtttcatggggccgtatatacgacgttggagatcaacttactagctcctttcttttttggaaaaaaacatatacatactcctttcacccaaaaaaaaaaataagtacaccctactcgtataatcatctccagaaaactgaaccggcataatatttttagattgacgaagtcaacacgtacagacacctcgctaatgaagggtacgtcatctaccactgaaagaataaatagtcgtaaatgtgaatacctatgtcaaatctaggatttgaatccagctgggctggttccaccacaagaaacctaactagttgagttacgctcccttcacacaaaataaataaatttagtatggaacgaagtgtcatatatcgtactatgtactccctctgtccttaaatataagagctagcttttggttggatgaaatatatactagccaatattatgaatctggacaaacttcgattcctgtttaaattcgtagtattatgatatatcactttcaaccgaaatcctgtatatttggagatggaggtagtatacgtctatttattttagaaagaaaggagcacagtacagtagatgccaccgctagaaaaagggtttgtactcccgatttgtaaccccatatactacgaattcgggattaaagatgcccatctttagtcccggctgaaataaccggattatcaaccgggattaaagatggagccaagcctggtccggttggtaggctttttttctttttattgccattgttcttaactttgaatattgatttcactacatccccaaatcatccctaaatcgtgaaatccccgaatcgatcatcacagaacaatccccaaatcgatcatctccaaatacatcacaaattctaaaaaaattacatcacaaattttaaaacatacatcacatattcacatcacacatagatcaaatacatcacaaattctcaaaaacaaattcatcacaaatccttaaaaaaacaaatcctctctgctcacggtcacgccaccgccgccgaccccgccctcgcccggccgcctgccctcccggctccgcgcgagcaggccgccacggctctccgctggcctcgctcgctcgctggctgctcctcattcgctcctctatcaataactcatcgatctaccgataggaagaaggaggggataagatcggcgcatataagagagagaagagagaaattaaagaaaaggataagagagggagcaggaatagaaagatgaggagtttgggaggataagtcatatggattatatacggtatatggatttaaccgggactaaagatcgatttttagttcgaacctaaaaatcaccggcccactgatagcctctgacagtaaatgaaccaggactgaagatcattcagggccgatagagttttaaaccgggaaaaaaaccatctttagtcctaatttctattcaaactatattattgtggttttttggtaaacccagcaaaaatggtctctcaagtagtgtgcacacatctggtggcaattgtgactcgtgagttaacttgtacaaggtccaaccacgcacggttgcacggaagggcttaattaaaaatggaaataggagtaggtcataatttggccatatctaggtggaggctactacgtaccctacctgcacattgatccagctatggacggttcgtagtaaatcgtgatcatcctaggatgcccatgtacggatgttcggtgaacttgcatgtcttattataaaagtgtgactgatatcaatacaacttactctatataccatttttcacaagtcatcttaattatgtactcctttgtattaccttagcatcttaaattccatactcttcggttgtaaattttttttatttaaattagagtcgtatatagtacagtagttgtacaggtggatgcttttaattgatttatgactcacatccatatacagctgggtgcacccatccataatcacaactcagccagccgctctcctgtgggttttcaggcggcgcatctgtttttgtttcttgatgactagccaacatgggttttgctcttcttccctttcttcttcttcttcttcttcttcttcttcttcttcttctaaatttagtgtggtggtacaaccagtaggagcaccatgatggtggtagaattatgtttatctgaattattcaaataattagggctataggaccttgccaacaccgatgaggagctagggaagggcagctaccataaaattagatctaagagagaagatacaaaggacaggaagtgttaaagattgtgtatagattttgaagcaatccgtaccactcaaaagttactacttcatatgttcccacaaaaactttatttttgtgttttttttcaacatttgaccgtccatcttatttgaaaattttataaattttttttaaaaaagttgtcatgtataaagtaatattcatgttgtgtcatctaataataaaaatactaatcatagaaaatttttaaataagacaaagagtcaaacgttgtatcaaaaactaaaaaatggagtctttgtgggacggagggagtaatatactcgtgtccattccaaaatataagaaccgctagcatttgatctttttatatataaagaaaaggatttatggagtgtttgtcttatcaatcatctctcattcaaatttctccatgcgtcaccctcaaccaccctttcaccttttttttactaattgaaatggtttatgtctccagcttctatcaacaggtatatggccaacgagtcaagagaagataaaaaaaaaaagaacacgtagattctatgacaatatactatagaaactacattattcaaaatggaattaaagactgctggctaccgatttcaagagtatagcttcagaacacataatatcctactcctcccatgaaagcatcaaggaccaagaatatatagaaccagctagaagacacgaagataacatgtattgttttagatatttatttgttattgaaaactatataattgcgacaatgccaaaatggccaacataagacactagtagttactaattttgccacagtgtatattgatgaaagaggtaaggtggagccacattataatagaaaaatgagatagctattagagaaaagatgaatagttggcggaggaaatggagaatgggggaagaggagaaggtaaaaactttgtctcacatatattgaaggaacatgtgtttattatggtagcagtgctattgctagatgatattaccagtattttattttcaacattcacgatgatgaaccaggtaataggactttttactacttttttattctcacattgtggttgcccctatgttatttatagagcaagtgttatagttcttgaagagatatcatgaggtatgaggtatcaaatattacactaaatttttgttacctcatggtacctaagaaccataaaattgcttttattgttattttactatgcggccggtgtacgtactgcagactacggcagtgtgcagtgggatgtgggcaccttcttcttgaagtctgaaacagtcgtgacagaaggtgcatgggcattggccggaccgtgatcgacgaaattaatcagcgctgatcgtaggtgcaggcgactgtagattggtaagtcgcatcgtacgcctttgctagtgatcttgccaacaaacctgcagaccgaacggctgcacgtacaggccaccaacgatcgatcggtgccacttgcaacctgcattccccttcttttggcattgcagttcacgtcccccctttgacacactcctgcattcatcgatctccggcattcttccctgctatgtacacccgtttaattctctgccagtgcacactttatatcaggtttaattttcaaacacgcagatcgatcctccataaatttatcatgcgacaatagcttaattgattagatcgatcccgcttgctttatttctgctgctcacgtaatcatgtcccccacgaccgatcgatgtagtagtattccgatcgatctatcgcgagatagatcaccaggtttggttttttttaatgaacgcataaaagaattacacgtcaacgatgatggatcgccggatcgccaccacaaacgccggccgcttgcgatatgccatgcgatgcagctaattagcgcgatggcacgcagcgcagatccgccgcgaaagctcgcgctgcgtgcggtgtcttgttccgcttgtcgcgacgcactttgcacagttattctctattccaaaagcgcggcacgttttcccggtagtgcagtgcaggtgtgcagggggtgcagcaatggcggcttgcgcacgaagcaaaacacgtactccagtaggggagtacatggcttttgcattgctctcgcgcgctactatgctacgtactaccatgttggaattaacgggtggcgatcgatcgaacgagagaggacacggcgccctgcagctcgatcgatcgatcccatgaacggatcatatatcatccgatcgatccggccatcgatcgatcgatcgatcgacagagcaacatgcctgcatggtccatgtaccaaaattaactaccatagatattgcaacggcatccggtcattatttcagcagcagcagcagcagcgagagccattctgctttgcatgcatatgggtccgaccggccggccggccggcagcgagggagggaaatgcagagaggagagacagagagagccactttgcagtgcattttgccacaagctactgtaccatttatgtaaaacaagaacatcaaacagggacaaaggctggccgttgcaaggtggctttgcaaggtcccccattaacttcacatgctcagcacacaccaagatccactagctaattaagatagccaacacgtacgtacatctaggcctggtttagtttcccaaaaatttttccaaaaaacatcacattaaatttttggacacatgtatagagtattaaatataggttaaaaaactaattgcatagttagggaggaaatcgcgagatgaatcttttaagcctaattaatccatgattagccataagtgctacaataacccgcatgtgctaataacggattaattaggttcaaaagattcgtctcgcaattctcgcggtttacaggcgagttatgaaattagttttttcatttcgggccgtttcggcgagtacacagtagaagcactgtaggagtaaaaaggtcacatgcctgcacacgccgagcaaacgtcacacgactatatatcacagtatcacagcgattgtgccaacgtaccatttggcttaggcagacttattccaagtctctgtcacattggatgtttggacactaatttagagtattaaacatacactaattacaaaacccattccataaccttggactaattcgcgagacgaatcttttgagtctaattacgccatgattttgacaatgtgatgctacagtaaacttttgataattatggattaattaggcttaaaaaattcgtctcgcggattagctctcatttatgaaattagtttttttggtttaatactctaaattagcgtccaaacatccgatgtgacataggctaaaaagttttagccccatctaaacacccccttaagctcctatatatacatcatatcaatcagggcatcaggccccctacatggccctttttcatcgtacgtctatcggtctacagtatatgttcctggtacaagaatcaaatcacaccatgagttgagtgagtaattaatgagtggtcgaatcagataatgaagctcttgactgtgatggccaccttgacaacttgagttattagtaccaccagaatcaataatgagtgggagtgagttcgtccccgtacgcattgctggctttctccatcatcttccgccgagcggcccacaacccaccagttgacacttgaccgcatccagcccagcacggcctcattgttgattggacctaaacatgatttcaacgggggaatatattcacaattggagtaagttcacatatcatccctcaactttacatcgagtctatataaggtcccttaactgaaataccaggaatgtctaccccttaaatgttcaaactatgcaaaataggttacatgatagtacatatgggttgtttggataacgtggcatcctagtcagaataaaaaaaattgtggggcccatatgtcatcctcactccttttctcctctctctctctctatcctctctccgtcaagagcagggcaagcggggtgcggagcgacgatggcggccagcacgccttcttccgtggtgagctcgaaccggaggcgacgtagctccatgaaggagcggatcacctccgaggataggtgcgcgctcgcgcgaacaccgtagggaaggatggctcggccgacgacgaggacgacaaacgacgcggcgggcggagtaggccgtcgccgtagagaaggatggcttctcctccggctacctccaccgttgcggctccctcctccacccgccacatgataccgcgttcgcccatcgccactacgctaccacgctcgcccaccactgttttatccgccgcccgccgccagcctctcatgcttgttgaagaagagcgccgccagccgccggcctcccaggtccacttccgcgctcgcccaccgctgctctatccgccgccgctccgcctgccgctcgccgccctccgcccgctgaccgctgccgcgctcgcctgctgctggccttgcaggcccgccagcgctcagcccgccacccacatttgcgctcacccgtcgctgctccgcccatcgccggcctccttcattgaagagaagaggagaagagagaaaaagaaaagagagaagaaaaaagatatgtggatcccacttttttcatatcacttacatgtgagccctatatatttttattatttattttgctgactaggatgccacgtcagcgaaaccagagatccatactgctataggacctaaattgcacagttttatatagtttaggggtgaagatttttggtattggagattaggggcctcagacagactcgacgtaaagtggagggacggctggtgaacttattccctcacaatttgtcgttgagtctgaaattcattcaagaatcaaaataccaggtatagctcattccctactaacactatcgtgtcaaccttgttctctcagcaatataatggctggttttgactaacgaggcgagtgggccccacatgttagcgaccaactcgttccctcttgcccctctccctggagcgaggcggccggcaagaagggggctccagcggcgcgcaacagcgaagtaggggccacgacagtccacagctactagaggatgcccgacaagaggggatatgacgtcagctggggccatcggtgaatggaggtgacgacgcgtcgacgatgaccacaagtatattgagcttgagcttgacgacactgtgtgcgtgtggaaaggaacgacaaggcaagagagggaagagggagaggcgttgaactttggttgttccctctgtgatttggcgatgatgttcgtgagcaggagcacgacgaggttttgataggcgatgaggtgtgtggggatcctgtcggtgaggctgttgcgagggacgtcgaggacacggagggtggcgagtatagcgagggagcaagggatggacccctcatggacgttgtgggataggttgatgaggccgagggagcggcattgcacgagccctggagatttcggacggtgacaacattggcggcggagaggcggaggtaggtgagtgactggctccgacatgcagcggggagaggccctaagaggtggctgaagaggttgaggtagcaaattgtcggggaggcaagaaagacggcagggatgagctcgaataagttactggattggtcgaggcggtgaaggtgcgggggcaggaaggcctggagggcgccaaagagggagtccatggggaggtagatggcggcgaccgcggcgtagttggggtgacagggaacaccacgcctaaggtagtagttggtggtggaggaggactaggtggtgagaacagagtcgtggtcgtgggggatgacgcccttgagcacgagaagggcagcgaggtcggtggaggtggaggatgccgacgaggtgatgatgatgagcagggccacgatgtccgaggcacgcttgagagtctgagagatggggaagagagggaagaaggagagggagaggagggagccaaaaccggtcactatactgtcgagggaccaaagctaacacttaggcatggtatagtgagtgggaggatgggatacacctgatatttcggtttaggaacgaatgttagactcgactatcatcaagcggagcgcgtcccattgcagcgacaggccggaacgagttttccggtgtccgagccgcacatcgcgaggcgaggaggagcccatgccatcagcgggcgacgtcgtgggctgcgcggagccatgggccggtcaccgggtctacgcatccagtcgccaccgcgcgcatctggcctggtcccgcaccgcaccgagtcccgaagagatcaccaccacctcgcgaggccaatgtgtcggtctcgccgtgtcggcatgtttcgcgcggcacacgcaccgcgatggaaccccacgtctcccgaaagctcgcgagacaaaatactcctccagatcgaaccagaccactgcacccaacacatctcccagatcggatgctgctcctaccacgtccgtgcaaaccgtccatgtgctcgcctgagccccaggcgtgcgacgcagcgtcgtagcgcggtgcagagcacgtgacggcgcaggggagcagcacgagttcacaacgaggagtcccaacatattagcatggtacgcactgaggagtaacaagctagaaaagcggccaccaccaactactattagtactagtagcagcataaaaaacacgacacacggtgaacagtaacacagatatgtccgaaacacacacaaactgctactaccacgaaagaatatctctagatctctcttcacctacgcatttgcaccggtacaaacaacacaccacatggtatgatgggtagtcaccggcacacgagggagaagagttcgtcagttgaataacagagagagtaggctactactgaaggagtactcccagtaccactactgaatacactgatgatcgatcaaaaccagcaggggtggcggcacaggccggaaagcgcgggcgagacaaagcaccaacgccggcaacgccgctgcattgcaatgcccaccaaactccggccggcgccgtgcgcccccaccaccgacgagacggaatccactgcccccttgtgtggctctagatgagatggaacaggaatggtgcggcggcgaggaggacggaggtggcggcggccagctgggagcgcgccggcgcggcctcgttgtagtcggggttcatggcgccggccgacgggccatatgcgccgccaaacggtgggctcagggcgcctccctgagtgccggtggtcgatcccggggtcgtgatcccggtgccggcaccagcaccggtgcccatgcctgcgccggtgccggttcctgtgccaacgcctgtgccggtgcctgcgccgacgcctgcgccaccagtgccggtgccgccggtgccaactccagtgccagtgccggtgctggttccggttcccattccggtgcctacgccgctgcacacaaaaaatcagacgtagtagtgagcaaagaaagtaagaaacctcctttataaattcttgaagacattgtgcactgaaaattctggacatgcttagactgaagaaaggtagtctgagtggagtgtatatgcagatactgatgagctggtgtgtaggtgcaatgtactttgagatagggtagcgcggcggccggcagaccccggcaagccgctttcatccacaaaagacgttgctttaagctccgattagaagatccgttaagaatgccttttaatttcacatggacaagaaccatatgcaaagcagcaaaccagctatgaactacaagtaacactacttttgcatggaaagatgcaaccttttggtagtaccgaacattgtttcaactttcaactagtatattattccaggttcggcgctgccaacttgcaaatttgcaactcgcagcatgatacacggctctgaatatacgtattggtagacgcagaaacagtatatactcttctagatcagtgagttctcggtaaattaaacaaatctaactgcagtcagtacggccgtgcgtgctcacataaaagaatctagattgatgcaaagcatcaggccaaaactgcagattgcctaagatactctcatttcttttccaggtccaagaactcactaaccacaaacattaaccatagtccattaatctgaacaagaacacaagaaaaaaggatgtgaaagaaggggaggttttttgggggaatgtacctagcggtggccgggtacttgcaggtgccggagctggggtcggtgttggtgagggtggcgacgccgccgaagtcgcaggtggcgccgatggggctgttcttctggaagtaggagttggtggcgtaggagcagtgcgcgacgatggtgctcggctggtagcacgcgccggactgcatgatctgggtgcagtcggcgccgcgccagcacgcgtagtcgatggccttctgcatcgccgccgggctctggtcgggcttgcacacgcagaacgccccatctgctcgccgccgccgccaaacgggaacacaggttagctcaaatcggtagctcaaaagttcagaactgaatgcatgcatgtctcaaatctgattcaaatctagcactagctagcagaggctcggagtgaatctctcctcttcgatgtttctactgtgcacacgaacaaaagggggaaagaggctatgcgcaagaaattgcaagataaacattgagccattgctccaggcaaagattcctacgagcaactacgtgcacggtggtaataacaaaaatgggcaagaaactcaagaacaactgaacagacacgagttcgatttgcttgtccctttctcgcagaggatgcaggttttgggctggggcctcacgtacctgagcctgtggacatggccagcaagagcagcagcagcaacggaatcgccatggcagcagcagcagcagagaagagctcgagctctctctccctgcagcgagaaggagaccggccggtgtggggagtcgggaaggaaggaaggtggtgtgaactgtgaagtgcagtgctgtcaacctcaccgagcctcggtgtcctttttatcggcgagcacagccatcagccagccacaccgaccgaccatgagacgagacccttttttttccctttctttcttttatttttctctcctctctctgaacacctcgtcagcgtggcagcgtttgtgtgtcacagtggtgcgtgcgtgaccgtgcaggagagcccccccccttgggcgaggcgccgccgtgtccgcatgccaacggctttatttttctttcttctccccttcgctgctgtgttgggctactgctagtgctagccaagccaaggcggtgaggtggtgactcatcgtcctctgtctcagggggaaaggggagagagagacggtgtgcgcacaatgcgcgcacggtacagcgcgctgtccagctttggcgtggcatggcatgggagacgatgcggcgcggcccagtgttggggaggagatggccttttggacaggaaaaggagagggggctaacgttcggattctgggggactttatattcaggactatttagcctgtgtttatatccaaacttttaattttttttatctcatcaacctgtcgtatacacataacttttcagtaacatcgtaccaattttaacctaaattttcaactttgaaaggaactaaacacagccttagatccattggtaaaatttttcaccatgtcatatcaaatgtttgacatatgcatggaatattaaatataaaataaaaaataactaattacaaagattgcgtgtaaattgcgagacgaatcttttaagcctaattgctccataatttgataatatggtgctacagtaaacatttgctagtgatagattaattagacttaataaatttgtctcacggtttacatgcgaattttgtaatttgttttgttattagtctacgtttaatacgtcaaatatgtgttcgtatacttaaaaaaaattggccaaagaactaaacatggcttatgtattcaacattcgatcgtctgttttattagaaaatttaaaataatcacatataaaatattatttatattttatcatcaaataattaaaaataataattacaggaagttaaatgaaaaagaaaagttgtataaaaactaaaaaatatttttttaatgagacgaagaagtatattctagaagttgtgtatattcgtgtatcattccgacaaaacttacccagtgtcggattaaataacggataggttcgatccgggaggaaaggcaaaagggatgtgtgttctagagaggtgatgatggagatgatgggccactaggaggtcggctacttagagaaagtttaatagtatagttcactgctagcttttatttacctatagttaacctaataatcaatttatacaatagttgcttactatactattaatatatggtctcatcagtcatacacacactgtgttttagagtccgtactgcagctggctgtagcctgttgctcttctctctcataatttatctcactaaaatatgtttatagctggctaatagtctgctactatacatgctcttatatcttttatatctttttgacagttttgttttacttaactctacttcagtgttccagaaggcagtatgctaatgggttgaaaattacataaacttctttgaaagagtttaagattctgaattagttggctggtagtaaaagcatataagaatagaaaaaactgaactttcatatattctgatttatagttcgttttctaaattttatatctatatagattcccccaacagtctcttagattaaacgttctagtagtaacacagtttttaactatagcaaactgtctcattttttagaatcgtcttacgtgcacaatgaaatattttacttccaaatttgcatttttttttaccacactatattagttaacgtggcaaggcagtactccctccgtcaaaaaaaaaaaaaaagacaaaccctgatttccgtgtccaacgtttgaccgtccgtcttatttgaaaaaaatatgaaaaaatttaaaaagacaagttacgcataaaatattaatcatgttttatcatgtaacaacaatgaaaatacggattataaaaaaatttcgtataagacggacagttaaaattggacacacaaactcggggtttgtcttttttaggacagagggatgcagttgcagcccacaactgtctctttgtacttgagaaactattcacgcacaacccaaccagttgaacaacgtaatgttactatgtcagagggtgtttagatccagggttctaaagttttaacgtgtcacatcagatattatatagggtgttcaagcactaataaaaaaactaattacagaatctatcaataaaccgctcgacgaatttattaagcctaattaatctgtcattaacaaatgtttactgtaacaccacattgttaaatcatggagcaattaggcttaaaagattcatctcgtaaattagtcgcaatccatgcaattagttattttttagcctatatttaatattttaaatagatgtttaaactttcaatataacagggcgtaaaatttggaagtgcgtcgtaagaaaaaatcatgcgaggtggagtggtctcatggtgtgggagtgttctccaaccatgccacctcggatcacatggccagaatgtccactctgcttttaaaatagtaagattttagagtgtgtggatttctttaaaaactgtgtgggtggttttggaaaggtgtaaaagcaggattgtagttaacttgaatttttagaattccacacacataattcctaaacttagttattttgatacttgaggtaaaacaatatacaaatctagagagagaatgaacacaaacgaagatctgcatgagatttgagcccacgctacattcttgcaaaattactatgaattagaccatcccacatgtaatttttaggatttgtagaaacctttggtcaagcccatcccgtagtaaaatctcaagtctaatgagcaggagctgtttagattgatgtcatttctaactatactttttttttggcaaagttgttaaatgtgcatacatttagtttgttgccaaactttggtactatataagaaattctgttaaaattttggtaatgccaaaatttggtaaggtttattttggctattaatcttcatcagaatatttctgagtaatcttgtgaaaacgttagatctgggcctactctgcccaacatgaccctttatattgtgaagtccattcttaaatgggcttccgtttgacaacacccataaggccccaaaattcatccaggccgggagcagtggtgggccggtggtggtgggcctccactcctcctgctcgatttttatcgttggtggccgaatgctgctcgtctcccatagcctgcgtggtccagcttcccctcccctcgggtttccggcgtgctagggctcggccgcggtggcgaaggcgaaagggagctcggggatggaggcggccgccgacgaggagcaggaggggatctccgcccagtcgccggcccaggcgccgccctcctccgcctcgtcccttcccaaggtcccgccccgccctcccccccttttgttttttcttacgaacaagggatgcgcatgactgttatctgaggttgatgctttcttgtccttgtcgtgtgtgcgcttgttggtgtacaggagcaatcgcaggtggagctggagctgcgggtgcttcaggctctcgagttctaccctccgtccaaactgaaaggttaaaaatgcttcgccgtgttatttcctttagcttcccattctggtgatatgttgtttcgcgtgctctgatgtgtatttagtttttgcttgatcttttgtttgctgacatgatgcctttttttcttagagaaagagagaacagctctatgtgactatgtgtgaggttggaggttggatcttccgttttgaaatcgcattaacacatttaccgtggttaagagtgtgcgaggatacgtgattaattagttttggaattataagcctgccactgtcagtttggatagtcttgacaacagttgtaataacacctaaaagagcaaaacaatgaatatggcatccttagtactctatcatttctgttcctgcacataacacaatttgggtttacggctacaagttttgtacatttgtacatatgaaggaatatctagttcgctcccgcccactgcaccgcacttacaaatccccttttttctcaatgttactgttcaatgaattacataggtaggagtttattgttgatattcaactaaggtaggtagagtgggtccccccttcatatagtgagaataatttggacctctacaccgattcatggaagtattaattaagtgggttatgcataatttttgtgggcctcgtcctctttttaggaaaccatgcctcgcttctattttgaaaaccaaaaattcatgaagttgcttgtttcgttggttttgctgataaatgccataatcaggtcatctttgatcaattaagtcgtctttgatcaattagattttgagtttactataaaatccttgtatggctagaaattgctaatcaactactccatccgtcccaaaatatggggacctttgttgctcgaactacaagggtcccaataatttgggatagagggagtataatctaatattaacacatgattatatttgagctctactgcacagctagttataggagtgcttatttaggttctttagtaatgatgaccagtctgggaatgagtaaccttaagtgtaccatcaaatactaagtttaatagaatgcaatgaaggttataagagcaaagcatttctgagttgaataggctagaatgtaatactaagtctgcagcttgagttttctgtttctttcatggggctgagaaattacgctctgcaagtcaggttgctaatgcacacacttgattcaagcaattccatttatggctaattgttttaatgtatccatgttgattatccgtttattgtcacctcaaatctcattagtatctgcaaatctttgtagcattctatgtaacgaaactcgatcagttgaatgataagtaatttaggttacatattacataaattgaatttccagttttccacaatgactttttgttgtggcacgtgcatagcttccacaccattactgtggggtatggtccacattttaggaatttcctaaatttaagagatcttatttcaccagacgatactgtaaattaggaataaatcataaaatgtaaaacaacatgtaggctacataacttaaaaaaaaaactcaaaatgttaattgaattggaggatgaaccatggtgtttagtggtcttgcagttatactggtcgttattatagtgttttctggcggcaagtgcttgcttgtctttgataaccaaatgcaaagtcatctctatgtcatgatgccctgtgatatcatatgcatctcatgtcttgtgttttttgtgaacttagtagttctttgttgtatatttttgggctttagtttgaagtgatggctggcctttattggttttggcattttttactaaaattgttttgtcttttgtgaaccttgctgcatacagcttgatatgtcttgtgaaggatgccttttgctgttatatgctaataaatctgctgtactttattttgtaggcattcatcgtcactttgttatctatggtctaatggaatacttgagaaaaaggtgactatatgttcaatttaatttctgttctatgaaatctctgatctgaactgaccatctttaaattccttcagtcttgatagacaattctctgctgatgaagttttacaactactggaccgattcttcaacctagaaatgctggtaatttgaaataccaataatctctttctcatttctatgtctctactaactatgaatttgtgttttctatttacacggaattaattagatttcgatctatggataagtttacgacttgtttatggagtctggacacacttttgatgcggtctgaaaaaaatgcagaagccagaggacgacgagaaggataacttcactcaaggagaagaattttccttacctgaaagtttctttaacaaggacgaatgatagcccagtaaccctgcagcgcaacatccttcgtaatttaacagagggtaagcactaggcaccatacattgtcgctcacttgtcctgccaaattttgtactcccaaaaatatagcaaccttcgaatctggataggtatcttgtctgttactagattagattgttatatattttgggttggaggtagtagtaggctgttggttttgacttacatactatatgaatttccgcattgcagggactacgaatcttatgatgtttccaatgattctcttgcgtagacatctcttgacggcacacttcgaactgaaagaacacattttgctcggccgtgtctttgtgttagtgcttactgtgacttgtacagcttctgttgacttaggatatgcagtcaatggtacgggatctcagtacccgttaactatcagtgccgtttcttcgctctactaccatttaatccgtttttccgttgcgatgagattttgatgctgcgttgcaatcgtgcctttccgttgctgaaaaatggagcaaccatcgtaccatggctgggcagcttcgggtgggtctagtgatgagatgcgagtccagcacggcacgtaattctgccggaaaaaaaaaaggccaaacccattggaacccacggcagggccagccgccgatgaagtccacggatgccgaccaaccagtcgataaaccccgagcggaaacccaaggcggccccacccgtcagcgagcgaaaccgcggcgccgcgacgtgctgagacaggccggagcacgtggggcgcagcgcactctccctttcccttcccccctctcccctccgctccccgatgtgattttccccgccgccgctgccgccgcgccgatctgatccgcagaaatgcctcgtcaccaccaccacgacccgcctccgcctccgcccgcctgctgctcctgctgctgcggctgcgacggcggctgctaccccgcgccgaccagctactactaccccgtgccgcccccgcccccgcccgcgccaacctccgcctccgaccacctcctccacgccatcgcggcccatctcctcctcggctccgcgcccccgcccccggccccgactcccccgcagccgcagacccagcctccgccgccgccgccgccgccgcccacctccgcggcgcaccacgcgtaccactaccagtaccagtaccagtacgagcagcccaaaccccatcagtatccgcagccgcagcaggccaacccgtcggaccacagccacgccgtgctccactcgctcctgcgccgcgtggccgcgctcgagtccaccctcccgcgctgcttcgcctcgccgcccgtgccgcccccgctccaccggaaccctcgccaccgcccccgcgcggccgcgcaccgggaggaggaggacgacgaggaggaggaggacgacgacgaggatgcaccggcctcgctgccgccgccgccacgccgtgcgcgggctccgccttcaccagcgagggagcgggcggcgcggacgatccaggcgcacttccgccgcttcctggcgcggcggtcccgcacgctgcgccacctcaaggagctcgccgtcctccggtccaaggccgccgcgctccggggctccctctccgggcgaggcagggtgggcgaccccgccgccatttctgaggccgccatggccctcctcttccatctcgactcgatccaggtgatgagaacccgtaccatgggcatattcaattaggtaggcattccattggaacggtgttctgatcttgggttttctgattagggcggtgacccgatgatccgtgagggaaagcgcgcggtgagccgggagcttacccggatcttggagtttgttgataaggtgctagtcaaagagcatggggagatggcaatgaatggcgaattggattgtaaagactaccatgaaggttgcaatgccgcatttgcggctaatccgtcagcgatgaacaagaagaaggtaggtttctgtggtaatggtaaagtccaagagctgcatgatgaggctgagcaagagcatggcagtgatgctgatgagagctctgagacctcgagctctgctgaagctgaggcgaggaagcgctcaaacagtaagaggggtgctcatgccaagcccgggcttgcggcgccaatgcctgtgtacatggagccgagaaggattgacgaggagaggagataacctgtggttcgcatcctgcgatgcaatttgaggtttagaattatgtggattgtcatggtgttgttacattcctaccgttgttttttcactgatatttcctgagaagagtttagaacttttcagatggtagagtttgtgctgcagctatgatctttggaactaggagccttagcctgctgtatgctcaaattccctgtgtgttcattgcctttgttgctgggttatacaattgcactgttagctttagcatcgataattctagcttggatcattttgtgcactaaagataccctgcttgatgtcatcatgtgggatcttggattaatctgtcaatcatgtccattttgattaatcgaaattccctgtgctgcagtttgaacttcagatgttatttctagctgaagaagaccactcttcagtactactttgactgagtttgtatctttgtttggcagctaactcatgaagaaaatcacacattaatactaccttgactgagtttctatctttgttcgttggataactcatgttgattaccattcggctgtcttggttgttttaagtttattacaacgtggcttctttaattgtttccccagaatttgagccatccaccaatttatttcttcagtcaatgttgttttccctgtcttttggtatctgtttgatgaatgaagccatacttcacatttcagatcttcaagtgaatttcatttggggcttgctattgccttctgttgttttggttacaccacaaatttcagcatacattacttgtaaattagtggttatggaggacctgaaagaaaatcaataatggttgctgtgggcacaaagtttacaatgtcctggagctgtcatattaattcagtactaacccaactgattgctcctcgcttttgactgtcctgtggctgtgatgccacgggtgattggtgactgttccatccaggccatgcctattttagcttgatttacaggtcctggattgcttatttgctgtacagggttggatcactttggctggaccggcaaaaggaacatgcgtgttgccgggctaaagtgtcagacaccacatattgtatcagttctaggcctttccaacaggcaactccaatggccgtactctgtacaggtttgatagaacagtgaattgaaaagtgcctgttacagttaggacgtgtgaattttaccttgtagtaaaggtggtgaactttttatgcgatctttaaatacagaaaagaaaaaaatggtgggaattaggtatggtttgatattgttttttgcggtggcaattgcggaggataggtggctctttgaagtttgaaccgccggtgaatcaataaaaatggtactatattcaataacaacgctaattttgcttgcttggctgttttagctctgattcgttaagattaataacatgttgtcctggagacacttgaacgaacgttttacatgttttcgtacatatttacactcatctctcgtcagttagagcaagtataatagtaggctataaaccggctaaatgctgagatgaaagagagaagagaggagagagaggagaagcgagctgtaaacttacagctggcttggacactagaaccaaaaaactctatgagagagacaagtaggccctatattaattgtaaagagttcactattatatgggtaggctaagagaatgctacaaaagaatcttatagttaacaggtcggctgtattattagctttgctcttacacagggcaagaacctaatttactcttttcttgatgttggttagcctttcgtaattagctcagcatagggaaggagcaagcaaaatgaccgaaaacctaaccaaactgatcccggtctgtgattcttactaagataaatagatacgatcagttcggtcattacactcggttaactacttaattgaactgatcgaaataatagctagaagcctatgaagtatcatgtacgattgtgatttatctgtttttttttctcataaaactaccagatgtttcagtcatgactgaagactaaaccgagctaaccaaaaatcaaattccccggtcttaaactgaattatttgcaatgtatttcagtcctcagtttcagctcaccaaaagttagagtttaagagataattaaagaaatgttattgacaagcgtccaaatataagaaatgccatcaacaagcgtgagttctaagaaatgttaccgtacaaacgactttgtctaaaaatgtcatcgtcgttagggttctatccattccacgtcgataaatacattgttcatcctgtagcacttaatggtgcggtatggatggaatcctaacaacaatggtatttttggataaaatcgcttgtacaatggtattttttggaactcaaacttgtcgatattatttcttggatttggacgcctgtcagtgacattttttggattatctcaaagtttaaagcaagtggtggtgtgttttgttttccctttttctaacaataaccttttcgagttgtagtctttgtaattttttcccggcatatcgatatgaaacatactatctcgtgctattcgttatttttttaaaaaaagtttaaaagaacaa

SEQ ID NO: 5940 - DNA, 46172 bp, Oryza sativa
gtgtggcattgagatacatcctgctggcatgccgcgcggtcgactctagaggatccccctcctcctccggcctcacctactcatcaagaactcctcaaccttaataagccagccggcccccgcggcagcagcagagcgcacaagaacagctcaccacgtcggtcttagtagtacgggagagctcagcttccttctccctccttttatttattttcgtcgtctcctcgctactcccccaataaaaaagccttcttttggctctcctctcggacgcacacacaacacaaccaacacagccagagtgaccagcggttaatgcctttgttatcccgccttaaaatttttcatcaggctacatcgagcgtttaacacctatataaaatattaaatataagttaaaaaataattaattgtacaaattgtgactaatttacgagatgaatcttttaagtctaattgtttcatggtttgacgatgtgtcgatatggtgctacagtataattttctaatgatagattaattaaatttaataaattcaccttgcagtttactaggattccgtaattagtttttttataagtacctaaacattttatacaatacctgatgtaacacgctaaaattttacatcctcgtctaaacacccccctagaagctggcaaaacggtgaaacactcgcgagctggactcacgcacggacgcttcgccgctgcttctttccatccctgacgacgatgaaaccgcgtgtgttttcccttgacaacgagattaacgttagccgagccgcggtttgccggtttgggttttggttggttgggctcgtgcgcgcgcgtgccgccggatgggctcgcacgtcgtctcgtctcgtctcgtcgcgtccaattcgttgcgtgcggttgtggcggctgctgcagcatggcgcgctgtcggtggcagccacggccacagctacaattatcccccctccggctgccgccgccgccgcagaaaaacggccgaacagcaggagttcctctcatttcttctcgatatcttcatcagaaaaacggccattgatgagtatgaaggattaatttcttgctgattaaatgatgattttttttaaaaaaaaaaggtgttcgtgtcagacgtgcatgagcggatcatggaagggaagaggcgaggagaggtgagaaggaatcaaatcaggattacagatctacacgatgcttcaactgggctcaaatggagacaaaaacatggtttggttctaccaacaacattgtccatgagaaactaaacaagaggatcaacttactaactactacttgtatctccatacttcagatcgaaagaatctgagcatcccgggacaaaattagcatccactaacacacgcaacttcagatcatcagatgagctagctagcctgtcatctgtgggactaataactacgatttctggacatcatcatcatcatcatcatcaattgcatgccccaaacatcgactcctttcttttcacttccttttgcatcaaaccacctcaattcaaacctaacccatccatgattttcacacgaacactagcacaagattacattttctttttccaagtcacaagacagcatcatatcttgcacacataagtggagctcattttgagagggattattattggagagacaaagccatgggcagccacatctcgcagccagccaagatcctaaacgtgcatgagcccatcagcacagtggcatcggccaactatgcccccgtggatatgctcacgtttaattgtgggtgccttgcttgcttgcttgcttcccatggccagctagaccatggctagtagctgcagtagaagtattaactaggcatagggacacacactgcttcgtgaactgtacagctttgtgggtttggttgccctgcggcttccatcgtttttattcttgcttgctccatgggagtgagggaatcattccatctgcaggttcttggctcccattttttcttttttttcgcggggatggctcccattttttcgactgacacagacatactccatccgtcccaaaaaagacaaaccctggttttcgtgtccaacgtttaaccgtccgtcttatttgaaaaaattaaaaagataagtcacgcataaagtattaatcatgttttatcatctaacaacaatgaaagtactaactataaaaaaatttcacataagacggacagtcaaacgttggcacgggaacccacggtttgtattttttttttggacggagggagtataagtattcagtgcagcttccatggatggaagttgtttaattaagctagctactctcgatctgtatgacttgcattgactttgccatggtaaaaaacctgatcttttgttgtgcttagctcaattgctcaaaccagtagaaagagtagtagaaaataatctgggagaagcagtggtggtactgtttttgtcggcagaacattttggctggtgaaatgcctatatcctgttggaattatgattaaagtttgtagctttggatcgtagtagctcctgatcaagttgtgttttatttgcacatctctttcctaggaagagagagcttagcaatatggagtttatgagctgatactacaagtgaaccgtcggtgggaaaagaccaagaaaatttccctgttgtcaccttgaactctgaagagtttcgggatctcgatgattatagtagcctcatcagcatgagaaatttctcgaaattggaaattagtatacagcactgtcaaacgagagattctcagcagaagcgtgcattagaaacttccgtcggttctaacttctgaattattgtcccaagaacaggaaaaaatgtagccctgtcatcaaacccaataaaattctcgtgttagtacagtatgctataactatctagaaaatatgaagcatcatgttggttgggtagaccatgttactttgtttacgtatcagtactatctacgtataaaaaaccgtatctacacagttaaactattactacaaactttaacaaagtattttttttcttcaccgatcataccaaacttactgagtactgggtaattcgccatagaaaaactcttatggcacatcagtagtaaaatgtagcaattgtcaaacgacagtgttcgctggagtagttagcaaaacgaaaaataaattggcaactacaacagttgaaaactgtcgtacttggttgatgccatgtttacctctgaacatgggagaagctaatcacaaccacctaatctgactattttagtcgcacgtctttgagacagattccccggatcatgcttgcctggtgcccaattagctgcacaccgatgcgattaatttccgcgacgggattagcaaaattaggccctaaaaattcgcactttgtggccgtttcgagacacggctgaaagctgaagcttagttggcagtttgactatacctgaatgaaaattgaaaaaaagccttgtcaaacatcacattaatctaagtaactatcattagctgtggtctacatctctaataatctcatagtagactgcattaccatgtccaaacaatgaaaaaatggaggaggtcagaagtgaaaaaggaaaaccagaaagcatatataggaggctcacacttggcgttgtcggtgcttagtcaattggtcaccacctgcactgcaggaaaaggtcgtctacctaggcccgttcttcaaaacgaaaaaaaaaagattaacgtgggcatatgcttcatgaatcatgagcttgtaaacgatgtgattttcataaaaactttttgtaaatatttttctaaaaaaggctttaaatatactttttaactttataatagttaattcatctatttgcacactcaaataacgaccacaaaattattgagctattcaaccgtttagcaattcagaaaaaaaaattgcaggtaccactactactagtaatggtagtactaagatcatgccttgcacacagctggaagcctggaaggaagacaatgacgacttcgaccacgaactctactttgttttgattaatccatcagaaagtacgaattaaatttgaaaatatactgtttatccaaatttttttcagaaatattcgagatgaattttttttacaaatataacatcgatctcgcgcaaccgttatgcgaaaatgacgtagacatgacgtcaccagcggtatcgcacgataaaagcgcgagaccgtgcagtatcgcgcggtattgacacgagatcgcgcggtctcacggaagcaaagagcgagtccgctcggtatcgctggttgaagcagcgataccggcatggcagtcccggccgtcaatggttaattacctaattaactattaactaataataattatcttaattaacaattaattaatcacaaatcaagataattaattactaattaactggcatgtcaatgcggtatcgctctttcaatcagtgagaccgtttggtctcgctctttggttccgcgagaccgtgcggtcggcgcgagagaccgtgcgctctcgcgctttcaccgcgcgataccgttcgtgacattacgtccatgtcattttcgcgcaacgattacgcgaaatcgacggtatatttctataaaataatttgcatcccgactattcttaaaaaaattagataaacaatatatttttaaaatttaattccagaaagtactcgtaggaggaagttgttcttggagaaaggtgaaaaaagagagagaggaagagatggtgtgtaaaaagggaaacgattgaggggagaacgagaaggttgttgagactgtcagggtttcagaaaccttccgtgatcgcaaagtaaatgcaggcagccacgcacgaggggctctgactttacaaccttggcaaccctatctcaagaacgatccatggcgaattggcgatggcgcaatcgagaagcagcacatcgagatcgagtataacgagagggagagagaggtccccatcgtttgatttatttcctaataagtcaaaacggcttattagaaaataaaaatgaatttgtaggtaaaacttttataaatgtgttcttggtaacttaaaaaccaatattgaaaaaaaatatgttacaaatatctcaaaatcaatcttaaaattaagcttgaaaatttaatatttggctttttctttgactgattaggctatccgatgggagcagagagacgatttcagaggtgaccgaatcggctacttccgcggaatccttgggccaaatctgctgcgcccaaacttgcgatgggcccatcttgaatagcttgtgtttggtatgggccgtgtagcattaggccactatcagcctatatgggcttccaattcaacaggtagaaattagtagggccagttttaccaaatagaatttttttttgagggaatttcatcaaatatccagctcaccgaattgcgctatgttagcaaaccaatattgtataagaggtatctctagctttccaaagatttggtagtttatactcataatattcatctcatctcataaaagctctttcgaaacgatgggattgtgaaaacaaaagaatatgaaaaaacacatgatgttaacatgaatgcatgcataaaacggatgattgtaaacacataaaaaaacaggaataaataatcgttacgattagaccgccgaaaaaatacaaaaatcttaggagagataaagaccatcgttgaataaacttctgacagcaccatcgttgaataaacttccaacaacagcatttgtgtataaaaaaatgtatttttctatacaggtaaggtggatatgatgatgcaaatgaaattggagcgatgaaaagggaaatatggatttggttcaggttctcgagataggcaatgaccttacatcctgtttggctggggtgaaaatagtaatctagcctacacgactatgtcggcataaagtcatggtgaggtagttgggattagctgttggctcatgtggcttgtattgtctctcattctccccttttgagaggattgtatttatatccaactagaaaataggcgtgctagttggcgcgccgattaataaagcctgtggtggtattgttggtcatgttcgagatacataaattgatcatttttttttcttgagagatttgaagactatacaaatggaagcaaagagaccataaaaaaagaaaatattagaatgaaattcacctccagaacacatagttatatagttatagtacccactggaaaacatttagttagacatattccacaaagtcaagttggagtgagtagtgtaagataagtcaattggtcacatggatagacgaatatatttgaagttcatatacttaagagctagggagattgaatgtatggggttatctacataaatagttaattctaaaatatatatgaaatggaatatttgtgatattcctatttaaaaaaatattatggaaatgtataattctcaacaatatatgttataaagtggcaacaaatcctaagtgattactacagttggatcgctctttcaaataaaaaaagcttagggtctttaagtaaatacctctatacgcaagttttaagtggatcaacatattagaggggggggggaggaggggtacatccttttataaagtggcaacacatcctaagtgatttctactggatcgatcttccaaataaagaaaagcttagggtctttaagtatatacctctatatgcaagttttaagtgaatcggcatatgagggatgggggggggggtacatccttttaatcccatctaatcgaaatgttctagatgttgtgttgttaaggtattaccttttcttttaaaagctgttaaggtactacttgcttttagaattatcacataacattgtagttttctatttttcttgttcttatgtattttttctttagacaaaatccaagatttatttgataagacatgggcgtcacgtggcccaatcaaaagacgacgtaaccgccggctttagattagtagatatgggccttttgtctaagtataactcaaaagttaagttaggatacaaatccaaatagccctagtcattctgtcatagaactatgtttttcttttgcagttggggactcatttcttcttactaggttaagactatctttattttgaggttttgtttcataggaatcaatattcggtattcacatgtctgcagggcatctcaaatttagtaattcctttcgtctcaaatatagctacttcactgtacaaatttaaactatttagtaatccctctgtctcaaatattgctaactttatagtaaaaaattaaactaaaaaggtagccatactttaggatagaaagaccaaaaggaaattatccatgatattggatctcatgctaaaatttctccaaaactgacatggattgaggcattccaaatgaatttaataggattcactaacgttcaaaactttgttataaggggccatacaggggaaaaattctatgagattggaatcctaaaaaaaatcttatttcctttaaaggagccatataatgtatgcatcatgtggtttagtgagaaagaaaggagccatatagtttgactgtaaatcggaataagatctggaataatgatctacatatatgtttaaactaatttgacattttgagtgagcacccactccactttaaccagaagaatctggtcattgatctggtctctgattagatgggttataaagcatgacactgataatttgtattaaataaatagtaaaatatacgattggaaacatcacggactctttactgtcagttttttgttttcaaaatttaaatatcaaaattcggaacgaataagtatgaagctgtaagttgcaaccttcttgaactctcactttaatatactattattattaccaatttaatttaagaaattgtaactgccgaccggggcggactcatttttaatcttacgccaccacatttaaaaaataaccaacacatttaatacataccatcaataacacgggttaccgacatgcgtacaacgagccgtattttttttcccttgcatcatatactccgtatcaaattatttcgtttactatctgatgcgtgacgatcataaagttctaagcactatattaaactaaataaatcgagctattaatagtgccttggcctagggtgcaagctaagtttttctttattttttccttttctagttacgccaatcggttatattccgttacctttcccttcccttctttccagtagtttccacctttcccgcatcttccgccgtggggaagggagcaatcggcaagccaatccaatccggttgcttctcctccaatccaacctcgtcggcggcggcggcgacccgcgccgcgcaggtgaggcctcctcgcgctccccctcccgcttccgccgccgccgccgcttgggttgcccgtcgatcatgcgtcccgcggattgggggctcggtttttttgtatttgatctggtttgcgtggagattaggggcgatgtacggggtggatttttggttatgggttggattggatgggagagatcgtatttcgtatcgatgctccgtttggccttaggttttgtatttagtggatggctcgagtccaagcgtagaaaagagagaaagaagtgattcggaagttctatgttgttgtttcgatgtagatggaaaagtgtattgcgcatttattgttttgggattactagcaaaagtttcatgctcatttgtctcttgcttgtaaattttgatggaacaatagagagaagacacagggaccagctaagctgtgcatccttgttggtgatggttttttacaaatgatgaatagccgcctatcagcaaaattctttcattttacagttgctgcatttggaatttgattgaacaattatctccttttgttttggtcaagtcatggaactggtagtgccttgcattctgaaaaggggctctagattactgtacctcatttaagataatttggcagcagtacaatattatcctatatatattgtgatatgttcaattaatactgtaacacttatatgtacaatattatcctatatatattgtgactgttcatgcttgtacattgttcaattaatactgtcacacttatatgcatctctgtttgtgttcctcattaggctgttgagttatcacgtatttgattatggatctgccattgatggctgctaaagcctataagtacaaagcagaactacttgttaaggactacctgctagcagattcgtatgttccatacgcttctgtgcttggcggaattctgatgtgcaagttggtaatgtcacttctgactctcacttttctgttaattatcatcattctactgtgtacctgtgcaataacatgttcatagttgtgcgtatgtgtatactcaaagagaatgccaacatctatgccattgctcttttgcattggaatgtaagacctttttttttcattcactggttttatttgttccattaaaatcatggtcaatgatgatggcacataattaatatagcatattatttccaacatccatttcatagtccttgtaatggttttgttatcttgactattgtgttcttttgctagctcagtcatatgatttcacacgctttatcagttcattctacttcaaaggctatggttctctcacaaagatgcaaaaggttgaatggaataacaggtcagcagcattaaccaacttaattgccaagttcctacatcccactctattattataagcttctgatgatacatcttctgaccctttgttactataggggcatgtccaccgtccatgcaatattcattacacttatgtcagcatacttagtcttcttctcgggtttattctctgaccagcaggatggaccagtaacatttagaagttcgagcctctccaatttcacgctaggggtatacatatgcaattactttattgtcctgtgacttgtgatatttcattatacttagttacttgaatctcatgttttgctaggtctcagttgggtatttcattgcggaccttgccatgatactatggttttacccttcactcggtggaatggagtatgtaagtaaacatttttcatcttatttttaccctctcttcagtttccctcctaactgactaacctaggtccgttgccctccatttgactcctgcaaactgcattatttgtcattagccattaccaacttactcttggctgtcttttgtcagcttgtccaccatgtattgtcacttactgctgtaacgtatactatgctttctggggaaggacagttatacacatacatgagtctcatctcagagactactacacctggaatcaacctaagatggtaactgagtatacaaatatgttgcatagaattttgttttggtatcatcttcaatccatcagtccatctaaactgctattctctcccctttgtgttatcaaggttccttgatgttgctggaatgaaaagatccaaaagatacgttgttaatggagttgcaatgtttcttacttggctggtaagaataaagttctaaactagttgtgttgtggcagaatgtattgttctgcactgactataattaaatgggaattatgtgatctatgcatacattttcgtgaaagcattagtctttaattacatctgaacttttcaactgtaatattgttttatttaaatttttgtgatttcgaatttctgctagccttggaagcagttgtcttgctagttcggatttgtacatatgttcaaacaaatgcttgttttccagtgaggataatattggcacataggtttattggctaccaagtgagatatattgaattattctaagggaaaatgatccttcctaactatgggagttttaagactaaactaccaaagttgtatttgaacactcaggtttacttaaatctgtcgctaaatcgataatatggttttttactatattttggagcttcaagtaccttggtctgctaacaatgaaagaaactcctttgtgcaggttgcaaggataattttgttcatgtacttgttttatcagatctttttacattatgatcaggtacatggtaattcttctggattcaatgtacatgatggctatcaaacacatatttctgacttgatacttgttcgcatacagattaagcagatggagacctttggttatcttctggtttgtgttgtgcctgccatactgttcgtgatgaatatgatatggttttccaagatcttaaggggcctcaagaagacactggccaagaggcattgagtggggcaaggggtatgcatgtacagccacgacaaaccacctatctgtaaattcactcagcaggccagcagcctatagcttctcattagtcacgatggctaatcctggtaatatcagcttggccattaagatccagatttatgattgaatgcccagctttttatgcatggatgatatattaatttgtatatatgttccgctatggctgtatgttcttaatacccatcttctttttctcggtataaatgattatatcttagttttaacttaaacaactatttgccccaatttcagtcacattgtcaacacattgctgtaatttgccatcagctttggccatcattcccaagaatagtttgatcatcaacttttagtctccctggactaaactgcctttctttagatctggcttcacaatgatgcccgagtttttaaaacatgtataggctgaagaattttggaatttggaatttggaatcaagaaagttttcaaaaggttatcttttgtagacatgttccatataactctttatattctactgatcctatgtgggttccaacaaggaaagcaaaaagtaagagatggagcctgaaatataacacaatttctagtacaatcaacaaaaccaagtgcctgtaggattaacattccttcaattaactaactcaaacagatgaacaaaaagggtgcaggtgtcacaagtaaatcaaatgatcccatgagataccagctaatgagatgctggggaagtgctccttgcaattcaacttccatcatgtgggatatgtaggacatacaaactgccagaaacattgaagcagttaaatagctccattttaattagtatcacaatatgagtacattagcttatgcacctcccatagtcccttccccttttatttggcaccttcaccatgataataatatttcattatctgcaccattaagtgccttccatcagatagcatatagctcaagcaagtttccaactaagaatgcctttaaatttattttcttgagtacagctttctaaagcttatataagtagtcctaattctcctcttcctgatctatcacacacaatatgcattctttcattcacttgtccattcttctttgcctcctatccacaaccctcatttcctatgcaaaagatagcaaagcccatagcagtgtggtccttggccttagccatgttaggtctctatctgctccatccatggtgataataaactccacaagatttgacttcttggacatcatagaaccagtaacaacatatacagatggctaccttctttccctaaacctgggcatgcccccacaggtttttcaggtgtacttggacacagggagtgacctcacttgggttccttgtggcaccaactccagctaccagtgtttggagtgtggcaatgagcatagcacctccaagccaattccatccttctccccatctcagtcctcttcaaacatgaaggaactatgcggcagccgcttctgtgtcgacatccatagctccgataactcccatgacccctgcgctgcagtgggttgcgccattccttccttcatgagtgatctatgcactagaccctgccctcctttctcctacacctatggtggtggagcactggtccttggctcccttgcaaaggacattgtaacactccatggaagcatatttggcattgccatcctcttggatgtccctggcttctgctttggctgtgttggtagctccataagggagcctattggcattgcagggtttggcaagggcatactctccctgccatcccagctagggtttcttgacaaaggattctctcattgcttcctaggattccggttcgcgaggaacccgaacttcaccagctcgttgatcatgggtgacctcgcgctgtctgcgaaggacgacttcctcttcaccccaatgctgaagagcatcactaacccaaacttctactacattgggctagagggtgtcagcattggagatggtgccgccattgctgctcctcccagcttgagcagcatcgattccgaaggcaatggcgggatgatcgtcgacactgggacgacatacactcacctccctgatccattctacaccgcaatcctatcatcccttgcctctgtcatactctatgaaagatcttacgacctcgagatgaggacggggtttgatctctgcttcaagatcccttgcacacacaccccatgcacacaggatgagctgcctctgataaactttcacttcctcggcgatgtgaagctcacgctgcctaaggacagctgctactacgcggtcaccgcgcccaagaactcggtggtggtgaagtgcttgctgttccagaggatggacaacgatgacgacgacgacgatgttggtggcgcgaataatgggccaggagcagttcttggaagcttccagatgcagaatgttgaggtcgtctacgatatggaggcagggaggattgggtttcagcccaaggattgtgcccttcactcctagtgacgacgtcgttggagaaatctattcgtgatacttttcattctatccctttagcgcacgatcgaacggggtttcaggtgttcttggccatttttatttcagtcgagctgctttgtgtgtgttaatggtacgagtggccgtacgaagtcactagcaaagagaaattgttagtggggagttgatgacgagaaagcaaagggatcacactcatgtaatgcgaaactgccacttctgttttaagttcaaaataaaggcgtgctttatgtgttggaataacggtcgagctagtgtgtacatcacagttgtttcagaagtgtatatgctttcgacgtttgatgatagacggctcaatgtgcaactgataatcaatattttctcccttagcttccggtacgtgatgattcgtgtgcatctgaatatcatcacaccttgtgtttgtgatcatctggttgtatcagacggcttacggaagatatgttctgctgttggattgggttggggtcttggggaatggatgctgagtgccactctgtgtttgtttcactatcctaatgtgttccgtttagttctctgtcttccacgtgacgatcaatgtttttctcccttagcttttgttcggtgattcgtgtgtatgtcaagtatacgcctatcccggtgtgaactttgggattcaaaaccctgtgtctcaacctgaacaccagcaagtcgttgtagtatagtggtgagtattcccgcctgtcacgcgggtgacccgggttcgatccccggcaacggcgaactgttttttttttagcctccgtgcagaacgaacggcagaaacgtgtctctaccagtctaccttcgccgcgggtaaagactgccagtagtagagttgtcttgcccgtggcgtgtgggtgagtccgcgttccgtaatccgtgggtgcccctcgtcgtcgtcggcacgtcgggaactagcgaatcgctgtgcgcgagggccacgcgaaccgtgtgcgtgcgtgttgcgtggtgctgtgcatgcgcgcggcgcggaggtatgtgggggtgggtgggagaagggcgggggcgggcatgggcatttggcagacagcgcgtgcgtgccgcgcaacagaggggtcgttggcggcgggcccgcgctttcttcccacgacccacaacctgagtgcgctgccgctgctgggagcctggcctaacatacatatgctttgtgcaagggtgcccggtggcactgtggcggcgccagtacagtcgttagtcgacacccttggctactgatgacgcgcgaggtggggtcgttgcgggatgacaccggaccggacatcccccatagcaacgataaccctggtggtatacgtactctctccgtttaaaaaaaaacaacgggatttgatccctcctaatataacgaaaatgtttttttataaagggagtatactggtatgtatctttccgaacttatcatagcgctttttttttctcttctttagcttctttagagtgcgtttggttccaagctatactttaccatcatttgtttttttaataatggaatataatatctcggcttttactcaaaagagctacaaccaattattacatagtagctttcaagaacatagtgtaactctaaatgaatagaacataccgaagagaaaaacaaagaaaccagcctaacgtaaggagatcacaattattaaagtctatttgtaaatctccaaccataattggtaaaaagttgcataaccttagtctccaactttcggcatgcaacattcagaaactcttcatcttcatcacacctttgtagttgtgcccaaaatcgaagccaatgagttgccctgaaaatgacctgcatataaaaaaatgatggtgatttgtcaaaaaccatatcgtttctactcagccatattaacatcatttgttaataaatattatcacactcacttaaggtgattaaatttttttatcacacttcaacaagtttaagggaatcttgtcacagagtcatagatgtgtgggacttagcttattggaagagtctcttgtcacagttgtagctacaactaacaactggcaagataatcaaacttgtctaactttaagtgtagcaaactgtaataaaatatggcttgtaaccgaacactccccaatagtgtcttgccttcaagcaccaagcttcacttcactgcagtgattggcttaattgctcagtccggtcagccagctctcgtgcgtggatcggaggaagctcgtgatgcgggaagaagcaccgccggagatgagccagcggctcctccttgccatccatcgcacatttgcgcgcgttgctcgatatttgggtgattttcacgattagctaccttgttaattacactatgcttttgttgtccgtgaaccctttgttctagtgccatgctaagagcatgccaatacttccccaccttagtgttggactacacaaactttttccccctgcttggtcaataatttgttacatattataccaaaataaaaatgatatgttagatatgccaagtctgtgcttgtttggatattggagataatgatgccttgcagtcttgcacgtatactgctactccctcttgatattccacgatcggactgacaggacaacgttatggtttagtagaggttttgccaattgccgtacatggggaaaataagaatgtattgccttattcaagaaatgaagcacctaagtcgttgtagtatagtggtgagtattcccgcctgtcacgcgggtgacccgggttcgatccccggcaacggcgaactctttttttttttttttggctcttgtagagctcagggcctcaggctctccgttcaacggagggagtatgatctaacctctttttagtagcagaaaaactataaatcgaaaattatcgtataacaaagaaattagtgatatctagtagagcctctcgtaggcaaaattgctatcgcaaattcgcagctacaccagtgaaggcaataacaaagaaattaacagtatacaatacagtccaaaaaagttgagctctttgatttgccgtttactaattcagtgtcattgtacagttcgaacacgtaccatcgaacttattaatataccttagtgctcccattggccaattgatatacatcgaactggaacagtttttccctgtgccattcaaatgttttggcagacggagattggttttatcgcagtaatggaacgcatgcactatcaatctatccatatagtttcatatcatggtgaaaaatggtggcgtgaattggatcatccgtattgtccgtctccaaatctgataggcatcaccatagaatgactgaaatttgatctatagccagtaagcctgtgccaaccgttccaaacagagtatctccacctcactggtgtttttgagcttttgatcgagatgcattcttcctcatcgtccaaaatgctgcgcggtaccgattctgcaactcaacaacagtataaataagaccattattaccaaatatcaagaagattggcaaaatgcacaaacaattcatgggtattgaactagtgatgttagacgtccaacagaattcagtacagctgaaatctcaagtattggaagctggcagctttgaaatattgcatactagcattgtgaacatccgctgagagtactgagtcaggcagaggcagagccctcgctgggaccaaagagggcattggtctcccctttcttagcaaaaaagagcatttaactgctcgaatagtcagatgcaggttgaactggtcctgtgtcgtagtaattctgtaaattgtatcctttagattggcctttcatgtattttggctcacgctccaccactaactgatacattcaacaactgaatttggacaactagtctcctagcactcctaatacacctgttgaatttactatgcaacagttgaacactatatgagcctacaagggattgaggaacaagtggacatctagaagtccaaatgaccaagtttccaactgcagcaaacaggactatcacctttaagctttcactgtgccattctaaatatttgccataaattcaatcacttcctagatatttgaagattaaaccacagtgaagactgttgagattaaaagattacctgcatcattgatttcatatttgcagtgtatgtggtatctatcattttctccacctgaaaaccacaaatcaaagtaatccattcacatatttttgcagtgaggtgatgcactttctgtctaatcataacccttcactcttttttttttacaacaatgcatatatataataaacatgtattgcacttttttttgcaagatacaagtgtacaaatccaacgtattggtgcactatgcatatgcatatgcatagtttggagtttcctcaattatagcccaaaacttttttttttttgcaaaacactcacctccatcacaaatccataatggtaagcaactcttttcacatcttccaaactcagttcaatagacatatcctgtgtttaaggagataaattaagttcctcaagacatagtagcaccttcaaggattcaattagcatagcattcattcatttaactagtataataaggggagagaactaattacatcatctggtccataggagtcagcgaagtgatacagaagcggacccaaatttatccagacctgttggttgaaattgcataattatcaatgacagataagaaacagtaaataaacaacatataccgaattataaatttccccgtaaactgactcaaaaaaacattagcactgattcatcaagaatagtttatcagagtttaatcctataaaaagagactcaccccaccatccttgagaacttttgatatgatctctatatattcaacgatattgtgtgccgtatccaagaagaagcatgttacaacagcatcccatgaagctggagcaaaatatgagtattgtgagaatgtcaagaaggcaaaaaacccgtagttaccaatcatacatatctgaactaaaagcagaacaaattaacacatcaaggtcagaattaaagtattagacttcaaaatgacttcaaccaataatcatcagtttcagagttattgcattgcatgcctcaatagcctacaatattaatttgaggagctcattccttctccataatacataaaatcaaggacctggcttgcaactgcctcctacttcatttctaagaaaatgcctatcgtttgcaatttagtttttgacgaacgttaaagcaatactctcaccttgatttatttaatgagcattacaaaataaatccaagcaagctaacaaatgaacaataacagtaattaatatccccccttaaaaaatgtacttcgtatgtatgacaagaaacaagaccaccacaaaagaacaactcttttcccttgttggccatgatttaaaatcgaaacaatctgacagaaacaaaaccagcacaaaattgtcctctttttctggggttccatcagaacacatccattctcattgtgaattggttctgtacaattgtcactctatttatatatgctttagactaaccccaatgcaaaaaatctgttcgaaacgtatctgtgtttttgaattgttatttaatcccaccgcttccagtttctggcatgctttcattgggccacacaagattcaaagggcaaatggtactacaatattacaatttaacaaaaagagctaagttgagtgatgcatatccctttataaggaagccaggttaaaattaattaactcattttgattagtttataaggaaaccaggtcatcttacattcttggctttcttcattgtagacctctacaaaatcaccagcacacatagaaaatccttctgtgatccctgagctgtcaaaagaaaagaaggcaaacataagataaatatgtagcataacaagagataacggacagtttctctccttttgcaaggaacataagtaaacatttctacctacagcacaaatagtactgaatgactgaaacaagctgaagcatcaaacttgaattctagaattgaatgaagtttagattcaggattcaaacgaaactgcacaattaactaatcattcaaatattacaacatccaaacatagaatatttgtaggttctgcaaatagtccagatttaaatagggtgtttcaatttctctaatcaaatgctcttacatagccatttttgttgatttcatatgaagctcttgtaaatatagaatcataaatggtaaattacctataaatgtaatcaatatatttatgttttcatcaaccgtgacgtcctatatgcacattatattatacaaaactaaggtcatacgctatcaagtgtacagagcgatgaattttaacacagcatttgcaagcatactggtgcttatgagaaaaaacaaggtgctttattaccttgaggggtgaatatcaggaaatgaaacagggcgaagttgatcattgtctgaaagagaattgcagttgctgtgtatccaaggatatatagtccactcattggtttcttgcgtgctgataaaacatgaccaaatattattgtgtgatgaacaacttgataatgtaaggtgctagttttttttttaaaaaaaatatgtatagcttagattgacctactggtttagaatgaaacttgaacaaatcatcatgtaatacgagaactcgtttccctggctcacaaaacctgttcaagagttaaaacaagggtaattttcaagaatatatgatatcagctcattcacaatttatttgagctttttttcttttacccagagtggatatctccagagccaatctcccaagcccagcaccaggaactaagcatgaaggaggcctatgaagttcaacaaatacacaagtcaatgattgatcaagaatgaagcttcaagcaacttccatttgtatatgaggttaaaggaaatgcttgcataaactatccacagtaaatgtgtggtgtgagaggggacgagatgtcctaatatttatccaattcagaatcacagggcatgggcatggcaggcggccatagccgcagcggtttttctttcatcacagcccctcgcatcgtgtatagccatggaatggaaggcaagtcgttcgaaaacagcaggtaggaagcatcaggtgggcccactggtcggacggcaggggcgagtggtgaacagcggaggaaagtcgctgcagctgaggaaagcgtgtggtaaacagctgcgccggcccacaccacagtgagacgtggtaaaaatgaggatgacgtggataacagcgggatcaaacacgccatgctgaagtcacgtgaatcgctctcgtgcgagaagaatgcccttgtctttaattaccccgattttgaaaacaagatcactacccagaacaaggtaaaaaagtatggtagttctaaattattgtcataacacagggataagtcaagtttacctctccttgcttcggttaggaaatagacgattaagctcctccaggatgggcttatagcactcatcacgttccttttgaccctacaacaatttaagtaacaaaaggtaatatttcctttcggattatatcattactttcagacagaagttccacttcaagccaacccaaaattgcacagaaaatacctcctgagcccaatccctgacaatatttcttatgatgcatctaacctgaataaaccagaataaaatggattatagaagctataaaccagacagcatccaaaaacatgcaagctgaaaaacatgtaaaatgtaggcaaaggtgcaagaaactacatcagcaaaatatagcatgattgagcacttcccattatgaggccaaggggaaaaaaatgacaggaaaaattaacatatgatagaaatcagtaacaccacatatcaggaaagatgccagctttggtaacaaggccaaggtgcaagaaactacacacatgcatacaacatcagcaaaatatggcatgattgagcacttgctattaagaagttaaagggaaaaaagaaaaatcagcatataatgaaaatcagtaacatccccatatcagaaaagatgtcagctttggtaacaactgtggcggtcaaccaacatgaacctttggctatcttcttgacgcattgcagtatgctttctgttcgaaatgtgtcaaatgagaagttgatagaaacacttaccttgtcaacatcaattggaggaacattcaactgcaaggatggagccatgaattgctgcggtatcacctaaaataagataacaagaattaaatagttcacatttatttatacatatcgttatctccttaaaagtatgagaagaacagataaacagagaaaaatcaatgcttgttagactgaaaattatgtgtaaatattgtgtgatgtactttttttctcaaaaacacaggagggttgcatttcatttcattaagaaggaagaaaacacttattgcattctgccctttattgcaaccagaagataaccgaacgaacagctagagatagcgaagaacaaatgcattctgccatttattgcaaccagaagataacaagaatgccacatccatgtattactcctttagattcatagtgataaaattcaagcatgaaagctaaactatgttctgcatcatgcaattataaattataaggaatacacaacagcttacatcttgcaggtggagcttacattctcatcagcagaacatgcaacacaatctgtatcttgacagttagctgctgcatccatggctttatcaccattacatgatttatcttcaacctgagatgcccccaatttgtcaccaaccggccgggagcaactttccatgtcaactacctcgtcctgtttgatacttacatcagtcaaaacgtgtgatatcaccaattttgtactccctccaggctgataatacttgtcgttttagataagggtgaggtcaaactttagaatctttgattatgaatcatttttaaaatatttgtctttcaaatatggtgactacatgtatagattagtcttgaaaagtactttaataaaatcatatatttattaacacttttatacatattataatagaaaataatggtcaaagttgttttttggagaccgtgtccttgtccaaaacgacaagtattatcaacccggagggagtagtgtatatggcttcaacatggaagcagccattatttttaaaattgaacaaaaaggatcaagacaagacataaggcctaccttgttgtcagtttctcttgagagttcatgagtcttgtcgtctttcctggggcaaccgtctggttcatgcaactcggaattgcttacagagatagaacttctaaagcaatcacccctatcgacagaatgagcacaatctgcatgacaatgtccatgcatgttctctgcgcaatcatgaccatccatatctacatgctgactcatgtcgaaaggaggctcaaatgcctgcagtaatataccttttaaggatagcatcatgtacattaaagttttcacctaacgtacaatcttcccaccccgacaacccaaaccacatatacacaataacacaaacatacctcaagcatgtccatgatgaatgatgcattcatggatatacacctgtgaagtaataaacaattacaaaacaataataaagtccatcacagtaagcaaaaggagtggccataactagtttaagcagcatgcattgatttttcagaaaaatccggcggagaatttaagatagaacatcattggtagaactaaaaaatgttgactaaataaataaagtacagtgcatcagatatacaaaatgctttagatgatttcaaacatgacaaatagatctactgcaaaactgtatttcacaatatttaagcacaagcagtggaactaataagtattggccactactacaagcattaagcccataacattacttaccatctcagcctttggtacttcagaccaaggttaaaaagaagttcctacacaagaaaagacataagatatgtgaatgaacatacagagtaagataacctattacaagtcaaaatgaaatccaaaagtgattagccaagaggaagtggtggttgaatataaaaaggtaaaacgggtatggtgactcaaatacaaaccttgtgggcaggaggaagccttttgaatgatcgctcatatctcttgacatccctttctgcagcatcgtggtagctatcacaatagccatacaaaatattattatttaattagaaaaacactaatataagttaaatggttcccatgtagctatgttccacatacaccatttcacatttagattttccataccaataaatgttcaaattcagaagccattgtattgcctgcattcttttcttatactccctccgtttcaaaatgtttgacaccgttgactttttagtacgtgtttgaccattcgtcttattcaaaaaatttaagtaattatttattcttttcgtatcatttgattcattgttaaatatactttcatgtacacatatagttttacatatttcacaaatttttttaataagacgaacggtcaaacacgtactaataagtcaacagtgccaaacattttgaaacggagggagtaagtcatttcaacactggcacagtcttcgctacacttgttttgtccccatggcccccaccttttccaattgtgttcatatgttggacgaaaatttcaaaatacaattttatgttagaagttttgaaggtaaatctacccataccattgccatgtaccaagtcctaactattttagagtgtactagggcaatagcactgcgtcccggctcatcaaggagcccaagcatccacatagggaaaaagtaaatgaggctccatctctcccagtacgcatagctttagatggggtccaccattaattttttttcaggcaggccccaccacaaaaaatcgtcatttcctccttcggagaaaaatcgcttgcacctcccattttccgccgctccttccccatctctctctctctcctctccctcaatcggctcccatggcgccaaacccccaccctcctcttcgtcctctcccacggcggcgcacggcgacgactcctccgcccccctcctctcccacgggggcgcacagcggcgactcccccaccccctcctctcccaccggcggcacagatctggctccccctccccattccccaaacaccgccggcgccgcttgggagaaggcggtggtggaagcagctcgacagcatcgggcacctctcccctccctctccggcctcctccctcggctaccccaagcccaagcagcggcggcggcatccccgagcccacgcagtggcagcgagctccctgagcgcccctactccggcgaacttctctcttcactcttcagtcatccaccgttcttctcctttctcactctcgctcttactttcttgttacgcgtggaggagcattttttctgacaaagttgctgcgaggttcttgtgaccaactctgatcacgcgaagctggtgagggaacagtctccactcccctctctcctccacacaagcgatttgcctacgtggaccaacattgccatacgccacgtgtgtgcactgtgaatggccttagtggtaaatgttttcaaatgttaactgcaagcgttctaaagaagataggtaaaacatagggagtacttctgcaatatcaatgctaaaacttgaaaagaaaacaagatttgacaaaagtacaagtgttgatgcaataatactttgattatggaatttctaaataaaaaatagcaattccaggagatatcacttgctcacatcacatatagtaacttttaagggtcacgcctatgagttggtttatcaagattttcgtaaagacttcaacggggaaaaaagaaatgttctctcactccaatcaacaacgttcatagcatggttgtagtgtagaactccccaagtcccaacgaagcctaccgcccttcgcggatgggtaatccccgtaaccacagatcaactctatccagaacctcacaccaccctcgaatcggcgactactcctaaaccctacaactgagaaacaacaccaactcgaactaagttgtaacccacacacacccccacaagcctcggaacaaagcggggggagcctgtagaacggagctacgcgcctctacgcgaccaaccaaccgccgccccggcgagcaaggagagtggcgtggcagacgagacgagctgggaggggaggggagggggacgggatgggggttgacgtacttggcgtaggcggcgatgatgcggcggagtgagctgatctcgagcgcctcctcctgctcggtgtaccgccgttcggccatcctccccggcggcggcggcggcgaggcggaggagcgcagctttctccagatgaattggtgggcctccgaatgatgggtcgcgtctcgcgtcgcgtgggggaggtctttgcttcagttatgctcaggggcaaagcccactaggaattttgccgggtgaaccaagccaatatggaaaagaagaaatggaatttcataactcaaatattcgtctcagaaattaactactcctatgatgataagtctcatcggtaagcgatgatattaactactcctatcacatcaaactaagcatggatcatcatattttgatatttatatgctggcctaaactcttgaagatcttcatagaaatagagttcatggatttggatttgaaaggatgagtgcgcatgtgtataaaagagtttgcatttgcaatgtgttttgaaggggaaaaaaaggatagatcatcccattgtttcatatcataagacttgtcttgagttaaaattttttagtttgaccaagttcataacaacatagcaacatgccaacatctaacattaaaaaatccacaattaattataattttgaagtatattttcttgtgttgaaaatgctgaaacattttaaacttgaatttgacttggcacaaaccgatggagtagcttcatccgatttatatactatgaaacatattgacacagcgatttatatatctcgatcttcatttcgccctattttagtataaaatataggttgcaggtttatatctatttgatttttgtagacgcatataaagctaacacgaacacacgatgcaccgagaacgatatgtatggcttttccgatgagatgaaacactatatacgctgctaaccatcgaacgatgttacttgatacggtctgtgacgaccatttcagttagtactccttccgttttaagtttttgtttgtattgtttgaccactcgtcttattcaaaaaatttgtgcaaatataaaaaaaaaaagttatgcttaaagtactttgaataataaagtaagtaaaaaaataaataataattctaaaattttttgaataagacaagtggttaaacagtgtaggtaaaaactcaaaatccctttatattatgggacggagggagtatgttacaagctaattaagagccctgggaaggcagaacaaaagaggggtgaatttaattgcaatacacatgcccgtcagaaatggtagcaagtatacactagctgtaacctgagacccatcatcaccgaagctgtaacccaaacacacggcgaaccaaacaaacatcgccgcgtacagcaaacaccactctttggacagaggagggatttttgtatgaagaatttgagaagagaaagcatcggttagaatttacaaagcttggacgggaaacaagatcaaaaggaaccaatttttttcttgttttaattatctgtgttttacttttgaaaacctccttatcctatttatgtcgaggttggtattgttctggtggaatggtggagtgagatgaaggttgcccctccttatggggcaacatatttaagaaacttccttgaacaggctcatcttcatccatgctctctgttttaaggataaaagcaagttaaacatatcatgaaaaacggtacatggtgtataaggaaccaataggtaataatagtgctcaataccaaataatgtcttgatagttggccgctttgacttggaactcttcttcttcaactcagctgttccataagcacaacattttttttcaaacaaaagacactaaaaatgcataatctaaagaaaggcatcatcatttacaatttcattagagagagagagagagtgctaaccaattcctgcaacctcatcatcatttacaatttcaaaattcttatatgtatagccaacaaagtttgcatccttggacggaagcatctgcaaaaatagcagtgctcttcgttttagttcattggctaagaggcaatacgaaaatgaaacatctctaattaagcatgttaatttctgcctcctaaaagcaatagttggaaattttggaaatgttcctaatacatactagttttttatatatttttatggctacagactagctagcagtgaatcacaagcttcatgcccatggtccatcactagtcaagctatgtatgttccctatctacattctacagatagcagaaaatagagtcgcacaggcgacacacgtgctgccgtaaagtatatatgatataacagttgtttgaccaacacatatgcagcttcattattaggaatgtgtttccaactactcagtaattagcatttcatggtgaagtcacacatacctttctccatggacctgacttagatgaactttgaatttgtgctccggtctgcaaaatagtaagaaaggtaagtacaggtgtcataacttcagctttctatacagtttaccaaaatagcatactcgtagttttaggtttcactctcaaaagaccagaaataaacatgttaccatggagacgatgtaaaacgtggctaagttgtcatgcatattagaaaatcataatgctaaatgcagcaaggtttaagatcacaacctaataaaacaaggtgaaacgaaatccctcctcaaattatcacatgaatcagaccaatgggaaaacgactgaaatttacctcctcaaatttctcaaaattctgagtatccaactcgctgttaacttctggtatgaaagcagctttcatctgatacaatctttcccatgggagacctctaaaccatggatgtgcctaaagtagagcatatgacgataataattaagcacacagttgagagcaataaagatattgtacatatagaagagagcgcacttttatctcatgggctccttttgttccaagtctctgctcaacattacatagaagtttgctgatgagatccttagcttcaggagaaagctttgcctcttcagggaatttcaagtgacttctccagtttacaatctgcaaatgaagaatagaaaataaaattggatgaaacacatgctcatgaagctacatgagtatttcctgtactggagtaaacaagcttagctgaaagcattgggaaatacagccttccacaaaattttcccactatagggcacttcataaggaaaaaccaaggtcatgcgtgattattggagtccacaaactgtataggctgagctccgaggaccagttgctaccatcatcatctagccactgacccacataataatttgattacatgcaggtcactagtacattactatggcaaatactgcattctgctgtgttgattgtgcgataaaatttggcataaggttgtcttcttgcaagttgggtgaggtttgcttagactgaatatagaaaattccaaacaattaccctctagataacaaattaaaaaaaactgtgggcaaagtacatgcctttctgcaggttgacattggatcctccgaatagaatggaggataaccaacaagcatttcatacataattgcaccaagggaccacctaagatcaaaataaaatgtgagaacaagaacgaagcacatggatgaggaaaaataacatgacttaacaattatggacaattacaagataagagactaaccagtcacattccattccatatcctttcttcagcagaacctctggagcaatgtaatcaggagtaccaaccgttgaatatgcctgcatgccaaaaaaaaaagagtataactaagcatactaccatatattgatgagagcctagaaaactagactcatgtacatattcacttgccaacgtggcaaaacgtagtcagagagcaaaatgtgaaaaattcaagataaacgttaaatgatttttcatataataaataccaagtttcatcaacagctaaataatgcatgatttacacaatccactaaaactttgaagcttagagcatgaaattttttatttccttggaatcgtgcactgtaacactgcacattgtacacaaatgcctgaattaagtctgtccaggaatagcatcatttatgcttctgcacgcaaatattctttattcagaaatattcaatgttcaccgactctaaaaaccttgtcttgaggaagcacaaatgaatcttgaaaatccatcgtagcaaaataattttcatgtggttttatgccaggtaaaagaccaaagtattattagcccagatgttcaaacaaaagctcacaactagtgtgaatttactataaaaactattaaatgcatcaacttgatgtgggcatgtggcatcaggcatcacaacattggcaaggttctatcaaatatcaattagttgattcagtttcagatatgctacttaccagcattcgtcggttcttttgccaatgcgacaattgctcctgctgtgtgcgctttagagcagaagagcttaaccggctgctactatcaggtaaaggcttggtgccctttgtagatgtataatctggctcattcaaatttggaaaattactgctatccaaaggtttacacaatccaaagtcagaaagcttcaagtgaccactgcgatctaacaatagattgtctggtttgatatccctgaaaaaaaaacaccaaggttatctttggaatcatcaaatttcttaccaaaacttgggaacacttatttgataccggtgaatgtagctgtgcttgtgaatagattctattgctaatacggtttctgcaatgtaaaatctggcctcatcttctgtcagtgtgtccttgcgcataagcaaagtcatcatgtcaccaccaggaaggtactccatgatgagatacaagtattcttcatcttgaaaagaatagtagagcttgactataaaagcactatcaacttctgcaagaaggtttctttcagctttgacatgctcaacctgaaatttgtacaaccatgtcaaagcatacgtgtaaatcagaaatagaaactacaaaataatgcagccagaccatacatggtacctggcccctacgaagcatctcagatttcttaagctttttcattgcatatacattcttagacgccttctctctacaaagacgcacctgcataattacaatttacagtgacatcaagagcgatgcacatttaaatggcctcaaaagtaagtacatataattgatgacgattagatatagtagtttcagaactgcatagatctaccacactaagcaaatagacatatttatactattctcttgttgaaaaggaagaaacataagaatcttctatttaaaaagggttaaatctggaataaaaataataaatacaaagtcttgttggacactaagcacatgccttttttatttgtcttaagtttaatggtagattataggcataaaaagacatgaccctatttctcactcaaataaatttatgtggaagacactgaagattgacgaggcagggcataaaagtctagaccaggtttcatctagacttgaggagggattacatgtttcttttctctcgaatacacaagaaaggagggattacatgtagacttgagcctatgataaagtggtatactatattaggtccttaagcagaacataagctgggaaaatcagagttccttgacttccttccttttattttccttttacaatatgtatcgggagaatgattagaattcagaagacaaatgaatggcctaggaccacttgacgaattgaatgccatcattacaggggaccaaagtgtgacccatcaggaaaccagatataacaaataaactaaaaaaactcacattttccctttttcatgaaagcagccctttttcaaacaattaaaaaaactcccattttccccattttttttcagtcagaacacttccatgttaaatggcatcatgcaaaaaggagcagcaaggcagcacatttttctaagcataaaagagatccaaatttatactacagacattgcataagcaaaaaatggcaagtcgaccatgattctaactgaacctactgttaacaggatgtaaatagaaggccacaaagaaatcttagcacatctagtgttcttgtgctccaaaagaaatttgctaaggtcctgtgtatggaattgagatcagaagtacctcgccaaatgcacctcttccaataattgtcaaaagttcaaaatcttcaacccccatcttatgtctctgcaaccgcatatattcggtctcctttttctccaaatgctttagaatattattttgctcttctacaggaacctctgcatcctgtagtttcctctccaacatccagcgcctaaaagcaaatgaacacatcagagaggactggcaacaaaatgtcatccattgaatgggcataaaaggaagtgaattacccataataggaacaaagcaggttgatatgattttctagtgatgcaaaaagaagtaatagtgcgcaaagacaataagaaattcaaattgagtatgagcagaaaaagctcatcatggattattaaaataaactgttagagcataaaaatcaaaagcggtggcgtcaaaatcaaaaaccctgaaaaggggaaagcaaccaaaatgggtatacccacacaaattgcgtgagttcaatgaaccatttaaaagtcatgtgcgagttacagcttttacaacgtgtgcgagatacaatcttcagaattgagtttttcaagttgggtggtgcaaggctattaaagggattcataaagattcatggaaggggctgaattctttgatcattttagtagcttgggaggtttggaagcatcgcaatgattgtgtgttcaatgaggcctctcccaatgtcacagtggttttgcaagcggtgtcaaatgagagtagcctatggtgcttaactggggctcgtgcgcttcaggagtttctttctaagatatttgcgccgaacgcctaggtagtctaggaggggtttttttttctgggttcagcatcacctcggtgtgatgtgttttgggcttgttgcgacttgcggggctttttggcccctcctttgtatatatgtttctctcttaatgaaatgaaatgcaactgtccagcgtttttgagaaaaagaagccgcttgtgtaaccctacaagataaccaatatactcctttcagtcgcatcaagcatcactttggataaggcaaataaactcatatcactttcaaataactaatttaaatattgatgaatatattttcttttctaaattaaatttgtttggctgaacaaatctactaggacaacatttatttgttactaacacgagcgctagtcaggaaagctacccaatcaatcaagcttcctttttttggcagtgtcaagggcacacatgcacacacacgcgcaatcttgttcaattacccagaaatgtatttaccattgaaatcacaacctacaaagtgtgatatgtgttgtcaggtgccctaccaaacaacaacaaaaggtggcctttgctggtctaatttctcttctttgtatggtacagtacaacggtaataacaaattccgttacatatacgcaaaatgccaaaaatatatttttgcgagaaatacaaccaggcaaaagtagcaagaaatataattatgtcgcctacctttctttcctatcttgcagggacttcatctgggtcttgtaatgattctcaatgtactgttttgccgcggcaaccctctgttttgttgcactagatggcgcgtcatcaattggtggctttcctggatcctttccatgactggcagccaccgctggactcttcgatttgtccctcggctggaacttctggaaccaacttctcgcggaatccatttccactcacaatggcatcatctccgaaaccaacggttttcttatattgaccaatccagcagccaactgcaggcactctgaaacggtcaatccaactaacaattggatcagatatccaaattggcaattctccgtggaacccaatgctgggaacgatgcctctatctgaaatttgaggagataaatattctcaatcagaatcgttacacccagttgccatctgtcacacgactgaatgaaaattcaaataaaatattcacaagttacaagttcctgccatgttttgccccgccatatatgaacctactccatacttgaaatcaaaccacgcctactccatgtttgaaattaaaccatggtgagagctcgaactatatcccatcgaaaggggtagctagaacactgcttacgattgagggagaacacctcaagatctcaatttccaagcgaaacaaaatctcgagagaaaaaaaaaactctccggcaccggaagtagcagaattcgatccagaaatcacattgcctccacccgggagacccccagaaaccacccacgaaaagcagcaccagaaaccccccatcgcctcacaaacgcccccaaccccccaactcccaaagctcacaaccacgcgccacagcgacgagtcaccaattcgccaccggaatcccaccaagccgcaatccacacacacacacacacacacccctccctcccctgagcacacagccgcagctcatcccaaagtcccctccactgcacccccgctccaaacaaacaaaaaaaaccttacacaccgcagacagcgaaaccaccggccggagccgcgtcgtccggggaagcgcgcgctcacctcggcggcggcgggaggcaacgcggagcggatctcgggcgggcgacgaggcggcggggcggggggcggcgattggagcaggcaaaagtggggaacgaacgaactgccttaattttattttttttcctcctcctcctctttctctctctactctgctacgactcgccgggttgggttgtcttttcgtgggcaaagcaggcagcgggcagcaaaaggcaaagcgtgtgagagaaaagaaaagagagaagggaagggaagaggagtggagagaggcgtagtagagagaggctttggggctttggcttggctttgactcgccggaacgaaacttcgtgctgccttccctctctcctcctcctccgcctcgcgtctcccggcccccacctgccgcgcacaacgcgacctcccagctataaaatcacgcccgtccatttcgccccccgcccccgcgctttgtaaactttgttttattcagtgttgtggaagatagaatacggacgtgggacgaagaaggtaccgccaaatgattagttgttatgcggacgattaattagaatttgacgaaaatttgacgttttgtaaaaggacaaagttgataatagcttgccaattttttaggtaaatgtatgaaactacaaatattgaacatattactatattagaatagagcaagcgtgacatggcattaactcaacatatattaaagttcataatccattccatagttgtgcatgaaacagtgagatttaggctgggatagatttggatgggcaaacaacgtacggccaactatgggtcaggatagttgtgtgatcatgcccgattatacggatgatgattagttaaaaacggacgatttatcggtaattacgttgattacgcgttcaggacaaccaagaagaccgtttcgtgaaaacgtgacgggcagcttgccgcatacgttttaacgggcgtataaacggccgtatcaaccgttttccacaacactggttttattgttaatgtattttttaaacacgatgttcatataaatgcatgcatactcatcattacaaacgtacacattgtataacttgttcatataaacatctccgaagactatgtcgataaatatatactggtacttccgaatttaaatatacgatacaatccaattttgcttctataactttgattattatttttattctgaatataatagaggggtaattgcaaaagtacctatgaagaaaattctgtgcatataattttatgtagaagtacctctaaacagaaaaccaccatggttttaagtgtcattggtggtttaaattttaaaagtttgatgggataaaattatcagtgccccatatatttaaatacgaaaggagtacatctttagtccctagacatccatatcactatcacatgtatacatccgtcgttacctcttggagtatttgggcgtttgattagtgacaaatccacagcctacctagtaccctatattactggtaaaagaatatgtgaaagtgtgtatatttgtatgtaatatttgtagatattagagcttattatacatattggcgctcacggatgctcccatttttgctttgagaggacatgagaaaataaatacccttgcccctgcagtttgcaggctggagttgttgagaagaaatcaagtaatgctccagggttttgacaattgctgcgtttgacatgagagcaattgttaatgcgacgtgaggtacaaaagataatggctttgttaatcgaactcccgtttaataatggttcggaccgtgttaataattgttgatcaagttcaggtagataagactgcggtttaggacagaaagtatattgatgatgtgtcaggtttgcttctagctggccaaatgcaatttctttctgatactaaaagccacgtaattacaacttttattgaactacacttatctggttaagttaacctaaccccagcattataggaccaaactactactcccaactgaagtatcaccagggacatgtccttatgccttgttcctatgtccccaagagaatatatccttcctgcggttttggtagcaaccacaacacttgccaaagagcagagctaagctagcatatcccaaaaggcgcttttattctcaccaccattggtgcctgaaccacatgagcttgacagtgacacacatgttctgaatcttaacaacctgaatgtgtgatgtggaagctctaaaccgtgcagactcacagtcccaccatttcacctatgccgatgcttattcatacggcttattagcaaccaaaataatatattcacgttctccgtgattcaaatgcaaatgatgtcacaaattcagcttaaaaattaggtttcaaaattcaaattttggcatataagcacaaacgaaataataggggccaaagtgcaatgaaaaaggatcacagcttgagatagattattcatcggattattttgatatacaaaattaataaacatctagcaatgtagagcaaataattcgcgacagttattctgtgaagtagctgaaaagatatggaattggagtaattaaccacctgtacttatgtaccatgatggttaccattgagctttctttcaccgaccattggggagcaggtacacccaccgcagcgtgtacccgatgatggtatggctgaaggctgaagctgcacatttcttcaagccaaattctcaaatagaggcgtatagcatattggaatacccaaaagtcaagccatgatccggtcatcgtccggactccttcattttggacaaagaaaaatggctccgtttctaccatcattggcgtgtgtattgattcttggttaacagattaaaccgtgattagttggacattgtcaaaggggaaaatgattgtgttgctctagattcagatatggatgtcatttagataagaacaataccaagaagatatagatggacattgtaagagatggaagccatttggcttgtccagtagtctagattgggggcatgaagaaagttattcaggagagggttttaccttgtctgatcacatatgaggtaccgctgattccaagataaaaagctcaacttcgtggcaatagtttttaagataaggagaatgattacatcccaacatatgtatggcgaaagtttgaatagcttacatcccaacatatgtatcccaacatatggctcgtttaatttgttaaaaaaacatctactaaattttggtagggcaatgaactaaataagactttacaatcacaagcttaccaatctctatcaatatttagtaattatagtcacgaacatattgacaaaaaaaaaaggcaccgaataagccttaagtgatcttggactgtatgtttattgccaaagtactaggctcctcttcagataaaaaataatgtcctcaaaaaactttttttctattgtattacttataagatttgttttaagctatttgttaagtttattttttaaaacctttaatctatccctatgatcacatggataatctgtcgtaataatatgcttaataatctaatcaaatggtacattagtctcccaattcaaagtttaaactcaaaagacgtttagttttgcataattatgaccatagttcatttatttcaatgataaacctgaatgatcgagaaaatgacatagaaacacacgagaaatatcaatacgtatatatggctgtcccgacgagttatcaatatataagaacactcatattgatatttatttatttatttgcgaggaaaaacagccatatttatgtgaaaacattgataaaatcaatactgtaaaatgccttggtgaaaataacaagactaagctaaaatttcacaaatatcatcagccagaagcccacaactcataggtttcatttgcctgtgctcccatctcaactcaaaatgctaaacgttgtattttttaaaatattcctttcttaaaaaatcatattaatcaatttttaaagttagttttagctaacacttaattaatattaatgtgctaatgagctgttccgttatttgtgccggagagggttcccaaccaacgcaaataaacgcagccgtagcagtacacatttcgtttcaataggaacaaaatttaaatacaacaaaactgcacattgaaacagttccccactaataaatactgtaggatttaaacaagtgaccccgactgtgcacttgttccgctgccccaccagtcgccgtcgtcacggcgtcacctgtgcaccataactggcgggggctttgggtgccatccccgtctcccgtaaattcaccatcctacccacgcagtccacgtttcccagcccccaaatcccaggggcaaaatcgtaaaaccacactccgtcttcctccactgggaaccccgtctcctccgcggcctacactgcgcagcgcagcaatggcggcctactgctctagggtttaccaccaccacccggtctcgccttccacaatgcagggatcgctcgcgaggccttcgatccacgcgggatccgcaagcctgaccttccgtgctcggcccaattccgtgtccatcgtgcgatgcgacgcggactcgccgccggagggaagtgctgtggcgggatgggcgcctccggggccgtacacggggagggacccggcggcgaggaagccggcgtggctgagacagcgtgcggcgcagggggagaagtacgcgaggctgagggagtcgctcggggagctcaagctcaacaccgtctgcgtcgaggcccaatgccccaacatcggtgaggtaaaatagaatcaaacatgtaaaaatcttaaatccaaatgcattatttttttttgcggggaaaatccaaatgcattgtggtgtgacaaagttgtaactctctttttttgggtttgattttgcgatattgtggtatatttcagtgttgggatggcggcggcggtgcaggtggggacggggacggcattgcgacggcgacgatcatgctcctcggcgacacttgtacccgtggttgtcgattctgtgccgtgaaaaccagtaacaagcctccgccgcccgatgccctggagcctctcaggacagcagtggcagttgcaagttgggggtacgatccaccgacgattattgcattattggcatgttgagatgataatgcaaaagactttagaaccgatgcttctttttttttttttgcagcgtagactatgttgtgctgacaagtgttgatagagatgaccttcctgatggtggaagtggccattttgcgcaaacagtgaaggctctaaaggtttgtcggtcgccattcagttgtgccactaaattggtggttgtactgtactgaagaaacttttagcttatcttcaggaattgaaacctggtatactggtggagtgtctaacttcagactttcgaggtgacctggaggcagtttcatccttggcaagctctggtttggatgtgtttgcacacaacattgaaactgtgaggagtctgcagagaatagtcagagatccccgagcagcgtaattctctctgtgtttttcattacagccacaaaacactgtatggttgcctagatgttaaatctgaagtacttcgtcattaatacgccctccagagctcatgacacccatacagaggtcctgaggtccaggattgtcttaggcagttaggctatccaataataatgactgttaacctaccacatctaattttgaaaactgaggttgagggataatccttgaagaaactatgtaaaatctctaatgtcatcatattgactcttggcaatgtagttattatcttatttccagtttattatctcgtttccacagatacgatcagagtttagctgttctgaaacatgcgaaaaattgcaaagatggtatggtaacgaagtcctctatcatgcttggtctaggtgagacagatgaagaggtgaagcaaaccatgtgtgatttgagggccattgacgttgatattctgaccttgggacaatatttacaggtttgatctttgagcaactttgccagcgctttttatatcctcctggacttcctttgttcttgttgttgtatcatccaatgctccttgcttatacagccaacagaaagacacttgcgggtcagagaatatgtgactcctgagaagtttgatttctggaaggagtatggggaatctctgggttttctttatgttgctagtggacctctggtaagcttcacataaagtctgctattcttatagataaaatctaataatatgagcaacagtatttaaagaaaatgataactctactaatggcccttgttttgaaaggaatattgctaccgtcgtatttgaaccatctagatcatgtatttcctggttatccagacaatcttcaaaagagaaaaggcccttctcttttgttggttgttaacttggtagtagaattttatgcatatttatccttgctactgttgatgacttctcaggttcggtcttcgtatcgtgcgggagagctctttgtgcaaaatttggtcagacgtaaaaaagccgagcttgcacctactttgcagtaaccaaataggagtattactactatacatctgatggcctggtgcagttctttgatgaaagttttgcattgaagttgtgtgctgatgacaggagtaaggaggtggcacaatcgggaccaaaggcctagagtgacatgcctataggcgctcgttgttctagccatgctgtgatatctgctgtagcctgtaaaaaaaattgtttttcactttcttactcgggctgtcaaaaaagtgtatggaaaccagataaaataataccgaatgctaaaattcatgttactgcccatgacgcttcgttataacgctaatgtattcgcgtccattttttggtgtatgcgaaaacaactcaagttaaaaactgaaaaagaaaaaaaaaagggcgcggtcttttggctgatgatgactgaattaaagtctgtaatttcttcagatctagccgttactctcctgaaaggagctgattggttcgcgatcctgaattatacaatcatcgtagtgtttcctggtgagttgctatcaagatgtagtagcaactagcaactggctggcttgcacgatggacaatttgtaatgagatttctatcattccgccagatgtatagcttcggttttcttactcagcacaacggggtggtggcgcagttggctagcgcgtaggtctcatagctaaaacgtgagtaatcctgaggtcgagagttcgagcctctctcaccccacaaaatttggccgagtgatgatgaaatgctccgtgaccgattgggtcgtcacgaaaccatctatttcccagatgtcaagagctatactgagctccggcctcttatttttattccattttaatttacgcgccgcaacgcaacttccatggacgcatctggaccaccgatttccaatccaacgaacactctcgctgccgcggccgccgcctcctcgccccatccagcactccacgcccctagaatccatccgccgccgccgcgatgccgcctccgccgcacgccgctttcctcctccggtcccggggtctactgcctcctctcctccgacgaagccccagctccggcccgccgcctccgctcctccgcccgaccaggcagcgccgcggcctctccgtccgcgcctccgctgcggagctcgccgccggaggtttgtctgcgcgttctcctttctaagccgtgtgtttgtcgtgagtagactcggtgtttgcgtgtgagctttgatgttacaacacagtggaatggctggggttcgttgcagttgcaggggtggaggatgcggtggtgggcttcgtcaccggcaagcggaaggccaccgagttagcccacgcgtaggtactaaacccccattgttgcgtagcgtgtaaattatctcttgtttttacctttgagcctaaaaagtaattgctactcctatactgcgttagttacaatttacagtgtgtactgggcaagtatgaaatgggaattttcttttcttttgacagaatatggaatgaaagttctgttaacgggaaatgctctctaggattcagcgggagatgtgtaaaagaatacgtgtacacattagctattcacattttgtcttttggttttctcattagggtgtggagaagtattgttcggaaaggggatactgtggttgatgccacatgcgggaacggcaatgatacattcgctatgcttaaaatggtagctgatgaaagagtacaagggcgtgtatatgggttggacattcaggagtccgcgatagccagcacttcctcttttctgaaaatggccgtcaatagccatgaggtatgcatttgaaataacttcaagggaagtggaaacaaagattttgctgctacattgtgttagaaattaactctcctagataggggatacatttaattttctttctcgtttccaaagattagcttatttataaatgagaataaaaatggacagataatgttgttgatagatagcagagaaagatctaacaatactcatatatgctgagtctttttggttttttttatctctttgtggtgttatggtcagatcttagtatatagaaacaaagcatcattgccatattcccaggaaatatctgcagttttggggttgttgcaataacttatcttggctgcagctcgaacttgtcaagttgtttacaatctgtcacagtagaatggaggaggtcgtcccaaaagatttccctgtcaggtgagttctgattcacatttattcctagttaccaactcatctgttgacaggattcagtaacagtttattgttgaaattattggatcaagtaattaagatctttgaagtgttgattgaattattaatggttcttttattttctaggcttgtagcattcaacttgggctatcttccaggaggagataaaacaataatcactgtacctaagacgactgagctggctttgcaagctgccagtagcattgtcagttctgggggactcataagtgtccttgtctacattggacatccaggtggaaggtacatgcgaatgctaacaatgtgtccatgtacaatacataggggctatcaactgcttgctcgttgtaatttcatacatattctagatgtgcagttatatatgctagattgaactgtagtatatgatgaattaagttaacaaaaagaatgtctttgatgataattttcgcatgtttttaacacatcagaaaatctttttttacagtattgtattcaaataattttaagacttgattaatttatcttcttttgttatgatccttaggaatgaacttgatgttgttgaatcatttgcatcaagcttgcctattgatacctggatgagctgcaagtttgaaatgctcaatagaccagcggctccagtactcattctcctgtacaagaaatgatcacaccttctatgacctacttgtggggaatgacggagttagtgagcgaccacatgcttacttgcatgccaagtgccacaatgaccaaggattcaagatttgaagttacaaggcatttccataggattttactgggtggacagctgtgggtattgataacaacttttgagagcttctttttcgccaggccaacttttgagagcttcacaactatatatatgtttcaagcactgcagtttaaacgaagggcaattgctttgagccacactcgtgactttactcctttttagggttgtgttgatgttttgtattggcaacaataaaggggtagcacacgagacattaaagtggatggatgcaaggagacaagggtttagacatgtttaggcataccctactcttgtttcgtggattggatctgccggattgtattgatcatggtgttattggttgtgttgatctcgtggatctcttgcctcatgcctgtggattggatctgtcgaattgtattgatcatggtgttcttggttgtgtctatcttgtggatctcttgcctcatgcctttgaagggactccctgttcaccttacatatgaaggttaacaaggaggaaaaacacaactttaattttgtaatctatacaacgtaatattcagccgaagctctataccctgccttgagacataaggtaacatggcaacaaagtcctactctatctaatattacatggatgcattccacctatctgtagtcggatatgtaggctgtgtgggaacatgataccaataacctccacaatagtccccgagatcttcacagttgagttgcggtcttctttgtgattcttgacgaatactgagtgcttcaatcttttctatgaaggcttcccaagtgtcaaagaggttgtagagagctttccaaagaattgacaaaataggtgcatcaaatagatgcatctattaggtgtagcccatgactatgtgcttagttgagtaaagaataataatcattgttagcaaagtggcttacacctggacgcaatatatatggtgtgaatccccgattgatatgacccgagtgatataccgattacataaaatgtgatgtgggcagctctggaccaaccgcgtcttgagaatatgatgcgcgtaactctgaaccaaccgcgacttaaatcatgtgtttttcaatcaacatctgacttacataaaaagctagtcgcgatgcttcatgagcatgctaatacccttagaaaataatattaccacacggtaatgcttaacgaaagaggcattgggtaaaatagcacgtgggccgtcggaacaacaccacccaagacccaatagggcatgcttaattcaccactcctggttgtaattgggttatgaacgcaataggctcttggcagtgacacgataccgagtcagtcggtcctgcatgaccaatccactagaccacccctcttgtcagtttcacgcctttgagctatgatgacggtgtggtgcggatctaacccgcgagaaatgtatatttctacaaatattttaaaacatgtatatgtatgcaaaattatgaaaaataatgtatactttaaatttcaattccaaaaaacactaccaggaataacaaagattaacatgattaatcttaacttattgaaaccatcatcatcgtcatcgttataggagtactgttaagcattaaaccaaccacaacaacacgatcgagagatttttgttccagttccttcagcactgacgcgcaccatcaatgaagaagcatatcaatggagcaatgggttgacgacttgaccg

SEQ ID NO: 5941 - DNA, 838 bp, Oryza sativa
cggtgaagacgtagacgcccaacaacggcggcataaaggccagccgtgcaggcggaaacaccagtcggcggcggcgaaggcaagccggtcggtgaagacgtagacgcccaacaacggcggcataataggccagccgtgcaggcggaagcaccagtcggcggcggacgaggcggccggtcggtgaagacgtggacgcccaacaacagcggcataaaggccagccgtgcaggcggaaacaccagtcggcggcggcgaaggcaagccggtcggtgaagacgtagacgcccaacaacggcggcataaaagaccagccgtgcaggcgaaaacaccagtcggcggcggcgaaggcaagccggtcggtgaagacgtagacgcccaacaacggcggcataataggccaaccgtgcaggcgaaaacaccagtcggcggcggacgaggcggccggtggtgatgttctgactgatccattcctagagcgtaagagataagcttaaagccatgaatcccttttatgcatatctggatctggatcctgcagaacaaacatataggatgagtagtatctgatataaatataatactcgagaaaaaatcaagtattttaaaatatttataaatatgtatttctcctcttgtcaattttgatttccccgagcagatgactcattacgtttaaacgctctgcccaactagtcatagccaccaagcactgggagtcggcctaagcacttcccaaacatgcatatgagtgacatgagttcgtcattaatggaacaaagtttcacggatcggagtttactactcgggtacttttgcaattattaagagcagaaaatat

SEQ ID NO: 5942 - DNA, 16419 bp, Oryza sativa
ggttctaatggtaatgttggatcaataccaccgctccggtgttggttaattaaaatgaatcacatggtgggctgtgggtgcatggttttgctggtcgcacccatggcagttaaggaccggttcgcgggatgccctggaagaacttatcgtacttaccacaagccagcgtgggcaacggctgggcttgtagtgtagctttcctctagtcgacgcatccaggcaagggtgggcgtgatggagcggggcgggccctgcgacggcctctgtcgcttccggattcacctaggcacgagaggggactgcccgttgcccgctggggacgggggtgaaacctgaggtgtggtgtgcttggctagagggggttatgcgaagggtcctgtcacggcctctttccggtatgtcgtggtgacatgtcggcgcacggaaacgtgtcgtggggctgtgtcttgtgggtacagttgtacacctctgatcagagtaaaactattcgaatagccgtgcccgcggttatgggcggtcaaccagaatcaccgtgattagtctcaccctagtgtaatctgttgaacttggatagtttaggtggatggttgggcctgtcgcaacgtgggttagcgttggacagcggatgtttaatactgcttaattattacaactgttttcgcattaaattcctgtttataaatgccagtatttatgcaaatgaaccactctagctcttctttgttaattccctgcatcatacccctattccggtatgacttgctgagtacagtgggtagtactcagtcttgctctacttttcccaaccccagaggacgggtatgtgtcagatgaaggtttccccgaggagtaggcttcgtccgtgccgtcgaggatgcctgtggagtggtgttcccgctgcagttcgagtcaaggcttagctccagtttcttttgttttccgctgcatttctgtaagacttttatgatgtttgtaagacgtggatctgaatgtcaacattgtcgtttgtgtaccccggctggtcctggacggggattttaatgcacattctgcttggaattctattcgggaatttctgggcgtgacaagttggtatcagagccgaccttgaccgtaggacaagccaaatggaaaaacctaagagccctctgaatcctttttcattgcatatgttctttgcaattggatttgttccgggaaaattgggatctgctcttgtggttcaagggaaaaatcttgtcgcttgtttaagtgggatttttccaaaacaagtcagtttagggttttagtaaaattattgggatttattcgtcagtcagttggggtttgatgggtgaaatgcattaggtcctagctctataacatgggttgcaaggtgtttatgcttcgtttgttattattaatatgtatctaatttcccattattttatcgttatgtgagtccgtcttatttattcgctctcatgcaaaatgatctatgcataaaatttcgcttttattcgattcccttatttgagtcctttattgctttacttaaatttggatttgagcatgcattgatcctactcctttgtcttctctagatggccggtcacccacccaaccaccgcggagaaggcatgatcgattttgtggcagagctggcacgcatgacactggtggtgggctaccccaacgcgccggagtacacgaccattccgccgctcagtggcgagcttcctcaccgtgtccgcttggaggtccatggctacgtggggacttgcctcgctaacatggcggttgaggcgtcaggaggcacagcagatcatgcctgtcaggaggcagcctacttgatgatggccaggttacgggagcgccacgactacatcttccacgacacggcgtaccgctaccacccccgtcgagcccatggtgatggcgtcagctccttccgtccgacagctggcgagaacgacaccaccttcggtcacatgtgtgctgtgatgaggggattggaccggatgcactcggacctgcacaaggcgaccaaggccttgaatgatgggaagctcatgaggatcgtcgctctgaaggacgagatagcgcgcctgaagaaggagaatgctcagttgaagggtcttccagtaccaggaggagtccggatccgcactacgccccgtaagaggacgactgcacccgtgcgcatccagcttgcgcccaggaacccacctccaccagcagctcccgcagcacctccagttccgcccgcagctccggcagttcccgcagttcctccagctccagctccagctccagctcccgcgttcactctctccttcgctccagcatcagccgccagaggtccagccagtggtaccggaggttggctgtctgctactcccagtggcagcggcgagactgatccgtcaggctccaggagtcgctcagagggaccgggtgacgagcaggaggacgctttcgactccaccgaccgcaggagccgttccgagcattaggctcgtttttcccactagtttatcgatggtctagcttctggttgttagtttgtgtgtttaggttgcttgtttggggtcagttgacggtcgatatcatgtgcctatgatatggctgtcttaataaggatgtttgcttgctcttttaagtgtttttaattcagatcagaacaattgcagttttaattcctttataataaagcttagttcttgagcatctgtttttcttcttttccccgtctgctcttccctccagatggtctacaccaggactggcaaccgcacgacaggcgagggcagcaacggtgaagaacgcgctgatggtgtgcaccccaacggtgattctggcaatggtccgccaccacttcccgagaatccgacccttgcccaagttatggcacatcagactcagatgatggcagccatgatgcagcagatgcagcagcagcaccagcagatgcaccagaggatgatgcagcacgccgaacagcagcaccagcagtttggtccccctccccctcagtccaagttgccagagtttctacgcgtcaggccacccaccttctccagcaccaccaaccccatggaggcgaacgactggctccatgcaatagagaagaagctgaatctcctgcagtgcaatgatcaggagaaggtcgctttcgccacacaccagcttcagggtcctgcgtcagcttggtgggacaaccacatggccacccgcccaccgggtactgaagtcacatgggcagagttctgccgtagcttcaggaaggcacaggtgccagatggggtcgtggcacaaaagaagagggaattccgtgcgctccatcagggcaacaggactgtgacagagtacctccatgagttcaatcgcctcgcgcgatatgcaccagaggatgtccgcaccgacgccgagaagcaggagaagttcatggcgggtctggatgatgagctgaccaaccaactgatatctggggactacgccgactttgagaggctggttgacaaggcaatccgtcaggaggaccaacgcaacaagatggacaggaaaagaaaggcggcgcagttccggtccaaccaaggtagtcagcaccgaccgcgcttcactcccggacagcagggtggacctaccaccatgatcgtccgccagcaccgcccgttcaaccctagcaacttccatcagggcaccagtggcagccagaaccaccatggaagtcagcccaaccgcggtacagctccacgcccatcagtggcaccggcacaatcaggccagcccgcacaagccaagaaggagacgggagcaaaaccagggtcctgcttcaactgtggcgagcttggccacttcgctgacaaatgcccgaagcccaggcgtgccggaccaaggtttatccaggctcgtgtcaaccacgcgtctgcggaggaggcacaagcagcaccagaggtcgtactgggtacgtttcctgttaactcaatccctgcaacagtactttttgattctggtgcaacgcattctttcatctcaaagaaatttgtcgggatgcatgggttaataagagaggaacttagcacaccgatgcgggttcataccccagggaatagctccacttcggttcaattcagcccttctataacaatagaaattcaaaggtcaccatttctagccaacctcattcttctcgaatccaaagacctagatgtcattcttgggatggattggctgaccaagtttaagggagtcatcgactgtgcgagtcgcacagtcaccttgaccaacgagaagggagaaacagtggtgtacaaatctctagtctcaccaaagaaaggggtctcgttgaatcagattgagacggaaatcccagtggataccgtagagaagaacttgagaaaattggaagatatacccatagtctgcgagtatccagaagtgttccccgaagacctcactaccatgccacccaagagggagattgaattccggattgatttggcaccaggaaccgctccaatctataagagaccgtacagaatggcggccaacgaattagcggaggtcaagaagcaagttgatgaacagctgcagaaagggtacatacgaccaagcacttcaccttggggcgctccggtcatttttgtggagaaaaaggataagacaaagaggatgtgcgtcgattatcgcgcacttaacgaggtcacaatcaagaataaatatcctttaccgcgaatcgacgatttatttgatcaactgaaaggagctaaagtgttttctaagatagacctgcgatcaggctaccaccagttgagaatccgggaagaggatattccgaagacggccttcaccactcggtacgggctatatgagtgcacggttatgtctttcggacttaccaacgcacccgcattcttcatgaatctgatgaacaaagtgttcatggaatttctggacaagtttgttgtggtattcatcgacgacatacttatctactcaaaatccgaggaagaacatgagcaacatctccgtctggtactcgaaaagttgaaggagcaccagctatacgccaagttcagcaagtgtgacttctggttgacggaagtaaaatttctgggtcatgtcattacagctcagggtgtggcagtcgacccatcgaacgtggagtcagttaccaagtggaccccaccgaagacagtgtcgcagattcgaagttttctaggactggctggttattaccgccgattcatcgaaaatttctccagaatcgcccgacccatgactcagttgcttaagaaagacgagaagtttaaatggacagctgagtgcgataagagctttgaggagctcaagaagaaattagtatccgcaccggttttgatcctgcccgaccagatgaaagacttccaagtctattgtgatgcatcccgtcacggacttggatgtgtcctaatgcaagagggcagagtggttgcatatgcctcgcggcagttgcgtccacacgagggaaattatccaactcatgacttggaattggcagcagtggttcatgctttgaagatctggaggcactatctgattggaaaccgctgcgaagtatatacggaccataagagtctgaaatacatcttcacccaaccggacctaaaccttcgacaacgaagatggttggaactaatcaaagactatgacatgagtattcactaccacccgggtaaagccaatgtggtggcagacgcattaagccgaaaaagttactgcactgccctatgcatcgagggcttgtgtgagaaattgcggcaggagtttgagcatctcaacgtgggaattgttgaacacgggttcgtagccgctctggaggcacggcctactctcgtggatcaagtcagagcagctcaagtaaatgattctgagatagcagagctgaaaaagaatatgagagtcggaaaggcccgggatttccacgaagatgagcatggcacaatctggatgggagaaagattgtgtgtacctgacgacaaggaactgaaggatctgatactcaccgaggctcatcagacccagtactccattcacccaggcagcaccaaaatgtaccaagacctcaaggaaaaattttggtgggtcagcatgaggagagaaatagctgaattcgtcgcactctgcgatgtttgccaacgagtgaaagcagagcaccaaagaccagcaggtttactccaacctctccaaatcccggaatggaaatgggaggagattggaatggactttataacaggactgccccggacatcatcgggacatgattcaatctgggtagtcgtggatcgactcactaaggttgctcactttataccagtacataccacctatacgggaaagagattggcagaattgtacctcgcaaggatcatgtgtttgcatggggtacccaagaagatagtatccgaccgaggtagtcagttcacctcaaagttttggcagaaactgcaggaagaaatggggacccgtttaaatttcagcacggcctatcacccgcaaactgatggtcagaccgagcgagtcaatcaaatcttggaggatatgttgagagcttgcgctcttgattttggtggagcttgggacaaaagcttgccatatgcggaattctcgtacaacaacagctaccaggccagtctacagatggcaccgtttgaagctttatacggccggaagtgccgcacacctctcttctgggatcagacaggcgaacgtcaactgttcggaacagaagtattagcggaagcagaagagaaagtcagaatcatcagggaaaggttgaggattgctcagtctcgacagaagagctacgcggataaccgtcgaagggagctcacttttgaggccggagactacgtgtatcttcgtgtcactccgctccggggagtacaccgttttcagacgaaaggcaagttggcaccacgcttcgtgggaccatacaaaatcttggaacgaaggggagaagttgcctatcagctagaacttccatccaatatgatcggcatccatgacgtgttccacgtgtcccaattaaagaagtgtttaagggtacctgaagaacaggctgattcggaacacattgatatccaggaggacctaacctatgtggagaagccggttcgcatacttgatgccagcgaaaggagaaccagaaacaaggttacccggttttgccgagttcagtggagtcatcattcggaagaggaagcaacctgggaaagggaagatgagttgaaagccgcccatccgcacctcttcaccagctcctccgaatctcggggccgagattccgtttaaggggggtaggtttgtcacaccccgaagttttcctcccaagccaaattgtaaattacaaatgaccccaagaaaatgcagaggaaatcaggataaaaccctaagaaaacaatgcaaacaataatcggatttgacatgtggaatttttcttgaattctacatgtcgaaatgcattaacaggatttttagtggaattttcagagctctagaaataattttaaccaattaaaattgagcaagcaatattgttaattccagggaaaaatcctttttccttttctttttcttttttcctttctttttcctcctttttgtcaaatgggccgtcggcccattttcctttttccttccctcctccttgctgggccggccgcaggccgaggcccagtccggcagcccaggccgccccgctgcctcctctctcggggtcgccgacaggtggggcccacctgtcggacccgtctccctcctcccgccgatcccggcgcgccgccgcgcccgaaaccgccgccgcgcccacgcctccgccttccccgggccacgtcggccacgtccgcgcgtgcgccgcgctctccgcgcccattcccctctctctcccgctcgcgcccgcgcccgagatggccgggattcgaaaaccgaatcccgcctctctctcctccccactcccccacgtcggccggcgaatcccgcctcttccggccacgtccggccctctctccccctatttaagcatcgccggcgccccctctcgctttttccccatttcgccgacctctctcgagctccccatcgtccccgcgccgtgcaaccacccgccgccgccgtttttgctacttcggccgccgctagccgccgctaggctcgccgccgtcttgcgccgtcgccgccgttagattcgcggggtcgagatctacctcggccgcccctcctccgttgaggttcgccgccggagacccatccccgtcgtgcgccggtgagtgacgccatggccgccgccttcggccggcgctctcgctctctcgcgctcttccctctccctctaatccctctccttttgttcgttaggaggctccggagctcgtcccgccgtcgtcatcgttccccgacgcccgccgtcgtcgatcgttgtcggtgagaccctcctcctcgttttctccctctctcccgcaccgtttagccgccgcgtcgccgcctagctgcgtagccgccgctcctcctctagccgccgctctccgccgccggtcggtcgccgtcggccgtcgccttgcgccgctgccgcatgcgcaccgccgccgcgtgagcgctgcgccgccggcgccatggtcgccggttcggcttgcgccgtgcccgcgcgccccggccgcgagctcccgccgccgtccgatctacccttgggtagatcggggccgtcggttcggccgccacgtggcgccgccgccccttccacctcccgtgccactgactagtgggcccgcgagccgccacccctttctctctctcccgggtcgctgaccggtgggtcccgcatgtcggcgccgcacccctccgtgctgacgtcagccctggaatttattgcgcaataaagtatttaaggtttttcttttatagtaataaacacagtgaatcttctaaaattcatagctaattcatccgagctccgtttaatcccattcaagtctcagtaaatcaagaaaaatgtgtagaatccattaaaaatggttttgttctctgtttcagtagtcttatagtctgtttgcaatgtttgctttgtatgtcgttagattccgatccctccgacgctccggtgtacttcgagatagtcgccgaggtccctccagcagcagagcaaggcaagtcatgcttgtcacttgatcatattgatcctatattgcaaatgtcctaatgttttctttcaaataccgcatttgttttgcaatattactatgggatggttacctattgttacagccatactattttgataccatgctcctttgttagcttggggttataacatgattagagtttggactaggaattgcttagccatgcttagttcaactagttcacaatggggaaaatcatattaatgattagactgttggttctaatggtaatgttggatcaataccaccgctccggtgttggttaattaaaatgaatcacatggtgggctgtgggtgcatggttttgctggtcgcacccatggcagttaaggaccggttcgcgggatgccctggaagaacttatcgtacttaccacaagccagcgtgggcaacggctgggcttgtagtgtagctttcctctagtcgacgcatccaggcaagggtgggcgtgatggagcggggcgggccctgcgacggcctctgtcgcttccggattcacctaggcacgagaggggactgcccgttgcccgctggggacgggggtgaaacctgaggtgtggtgtgcttggctagagggggttatgcgaagggtcctgtcacggcctctttccggtatgtcgttgtcgcgaccgagaaaattgccttttcccgaacgctagtgtattaatccccgtcccaggaaaagccggggtacaccacacaaacatgatataaaagacacatctttattatatcgataacatttacactattacaaaggcacttaaggcctgacaatcaaaaataaacagcagcggactagcgggcctacggctccatcttcacaggcgctcaactggggtataagccaggactccacctaagacatcttctccaaagcttctcttactgaagaggggaaagattgagcaagaatgagtacaaccacagtactcagcaagccacaccggcagatgcatgattaatgcaagggggtacaaggggtaataatataggggttaagttttgcagaaaagcagcatttaaaagtcacttagttgcccaaagccattttataaagacgatcctaaagctacacagtattattaaacaaggccgtgaaccctcacgaacctgccttaacccaaggcttacgatgattcagaccgaactggcaacccgaccctgggtcccagctcgtcccaagccaacccaggccaaccattccacattttagttgttgagcaaattttaagaattaaaacactgacttgggtacattgctcggcttgcccataaccgagggcgcggctattcgaatagattatactctgatcagaggtgtacatctttacccacaagacacatcttcctcacgtgcaaccacgtgccacataccaccacggtatacagacggaagacgtgacatagtttccaacccatcctagccatagacaagagtaccgacccaatcccacctacggccggaacctccgggacaggcaggcaggactgagcccctagcagcagggcaccaaccctgtgccatgacatctcgactaccgggccgcagctcgtgtagccttcatttgtcctagagaatgtccatcgacccccgacttcatccatctccatccgtgtacttttgtttatgaccagactgagccacaaactaagccttacccactagacatgtggaagtacggtagtgctttgcaacagaggcccgagcttaatccttatagtggccggggtgctacttcccacaactggcatgcacccaaaccccaccgaaaacaggttttaggggttttgaaagaggaagagaggtgtatgtccaattccaccataacccaacaattccatagtgtccaggtgatatgaaaattcccaaagtctaaagttataaaaccacctaatgttgcctaattaatcagcgaagcatctacctaaattcatactagtggaaccatgaacagagtacccactagttggggttttgtttatcctagggtgaacaaggtaataataacaatagcaataataacaaggtcataacaaaggtaaataggcatggctaaataaaacagtgataacgcgggaatttaaataaagcgataatgcattaatttaaattaaaataattttataaactgggattcaatatgctcaaggatgatgtgacttgccttgctcagagagaacggccttccgaaccttcggcgacgaccacgaaccacgctttgggaacctccggaacgacgaaagctacgcgaagcacacaagcaaagctacaagcctataaagaagcaataacaatacataaaaaacaaagcacagggttctttaggttataacaaacattaagagacttgaacgggtcgattcggagctcggatgaccaagatatgatcatccgaagtttaatgctgttatatggagatttgcggattattataattaagctttgcaactataaaacaggtgtaagcgctagcctggaaaagacaggaaggctgcgctgttgacatgcggaccccacatgtcaacaaaaaggaccacggtagaccgagtacacagagacggtccacgggtcaatggaagcggatcccgtgtgtcaaccgaggcgagtggccgacaaacggactccactagacaccacacgggttacacacgtggaaaccacgtggctaccgagcgggcacactaacacggtcaccacccgcacgcgtgaacgactaccgacaccggtacacgggtaccggggccgacaaccgcacaacgagcacgggcgacaccgaaaggacgaggacggggcagcgagggagagggatccttaccaccacgcgacgaggcgcgggaacgacaacgacgaacgggcgcggcggagacagacgggcacaacggagacgaacggcgaggggacggcttcggcggcgatccttggacgaaggcgagacgcggccggcacgaggcttgacgacgcggagccgaggacgaaggcgaggacggggctgcagcggctcgcttgacgaacgcggacgacggacgagaacggctcgacggagggacgaacgccacgacgaccgggaacgacgagaggacgacgacgacgacgaccgggaccggcgaggaggcgacgagaacagccggcagcggctgcacggggacgaggacggcgtggaacacgccgcagcgatgatgatgacggaggcggcgccgcgagacgacgagccgggcgaccgacgggacgtcgatcggcgaggacgaacggtgacgaggaagcgacgatggcagccagcagcggctgcgtggaggaggggacggcgtggaacacgccgctgcgatgttggtgaaggtggtggtgcagcggggcgacaagccgacgaggaggaatgggtggccgaaaggacgccggcgacgaagaggatggagaggccggcgcggcgacggcgttccggcgaaaccgaggagcagccggggtggagggcgacgccgcgacgtcgacgaaggagacggcgacgtcggccgacgctctgacgcggcgatcggggcgactgaaggcggtacagtggcggcaacgccactgttttgccggcgaggacgcgtctccggtgatttccccgcgaaacggaggcgaagccggggaagaggaggcagctgcgacgccgggagaggtgacggcgcagccggacggcgctcgggcgaggagggagaggcggctggaggcagccggcgcgaaggaaagagaagggcgacggcgggaacgtagctccgggggtctccgcgggaaatggagggcaagccgtgggagaggaggcggctgcgaggccgagggaggtggtggcgcggccagccaacgcacaggcaaggagacaggggcggctggaggcggccggcggcacgggagagagaggaaggtgatggggaggtggctaggggcttgggagagagcaaaatggaccaaaggaaggaggagggcttcgttttatagggcaaggacggagtgccggacacgggagaggccgaaaacggcgccggaggaggtggccggcggcatcaatggtggtcaaagaagagggattaaatcccggtgattgggggcgggattaaagggggaaagttgggggaaaggaagaggagattgagaggattccattcccgcaactaatttgaaaaaaggagcaacggggaggcgagatttggaaggaggaggcggcactgtgcacggcacggctggagagctcgggctctgcctgagctggaagaaggagcactgtagcgcgggggaggtaaaacagactttcggccgggctgagaggaagaggggagaaaccttgggccagacttggcccaaagggaggagggggattatttttagctttttctttttaataaactttgatcaaggttgttgttgcttaataaataattcccatgctctgaaaattcaagtaaaatttgagggctccttttagaccaaggagaatttaacaaaaattctccggaccacattcgaatttttcttgtacgtattttagtgtttgccaatttcttttcgaattttaattaattctattattccttttagaaaatgatttttatttcgggatgaatttatcaggacgtgacagtcgtggtgacatgtcggcgcacggaaacgtgtcgtggggctgtgtcttgtgggtacagttgtacacctctgatcagagtaaaactattcgaatagccgtgcccgcggttatgggcggtcaaccagattcaccgtgattagtctcaccctagtgtaatctgttgaacttggatagtttaggtggatggttgggcctgtcgcaacgtgggttagcgttggacagcggatgtttaatactgcttaattattacaactattttcgcattaaattcctgtttataaatgccagtatttatgcaaatgaaccactctagctcttctttgttaattccctgcatcatacccctattccggtatgacttgctgagtacagtgggtagtactcagtcttgctctacttttcccaaccccagaggacgggtatgtgtcagatgaaggtttccccgaggagtaggcttcgtccgtgccgtcgaggatgcctgtggagtggtgttcccgctgcagttcgagtcaaggcttagctccagtttcttttgttttccgctgcatttctgtaagacttttatgatgtttgtaagacgtggatctgaatgtcaacattgtcgtttgtgtaccccggctggtcctggacggggattttaatgcacattctgcttggaattctattcgggaatttctgggcgtgacagcgcgcgtgcgcgggagggctgcggctcggcttgggctggggcaggcccaagcgggaggaggagaggagggagtgggccgggaaggagaggaggagggagaagaggggcggcccgagggagagaggggaggaaaaagagagggaggagagagggactttggccgcgggccgagggagagaggggaagacttttggcccaaaggaaggagagggtttatttttagcttttctttttaataaactttcttaattgttgttgtttcttaataattatttccggtgctctgaaaattcaagtaaaatttgagggctccttttagaccaaggagaatttaacaaaaatcctccggaccacattcgaatttttcttgtatgcattttaaggtttgccaatttctttttgaattttaattaattctattattccttttagagaatgatttttatttcggtatgaatttatcaggacgtgacactagtggtcagcctgtgcagcatactgcaaatcaagttgtcccggagcacttggttcatcacgtacaaccagatggcacagtgattcctcaagttattcctgagcatttggtgcgcaatattcagccggatctacaaaattactaggggagcaatttgaattatcagtatcagccaccatcaccgcatggtcaataccaacaggcaggatcagctcaaccccagtttgttcctcaatacaaccaatttgagcccatgtcacagcagtctcaaggaacgccttagcaacgaccatgggccgatttgattgcggatgtcatgaaggagcaatttgggcttaggccgaaagatgctggaaatttataccgacagtcgtatcctgaatggtttgagagagttcctctccctaaccggttcaaagttctagatttttcaaagttcttaggacaagatagcacatcaacttatgagcatgttagccgatttttagctcagtgtggtgaagcatcggctgtggatgccttgagggttaggttgttccggttgtctttgtctggatcggctttcacttggttttcttctttatcgtatgggtcgattaacagttgggccgatttggagaagcattttcacagctatttctatagtggggtgcatgaaatgaagttgtctgatttgacagcaatcaagcaaagacatgatgagcctgtgcatgaataagtgctacaacttaagttttactaatgctcagttagccgatttggcttttcagggcatgattgctccaatcagggagaaattctcatctgaggacttcgaaagcttgtcgcatcttacacagaaggtgactttgcatgagcagaggtttgctgaagctaggaagaattctagaaaggttaatcatgtatgtccttatatgtatggatcggatgatgaagatgatgattctgaaatagctgcagccgaatgggtaaggagcaaaaaggttataccatgccaatgggtgaagagttctggaaaagaggagaggtatgactttgatatcaccaaggctgacaagatttttgacttgctactccgagagaagcagattcaacttcctgctggtcacacaattccatcggctgaagaatacggcaagaaaaggtattgcaaatggcataattctagatctcatactaccaatgattgcaaagtcttcaggcagcagatccaagcggctatcgaaggagacaaaatcaaatttgatgattctaagaggccgatgaaggttgatggtaatccttttcctgtcaatatggtgcatacagctggccgaacagcctatggaggtcgtgcaagaggttttcaagtaaattcggctaagatcattaataagtaccaaaggaagtatgctaaatagcaggagatgtgttatgaggaagatgatgacggctttgatcctcatt

SEQ ID NO: 5943 - DNA, 2489 bp, Oryza sativa
cccatgtccatccattaacacatatacggaggaggacactgagaacaaagctaagtgtctttattttcctttttatgtaatattttccattgagcaattttttatatctgctcatgctaactactcgtccagcgccggacgcctagttttatcattatttatcatattgatttttaatctcagattaatctcttgctattttttgttgttgttcgcatataattacgcggcactattgaggcgattaatgctggtcatggagtcgaggcgtctcagctttccggtcgatcgggcgcgagtccactctgtcggcttgtcttcgccaccgccattgctgataacaacaacgacttcaccgccggcctgcctccgtcgccgccgagtggtgcctccgcctacacggctggcctattatgccgccgctgttgggcgtctacgacttcaccgccggcttgcctccgtcgccgccgagtggtgcctccgcctacacggctggcctattatgccgccgctgttgggcgtctacgacttcaccgccggcctgcctccgtcgccgccgagtggtgcctccgcctacacggctggcctattatgccgccgctgttgggcgtctacgacttcaccgccggcctgcctccgtcgccgccgagtggtgcctccgcctacacggctggcctattatgccaccgctgttgggcgtctacgacttcaccgccggcctgcctccgtcgccgccgagtggtgtcctcgcctatacggtaggttggtcacaccaccgttcatgggcgtctacgacttcaccgccggcctgcctccgtcgccgccgagtggtgcctccgcctacacggctggcctattatgccaccgctgttgggcgtctacgacttcaccgccggcctgcctccgtcgccgccgactggtgtcctcgcttatacggttggttggtcacaccgccattagtgggcatcttcgctttcaccgtcgaccgccttcgtcgccgccgactggtgtcttcattgttattgatggacgactttgttcccacattggccacttctgccatcaccaaggggaatattacaaagctaagtcatcatttattttattctttatatgatatttttccttttcctctgcctcactacaccaattggtcttccattgagtagtgagtcgggggctacagatgttatatcatatttttcataatatttatcttgattgcttgcgacataatctgagtacaaaagtacctatcgagttatggagttctatcttcctatactttccgtttggtttgccaatgaatggttgcctttgggccgattcctagcacccgggggctcgttggatggaccgagtaacgcaaggtgctaagtattattcggaataaatcaaaagcatagagatgagataaatttattttctgctcttaataattgcaaaagtacccgagtagtaaactccgatccgtgaaactttgttccattaatgacgaactcatgtcactcatatgcatgtttgggaagtgcttagaccgactcccagtgcttggtggctatgactagttgggcagagcgtttaaacgtaatgagtcatctgctcggggaaatcaaaattgacaagaggagaaatacatatttataaatattttaaaatacttgattttttctcgagtattatatttatatcagatactactcatcctatatgtttgttctgcaggatccagatccagatatgcataaaagggattcatggctttaagcttatctcttacgctctaggaatggatcagtcagaacatcaccaccggccgcctcgtccaccgccgactggtgttttaccctgcacaattggcctattatgccaccgttgttgggcgtgtacgtcttcaccgtacggcttaccttccccgccgccgactggggtttcagcctgcacggctggccttttatgccgccgttgttgggcgtctacgtcttcaccgaccggcttgccttcgccgccgccgactggtgtttccgcctgcacggctggcctttatgccgccgttgttgggcgtctacgtcttcaccgaccggcttgccttcgccgccgccgactggtgtttccgcctgcacggctggcctttatgccgccgttgttgggcgtctacgtcttcaccgaccggcttgccttcgccgccgccgactggtgtttccgcctgcacggctggcctttatgccgccgttgttgggcgtctacgtcttcaccgaccggcttgccttcgccgccgccgactggtgtttccgcctgcacggctggcctttatgccgccgttgttgggcgtctacgtcttcaccgaccggcttgccttcgccgccgccgactggtgtttccgcctgcacggctggcctattatgctgccgttgttgggcgtctacgtcgtcaccgaccggcttgccttcgccgccgccgactggtgtttccgcctgcacggctggcct

SEQ ID NO: 5944 - DNA, 3205 bp, Oryza sativa
tttttgtctgtaataaattaagtggataaatcgcaataagcaaatatatgacttataattaataaaaattccaatatatatatatacttagcatatatatgaatgatattattatattggtaaaaactctaattaagatatgtatgtacatactgcatgatttaaaattaataaaaattgtaatcatcatatatacttagcgtaggaattatattaaattaaatgctaaaaactctaattaacatatgtaaatgccacatgcatgatttaaaccttttaaaaattcgaatagtcatatataagtagcatatgaaagatagtaaattaaattgtgaaaaactctaatatatgaatgatagttttaaaaatatattaaatttgatacttttaaaaattctctagtcaattataattagcatatgaatgatagtaaattaaatgttaaaaactataattaacatatgaaattgccacttgcgtgatttaaaacttttaaaaatcctctagtcaattataattagcatatgaatgctagtaaattaaatgttaaaaactctaattaacatacatatgaaattgccacctgtgtgatttaaaacttttaaaaattgtaagtatcacatataactagcatatacatgatttaaacttgttgaaacctctaataatcgtgcgtaattaacatatgccatacatcaattgatttatatggataatcaatacatccaaaatagtttacatcgtgtacactataattacggcattacatcggcggtgacggttgaccgcacgtactttctcctcactattgttccctccttgtgatcgctgcgtgagtaaggggtgtcttcatttgataggaggatgctagggtcaatcgtcaccgtgaaagggggttgcccatccaactgatcgtaatcctcgtcagtcttgtcctcaactccgacgatttttcttttgcctgggagaaccacttgacgcttaggctcatcaggccctctgcccttctttcctttgctagacatgtccttcacgaaaaagacttgcgttacatcattggcaaggacaaaaggttcgtccgagtatccaaccttgttaaggtcaacagttgtcatcccactgtcatcaatcattacgcctccaccagtcaacctaacccattggcaccggaacagaggaaccttgagaggaccatagtcaagttcccatatgtcctcgatggcaccgtaatacgtggcagttgttccatcgtgtcccatggcatcgacacgaacagcgctgttttggttcgtgctcttcatgtcttgggctctcgtgtagaatgtgtacccattgatctcatatccctggaatgtcgcgatcgacccagacggtcccctcgccaggaaggcaagttgttggttgatcgactcgttacccatgagatgttgtcgtagccacgcggggaaagtatcaatgtgatgccgtgtaatccatgcatcggacttaccgatgttcctggcgcgaactagagccaagtgctcctcgatgtaacgagctaccaatgaagagtgttgcagaacagtgaaatgggctttacggaataaattgttgtctaccgtcattattgctttccttccgagagttccctttccccgtagtctcccttcatggcgtgattcaggtaccccgattgggcgaaggtcttcgataaattctacgcaaaattcgatgacctcctctgttccataacccttggcgatgcttgcctctggacgagcacggttacgaacatacttcttcagaacgcccatgtacctctcgaaaggaaacatgttgtgtaggtacataggcccgagaatacggatctctttcacaaggtgacaaagcagatacgtcattatattgaaaaatgaaggtggaaatatcaactcaaaactgacgagacattgcaccacttcattctgaagggcttctaatctatccgaatcgatgactttctgcgaaattgcgttcatgaatgcacatagctttgttattgttgcccggacattgtctggaaggataccccttattacaactggtagcagttgtgtcatcaacacgtgacagtcatgagactttaggtttgtgaacttcttctccttcgtgcttattattcgcttgatattcgtggagtatccagacggtacctttatgctctccaagcattcaaacatactttccttctctgccttgctaagagtgtagctggctggactcaagtaatggcttcctttctcctttggttccgggtgaaggtcgccgcgttgttccatatgcttcagatcattacgtgcttccagtgtatctttcgactttccgtatacacctaggaagctaagaaggtttacgcaaaggttcttagtgaggtgcatcacgtcgattgcgtggcgtacgtccaagaattcccaatatggtaactcccaaaatatagagttctttttccacatcgccgcgtgaccatcttcgctctctatatgctggcttccaggcccctttccgaacactactttaagatctttaaccatagcaaacactgttttcccgttgcgatgtttaggcttcgtacggtggtcggccttatgttcgaagtgcttgcctttcttctgtaccgggtggtttgctgcaaggaatcgacgatgacccatgtatacaaccttcctacattgcttaagatacgtactttctgtttcatccatacagtgagtgcaagccttgtaccccttgttggactgtccggataggttgctaagtgcaggccaatcgttgatggttacgaacagcagcgctcgtaggttaaactcctcctgtttgtcctcgtcccacacggggacaccttccttcttccacaactgtttaagatcttcgaccagtggtcttaggtacacgtcgatgtcgttaccaggttgcttggggccttgaataataatcgacatcattatgtacttcctcttcatgcatagccagggggggaggttgtagatacacatcgtaacgggccaagtgctatggccgctgctcatctctccaaaaggattcatgccatccgtactcaaaccaaaccgtatgtttcgtgcgtcctctccaaattctttaaattttctgtcaatgtttccccactgcgaaccatcggcggggtgtctcagcatcccgtcctgttgatgctcttcagcgtgccatcgca

SEQ ID NO: 5945 - DNA, 5555 bp, Oryza sativa
catggtagagttacctgacaagtctagaatctccatcttttccatacctgagaatatgaatgtgaatggatccttttcatctttggttgccgtatagtcttgatcaatcatcttgattacacgaagcttctgtatcttgttatgctgccgtttccaaatatgtctcaagttgtgcggtttcactccctcaacattgagctccctgacattgttcatttcctcaatcatctgtggggagaaaacccactgtgtgtactgtaggtctagcacccacaaaccatgaaaacagttccaagactgaacctcctctccagcatcaatgttcagatcaaggcagttatcaagcccaaggaatctcaatccgcggcaacagaggaaaggaggtgaagcaaatctaaaagtacagaggctaagttttagcactctaaggttctctgcatgttgaaacatgtcattataattttgtaaaagatgtgcaaggttgagctttgacttaaaaaaatattctactagttccaccgtgtcttttgattctgtgtcaatttggtgtgctgccaagaaaaatgatgacactgtttgagccactgctgaggcagccaggaacccataattacttgaaatcaggtgatttgttgaaatccagttgtcagtgttccgcatcatgtggtaaagtccagggtcgtcccattcttgccacatctcttgttgtagagcatcagcaatctcccattcctgaatgatcccatcacacacccaatagtttgaagcatgaactgcccagtcatagtcaatgatgtctctgccaacaaaattaagtttcgatatatacaaccaacatttggcaattgttgttgggtgcagcttggctactccggaacatgtgttggaagcaatttctgccgcctcctcacacaatatatcccaccaatggctttgatcctggaactccatcccatatattttgttatggaattcggcagcaagaaaaacatctgccacttgcaccttgtcctgaattctggtactcagccgaaacctgcccctgaaggtccacaatattttgtttcccttatacggttgatatagaggcagaccaaaattagttacatcttttatttcattatcactcccattatgaaaaaccacaagaaatcttctactcattaggacatcattaacagctattccaacatcattgatcacgtctctggagctttcatcttttccattgatatcatcagcctcatcctgctcatcaataagatcttttgcttgggtcatctctagtttctctgcaattttcctctgcatttcccttctgcttttccacctcgagcaatcaatgtggattatcttttcaaacttcaattctgggtctgcgatctggaccgttgtaagccgtttggcaacagctctgaggacagcagatgcacccaatccttcccaaccatcaaagtagaccacatttgatacatctgatttctttagtttgtcaattatactatcaacagcctcagcaacattctctgcggtaattacctgcagtggttaacagtaattaactgaggttagctcagctcagctgggttgcgtacaaagtaacacgactgtctagaagaagaaaaatcaaatgaacactatattcagagaaaaaaaaatgaaactatatatttagagggggggaaatccttatttgctatactccactttgagctgtcaccaaactaggtatgctgatgtaggcgaggctggtgatgtggagacttgttgccgcagccaccgtcccccacctcgtccatggctggcgccgcctccccatcctaagcatcatcgcccagatctagtttggtgtcaagcgcatgcgaatggctgctacttggggccatcagcaactggatggcaactgtggcgggctggcggcaaggtcaggaagccgatggaggcgggagaggaagagttgatcagcaaatgggagacgaggatgggcggccaacggccatactgcccatcagccatggggatgggagaaatagcaagaaagaaaatgaagagggaggaaggcgatggttcatggaaatttaagtatttgctactattctatttatcaattatccaaatgccaattttaattttgtgctggtaaatttaacgccccgcgctttgttacgggatatatattagatagcgtagaaataataaaatgatttggattgaaatatcgtgaaaaagatgatttggcatgtgcatatttattttgggagtacctatagaacatttgacatttttctaggagaaaaacttaaatgtaattacaatctaactagtatgtaactagaggtttactctgatctaacaaaaagtatcttgaggtatcagtacctcactgtatcaaatcgtttccgatcgttggatccaacaatgcccatcctgtccagtgagatccaacgatcggaaacgatttgataccgtgagataccagtacctcgaggtactttttgtttgaatagcgcaaatctcacgtaactaagatgtacttactccgtttcacaatgtaagtcattgtagcattctccacatttatattgatgttaatgaatctagatagatatatatgtctagattcattaacatcaatatgaatgtgggaaatgctagaatgacttacattgtgaaaaggatagagtaatttatatgtaagaaagttttgatcgaaggcgggacctcgagcccacgagtcgcccacgcgccagcggctcgggggcaaaccctagccgccgccgccacccaccctcctcccttctctctgcctcgccgccaccggagttcaccgccgaacaaccatgcggggagccaggatggcgggcggggccataccgcggcgacgcgtcgtcactggcacgagggaggcggggcgaagcgcggagcgcggtgagccgagcggagggcggcgcgctcgatggcgagggaggccggggatccggcaccgcggtggctagatccggtgctcccgcggccggatctagctgcacggcgcagggcgacggctctatcatgggcacggaaagctacggctgaaggccgccagcggcggcggcagcggcacgagggccgcgtgccggcgaggggaggactgtcgcccgcttggcagcatgctcgtgcctctctccggccggcctggtggtgtgcgcggggaggagctgtggggtggtggactgggctagctggtggctgagaagatgatgtggtggttcagcgacggttgttgtgtgaggtggtggtggcaatggatggaaatcgctggcgaaagccttgcttagcacttggctggcatgacgacggcgacgccctttggcgccgtttcctttcttggaggcgtagttatggcatttttcttcatcgctatcaatctccaggtgaaaactatgttccggtttccggacggacggtggcggcgtttcatgtcgtatccttcattggggcatcgtcttggagaaccttacccttgcttcgattactgttagcgaactcctgtgtcagctcgaagcactagatgcctaggttttggcgaggccttctccttcctggctccattcttgtattggtggcatccagcttcttcatttgtctctgtcaggtggagtcgaagctgtaacgtcgttggggtgcgacgttgcttggcaacgataacatttgcagtttctctctagggatgttggtgttgccagtgcaggttttggcgcctcaggggctttggctgatgtctaaagtatgagcttgctgttgttttgctcgttttggcggtgcctccaatgatgttatgatcgccgtggagtcggagctctgggtcgctgggcggcaaaggttggcaacgatgacacgtgccttgtgatgtcaaagttgtatgccgcttcttcagcttttcgacatcgatgttcgcctttggattctgccgtcgtagtttggttagagttgtgtggtgctcagtgtgttgtgttgtttgtaccggtcgtggttgaggggcttggcgagtctacttgccgagaggttattttttctttttctgtaacccgtctagttttttacttctgcttaattgaaatataatttgcagttccctgccggtttagtttaaaaaaaaattatatgtaacttgatcatttcctttttcaaaaaacacagcatcccaagtggctagtgccgttgacttgcaagcagcaagtcttgagttcgattaccaacttgcgcgtggaaaatttgtaagttttgaggaaataaatcttaaaataaattgtacatatatttagtatatgcttaaatgttgagttttgtgtgctttacggtagagccaaagctcaaacgatgagaaccttagccacgtactcctttcgttttttaatatatgatgtcgttaacttttagatatttatcttatccaaaaactttgtgccaacattttaaaaatataagtcatgcttgaataaccttaatcataaaacatcataaaaaataaataatgattataaagacgaatagtcaaacatattaaaaaaagttatttgtattatatattaaaaaatgaaggtaatactacttaaaaacttatcagtgttggacaaaaatagcaacacacatagaagagagaacagcaggacgtgctgcgtcaggtggcatcgcgtccaggtgagccccgtcatacatgaatcgataaatcatcttgtgcataaatcatattgaaaacaatatttttgccaataaatacctctcggagcataatgaattgccctcaagaccagcaaatcagggcaagtggaacccagatctcaccaatcagcatcacaccctacaaaaagacatgcattcagtgttggtttcttcgaaaaatttagatcggttctccaaacagaaaaaaagattgaaattttactagttagagagaagggacagaagaatcacttctcatttggagctgggagagaaagggagagagaccaattaagaaatgatagtgaaattgaggcaataagcaaagtgcgtgtctgaggatatcaggcagaagatagatggagcttagcaccagtgatcgatgcaactggtatgaatatattgtccctagtttgagtttcgctccttttaacaaagcttctaatgcgtatcacttttgaacaaagcaaaaggcaaagctctagcatcacttgtctgggtagtttataccttacttcctccgtttcacaatataagtcattctagcatttcccacatttatattgatgttaataaatctagacatatatctatctaggttcattaatatcaatatgaatatggaaaatgctagaatgacttacattgtgaaacggagggtgtacttatgagcaacaggaacaaattgtgtattgccatatacggaacactaacacacctttaagaaagcgaattacgtgatgtactccctccgtttcaaaatgtttgacactgttgactttttagcacatgtttgaccattcgtcttattcaaaaaaatttatgaaatatataaaattataggtgtacatgaa

SEQ ID NO: 5946 - DNA, 13465 bp, Oryza sativa
actcatcatgttgtcctttgatagaattctgttcgtagaaagtatatgcacgttccttatatttgataccctggaatactctgtttggtttgggctttcttccaaaagccggggtaatatatgatcttttatcgaaaaaaaatgatggagatcacttggcttttttggatgtttatcacttggctcaagcacttccccaaaactatgtcaaaatagtggtgtctgatcacatgttagttgaagtaaactacaatccgttgctagagccaaaaattggggtcaatcgtgatgatgaggaaaagggttaaataatggctgtcaccatggtttttaagaaccagcagatatgtatacacactcaatctgcgcagttttgatagggtaatggggtgaggatagctatattctcagcctctctcagagcatctccaataatgctccaaagttgaagatgatagctaggaatttccgatatttcaaaatagcagatgccgttgtttcctttaccacatgtttgaataaagaaataaaaaaagctcaagaagtatggatatctttcccacgaaaggatatatatatatggaccaaaccatcaagcagtacatatgcaggcacacatatttggggacattcataggcgtattaatggtcttgacacttcagcgtgtgaagatagggccgtggggtggaactggaggccatgcttgggatgaaggaggccatggtgccagtgctggcagttacaccggagtacgccgaatgagtatagggtcttcctggtgtgtcagctcgatgttgtttgaatacgacgacaatggcaaacgtgtgaaaggtaccctgcatggagagagagacaatggaatacccgaggtatgtagcaagcaatacttgatagatttgtgatcttaggatttaggaagtgattttccaagtgaaaacaatttctccactccttataggatctactctatcttattagaaacttatatttattactgccatgtctacccaaaatctaaatattttttgttgaaaattgattaggcgccaccaacatctgacgtcatcctattcgtcgccctctctgggtggcttttagttaaccggtacctataaattataggtacaagtttttctaaaaaaaaccgacacatatagtatttgtgttgattttcctctacaaccagcatatatagttacccaaaggtgacgtttctgtaacttttttcatcctgtggaggtagggaaaggttcatatgtgccggttttaaatgaacggacacctatgagggttttgcagtaatgatgcgctaagggttcagtactgtagctgtagagaaagaaactattaacttaattaccttcagtggaaaggtgggtaaattttacaattaatataccatttaaagaaatgcccacgcaaatgaatggttggattttactcacaccagtgccccttgtcacttgtaccgtgtatcgtaaaacaactcctggtaacgacgatgggcacagatcatgaccaatttattaaagcccaaggcctctgcttcttgcttctgacaatctcataaaggttttcatgagcggtgaaccggtgactagttcatttaatcatgatctaatagaactcatcaactagttgtattatagaatcagtagggactcttctttaatcgtggagttgtattaatttttccactgttttagttatgtaaaaacacagacaaatactcagtcgtcgattgaacggtttaatttgggagaaaattaaaacaaacagcttgcagagagatgctttgtactaattaatcactgactgacaaataacctgatgcatggacgcacacaggaggagctcgacttccatggggaggtgttgacgcacatgtgcggctaccatgacaaccacctcatccggtggttgcagttcaggagcaaccggaacaggacgttcggaccatacggcaatcttctagaagaccaggctggatggacgcggttcgaggtctccatggagcactcggggtccatcgtcggcttctgcggccggagtgacgacttcgtggacgccatcggcgtctacgtcgccgtctggaatcccgagaggttctatgatagcatgcgcaggcagggcgtccgcgtttaccgggcgtcgcctctgcgcatggacctgcgtcaaatagaagaagagaaaaagaaggaagaagtggaacgtgggcgcctacagaaggagctcgaggaggggcgagaaagtcttcggaacatacgattgaagcttgatatgccgccggatcagagaaaacgcctgatacgacgcgacctgcgagtggagcatcaagaaatcgaacgtcagttacaagagatgcagcaactggaacgcgagcgtcagcaactggagcaacaagaaatcgaacgtcagttaccctcgcgtcagcaactggagcaacaagaaatcaaacgtcagttacaagacatggaacgcgagcgtcagctacaccggtggagaaactttgtaaccggtggagaaactttgtaaccccctttagtcccggtttccaaaccgggactaccaatccgggactaaagatcgctatctttagtcccgggtgaaataaccgggactaaagatcgatctttagtcccggttggtgttaccaaccgggactaaagatcgagctgacccatttttttttttacatggccctgttgctgcatggtttatatatatatatatatatatatatatatatatatataaaccatgcatatatatgtttcaatacatatatatgcatacatatatatatgcatatatatatattatattatattatatgtatatacatgcataatatatatgtatttatacatatatatgttatgcaaatgcatatatatatagatatatatatgaccaaaatatatttacattatagaaaatgtgtacacatgcatatagaaacatatgtagtcatgtattaattacaatccattatatgtcctagctagctacgatttcgacgtagtagtactcgctgctagctcagaagctaaggaccggtgaattgtgtttccgtcgtagtagaattcacccttgggatcaaggatttcttcgttgatgaatcccatgagttgttcttgaaccgccgcgataaattccttgtgtgtggtcaggttatccctcatacgaataaactatatgaatgtatgaaattgattagtaattaaacaagaaatcgctacgtaatgaaattttgaatttatttatacgtacattgagctctcttgtggtgatgatttggtttgcaaggcagtggcaatactcgcacacgtaatagccgcacaagttagttccctgcttttgctttgcgcactacaaataaatgacaaacaacgagagatctaattaatatacacttgtatgtatttgaatcggagaaatataaatgtagagcatgtgtactcacaggaaatttgaacttccgcctaagtctttctctccatttgccgcggaccaaatgacggaaccgataccaagccctacatggagtttaaagctatgattcgtagtagcaattaacataacaagattttcttaattaacaaaggaacttatgacggtacctgtctataagttcgaaaaccttgtcaaacgtagacttttttttatccattgagtcatatacgttgacggtgcaggcctccaggtcgaagagtaaaagcacccagtggaatctgcaatgtgcgtgggatgcattacatatgaaacacttagcaagttcgtacgggaatgaaatttggtatgtaggaagacagtaaaattaaactaactctgtgttgtatggcaacagtatgaacgtcttgtaatgctgcgccttcaggagatggacgagattgtcctctgtttcttgtggatattggtcgagcattgcgacgtttactttccgagggtcgatgaatccagtatcgaaaaccctccgctgtcgggccctttgaatctccattctacaacgataaaagggagtatattattttctatagtctacttatatacaaggacctaattaattaaaggagacgtatagtaaaaaatctaactgaacgatatacttacaaaatccagcaactcataatagagacgtcgagggcgtccagctggtatagttcgtagattcccctgaaattgatccagagaatgtcatctccttgcaagaagtccgtgtccctgatcctcgctccgatcatctctctaccggtggcgctcatctccatgtacagctgatggaacttgtacatttgtgtgggtagggactgcagcagctcaggcttgacaagcggtttaccgagttcgtacatgtatttcacttccgccttttcgattggtgcgactcctagcaattgatccgtagttagaccggtgtcagtaataaattgttctatcgtcatttctttaccggtcaccaacggctcgatctcctggtttggttgctctccaagctgagggactggtttggactttccagaagatgctttcttcagcgttcgctcatagtccgatagcttgatggcctccttgacagatgcagacatacccctgaagaagttcctgacactggggtctataggaatcttcttttctggacttcgaggcttgaattgtctcttgacttctgatgcaacgtaagcgtcaagctcctcttgcgtgcaatcgtaccccgggtccttgttcttggcggcgtcaactttcgccttcttcgttgcccttgtgtgggcaggcggtggagctgggggggcccttgactttgaaggtgccggaagaggagcttgcgggggagtaggtgtaggagcacgaggaggagtcggtgcaggatcctgaggaggagtcgatgctggagcctgaggtggagacggtgctggcggagcatgaggaggagacggtgcaggatcctgaggaggagatggcggagccggaggagatggtgcacgagacgccgcttgtcgcctagggaggatgatgtaccgcctgcgccatagaataatggcatggcatgtgtctcgtagatgcgtctcaccgtctcctccagggtaatccagctcgaggtcctcgtacgcgccttcgaccacctcaacttcgaccttcgagtatcctgctggaatcggcctgcagtggtaagtacctgaagggtccgttgggatggccatgcccgacgccaccttcatgttgtgagagattatttattagtaatcaacatatataagcagcaactagcggaatggctaaatcttacctttattgataagttcttgaaaggaatatgcagctcacatggtgtccgctgagtgatgtcatcaacgggacaggtcgattcgtcctgtgtttgcatggcgtccatgctctgtgatcctacctgccccgttgaggcgcagctgctacggtttcctgacgagctcaccattgcaggaggaatggtcggctggggatcatgggaccgatgtgcggccatgcgttcatcaaccttccttgccacctcctcttgcatgttgagttcgtagctcgatacccggaactctaggtctgcaatcttcgcctcggtatctctcttgctcctcatccgactcctgtacgtgtggatgtcctccttgaaaccaatcttccaaggaatcacccctttccctcgtgttcgtcctggatgctctggagtctgcagggcgagtgtcagctcgtccctatctctgtctggtcggaacgtgccctgagaggaggcttccactgcatctgttagtcgtcgcgcagcctctcgtatctgatcgccgaagaccagtgagccatcagctgggttgagcgttccaccgtgagcatagtaccagaacttcgatcgttccggccaattggctgttgccggttcgatacccctctcaatcaagctagcctccatctgctcccacttcggcatcgcgacgctatagcctcctgaccccaagtggtgatggtacttcttcttggcggcattttctttgtttctttccatcatcgcctgcccttgttcacctgtcttatatgcaacgaactcgtcccagtgatcccttagctttgggaatgtgtcgaagttcggtgtctgccccttcagtatatacttctggtacagatctcccttgaagctctgaaaccgtgctgccattttcttcagagtccaccttttcactttgtcctctgtacccgcaggaagggtgaatgtctcgagcattgtggtccacagcatctctttctccgaatctgggacaaagctctcatgatctccgcgtgcccttgttcttcgccagtacaccctactgacaggcacgttatcccgcacaacccaaccgctgtgacgtacatagttcttggcggcttcggccggggcactaggacgtccatcttcttccacttccgttatgatgtgccgaccctcaagcttcttcgctgcacctcgttgcccgcgtgccctcttctgtccaacggagggttgactaccactagcctcctcctcctggttcccctccacatccctttccacgtgcccctgctggttcccctccgcatccctctccacgttcccttcctcgttcaagtactagtttggatcctcgttcccctcttcttcattccagtactggctgcttccctccgcgattgtatcgtacaatatctgttcctcatcgcggtcagccatctgttgatacaagaaacatctgctaagtcacgagacatttatgttttaacaatctaagtcatgtatgctaagtgtaaatgtcgtacattagaaccctacacaaccttacgtgctaagtctaattacaaatcgtgatataagctaagtctaggtgacgtatattatacaaccctagctagtaaataattatatactaagtctaattacaaataaaataatcttatattaaaactcaaataatattacatgctaagactaaaatagtcatgtatatgctaagtgtttcgtgcgtatatgctaagtctaattaagactacaatagtcaattgctacttgtcgcaccaattccgtagtcaataattacatactaagtctaattacaaataaagtaatcttatattaaaactcaaataatattagaacactacacaatcttatatgataagtctaattacaggtctaataatcttaattaattgcattacaaatataacaatcatttatattattacgtcacttgcctgctccaattccttctaggactagctcttccactcaggcttgacggacgactccgacaacacgtcttttctgcaagatacaaaaagatgtattaggataaatgcgaagtaacatatatatatatatatatatatatatatatatatatatatatatatatatatatatatatatatatatatatatatatatatttcacgtcacgttccgtcctcgttcgttcgctcgttcacgttccctagctcgttcacgttcgttcgctcgttctcattcacgttcgttcgcttgttctcattcacgttcgttccctcgttctcgcttgtcttcgttcgatcgttctcgttctcgctctcgttcgttcgatcgttctcattctcgttcacgttctcgcggcaacgtacgttgacgtgttcgttctcgctctcgttcgttcgatcgttctcgttctcgttcgttaacggtggtgtggcagcatcggggcggcggttggggcggcggcgtggcgacggcggcggcagcgtggcgtgccggcggcggcgtggcgtggcatggcggcggcggcgtggcgtggcggcggcggcattgcgcgcgcggcggcgaaaggcggcggcggcgtggcgacggcggcggcggcgtggcgttggcatgcggcggcggcgaaggcggcggcgtggcgcgtcgtcgtcgtggcgcgtcgtcgtcgtggcgcggcgtctcgtggcgggcggcgcgacggagagagatcgagatcggagagatcgatcgagatgcatgaaggggagatctggcggcggcggctctcaccccagagatgcggcggcagcggaggaggcggaggcggaggcggcggcgaggacgacaagctcgagacgatggcgagatacggcggggtcggcgcggggatttgccctaggcagtggcggcgaaggagagaggccgagagagatcgatcggccgaaaacgtctaagtgttggtgaagaagacgagggcgcaccgggaatatatatacccccggatctttactcccggttgttgagaacaaccgggactaaatctttactcccggttgttgagaacaaccgggagtaaagaaaagatatctttagtcccggttgttctgaacaaccgggagtaaatatcttttcccgctatttcgaaattctttttaaacccggttggggttaacaaccgggactaaagattatagcactgcatatgattttcgcttacatatgtgtttataaaatagaagttaatgcattaacattatttcaagtacaaagattaatgacaattacttcgaaaaattatttttgtctgtaataaattaagtggataaatcgtaataagcaaatataattaataaaaattccaataatcatatatacttagcatatatatgaatgatattattatattggtaaaaactctaattaagatatgtatgtacatactgcatgatttaaaattaataaaaattgtaatcatcatatgtacttagcgtaggaattatattaaatgctaaaaactctaattaacatatgtaaatgccacatgcatgatttaaaccttttaaaaattcgaatagtcatatataagtagcatatgaaagatagtaaattaaattgtgaaaaactctaatatatgaatgatagttttaaaaatatattaaatttaatacttttaaaaattctccagtcaattataattagcatatgaatgatagtaaattaaatgttaaaaactctaattaacatatgaaattgccacttgcgtgatttaaaacttttaaaaatcctctagtcaattataattagcatatgaatgctagtaaattaaatgttcaaaactgtaatgaacatacatatgaaattgccacctgtgtgatttaaaacttttaaaaattgtaagtatcacatataactagcatatacatgatttaaacttgttgaaacctctaataatcgtgcgtaattaacatatgccatacatcaattgatttatatggataatcaatacatccaaaatagtttacatcgtgtacacaataattacggcattacatcggcggtgacggttgaccgcacgtactttctcctcactattgttccctccttgtgatcgctgcgtgagtaaggggtgtcttcatttgataggaggatgctagggtcaatcgtcaccgtgaaagggggttgcccatccaactgatcgtaatcctcgtcagtcttgtcctcaactccgacgatttttcttttgcctgggagaaccacttgacgcttaggctcatcaggccctctgcccttctttcctttgctagacatgtccttcacgaaaaagacttgcgttacatcattggcaaggacaaaaggttcgtccgagtatccaaccttgttaaggtcaacagttgtcatcccactgtcatcaatcattacgtctccaccagtcaacctaacccattggcaccggaacagaggaaccttgagaggaccatagtcaagttcccatatgtcctcgatggcaccgtaatacgtggcagttgttccatcgtgtcccatggcatcgacacgaacagcgctgttttggttcgtgctcttcatgtcttgcgctctcgtgtagaatgtgtacccattgatctcatatccctggaatgtcgtgatcgacccagacggtcccctcgccaggaaggcaagttgttggttgatcgactcgttacccatgagatgttgtcgtagccacgcggggaaagtatcaatgtgatgccgtgtaatccatgcatcggacttaccgatgttcctggcgcgaactagagccaagtgctcctcgatgtaaggagctaccaatgaagagtgttgcagaacagtgaaattggctttacggaataaattgttgtctaccgtcattattgctttccttccgagagttccctttccccgtagtctcccttcatggcgtgattcaggtaccccgattgggcgaaggtcttcgataaattctacgcaaaattcgatgacctcctctgttccataacccttggcgatgcttgcctctggacgagcacggttacgaacatacctcttcagaacgcccatgtacctctcgaaaggaaacatgttgtgtaggtacataggcccgagaatacggatctctttcacaagatgacaaagcagatgcgtcattatattgaaaaatgaaggtggaaatatcaactcaaaactgacgagacattgcaccacttcattctgaagggcttctaatctatccagatcgatgactttctgcgaaattgcgttcatgaatgcacatagctttgttattgttgctcggacattgtctggaaggataccccttattacaactggtagtagttgtgtcatcaacacgtgacagtcatgagactttaggtttgtgaacttcttctccttcgtgcttattattcgcttgatattcgtggagtatccagacggtacctttatgctctccaagcattcaaacatactttccttctctgccttgctaagagtgtagctagctggactcaagtaatggcttcctttctcctttggttccgggtgaaggtcgccgtgttgttccatatgcttcagatcattacgtgcttccagtgtatctttcgactttccgtatacacctaggaagccaagaaggtttacgcaaaggttcttagtgaggtgcatcacgtcgattgcgtggcgtacgtccaagaattcccaatatggtaactcccaaaatatagagttctttttccacatcgccgcatgaccatcttcgctctctataggctggcttccaggcccctttccgaatactactttaagatctttaacaatagcaaacactgttttcccgttgcgatgtttaggcttcgtacggtggtcggccttatgttcgaagtgcttgcctttcttccgtaccgggtggtttgctgcaaggaatcgacgatgacccatgtatataaccttcctacagtgcttaagatacgtactttctgtttcatccatacagtgaatgcaagccttgtaccccttgttggactgtccggataggttgctaagtgcaggccaatcgttgatggttacgaacagcagcgctcgtaggttaaactcctcctgtttgtcctcgtcccacacggggacaccttccttcttccacaactgtttaagatcttctaccagtggtcttaggtacacgtcgatgtcgttaccaggttgcttggggccttgaataataatcggcatcattatgtacttcctcttcatgcatagccagggggggaggttgttgatacacatcgtaacgggccaagtgctatggccgttgctcatctctccaaaaggattcatgccatccgtactcaaaccaaaccgtatgtttcgtgcgtcctttccaaattctttaaattttctgtcgatgtttcgccactgcgaaacatcggcggggtgtctcagcatcccgtcctgttgacgctcttcagcgtgccatcgcaacattctagcattccccttgttcctgaacaaacgccttagccgtggtattatagggaaataccacatcaccttagcaggaattctcttctttgttagctgcccgtcaacttctcctggatcgtcccgtctaatcttgtatcatagtgctttgcaaacagggcatgcttctaggttctcatactcctcaccgcgatataggatacaatcgttcggacatgcgtgaatcttatgaacttccagtcctaacgggcagactatcttcttagcctcgtacgttgtctcgggcaatttgtttccccccggaagaatgttcttgacgagtttcaataaatcgccaaatgccttgtcactaaccccattttttgccttccattgcaacaactccagagtggtatccaactttttgtgcccctgctcgcaacctgggtacaacgaagttctgtggtcctccaacatcttgtccaagttatgggcctccttttcactttcgcagtcctccctggcgtcctgcaacatttgaccaagatcattcgcaacgtcgttaccattagcagctatttcctcctcgcccgtttgatttccttcaaatccaacatactgagcaaagtccggaatattgtcgtcttccacttcatcttcttccatttcaacacattgctctccgtgggatgtccaacaattatagcttggcatgaaccccgactcaaacaagtggaaatgaatagtcctggatgcagaatactccttctgattcttacacttattgcatggacaacaaataaaacccctttgcctgttagcttcggccactctcaaaaaatagtgcacgccgtcaataaactctttggaccgccggtcagtgtacatccattgccgatccatctacatgagtcaaaaaaaccgtacacaaataattattcttacaataatgacagtcatacaataattataagatatctttattcatacaaaaatcataaaatattacaccaaataattcttaaaaactatttgtaaagttttaaactaattttaatgtgttttacttcttttaattttcattttagtttgttttctattatttaagattaactttcactagagttttccttctcaactattttataaaaccttgtttagcaaatgaactaaatttctatatattctttcttccccacacacattttctctctcatcaacttacaactaaattttggagacaaaaaaagtgtgcaaaacataggtgcaaatgtagtatgacaaaaaaaacattggaggatgaagttgcaaaccttttaggcacctccgatttgtatgtaatcaccaaaataaattcaatagaaattttggcatgacctcccctcttttttgaagaaattttgcagcttgctcgggcagctggaggaggaagaagacatatatataggggtgggactttagtcctggttggtagcaccaaccggggctaaagatcaccgggatctttagccccggttggtgctaccaaccaggactaaagtcccacccctatatatatgtcttcttcctcctccagctgcccgagcaagctgcaaaatttcttcaaaaaagaggggaggtcatgccaaaatttctattgaatttattttggtgattacatacaaatcggaggtgcctaaaaggtttgcaacttcatcctccaatgttttttttgtcatactacatttgcacctatgttttgcacacttttt

SEQ ID NO: 5947 - DNA, 20812 bp, Oryza sativa
tccttagacattgtttctcactaggaaatcctctctaccctttgcccatatttatcttgtgtccttagatgaactggaggaagatataatcacacatgttcccttggattcgatgcccttggaatactccgtaggggaagtgctacatcggtatatccgtgcgcttgcgaattctatctgtgattgtaagaaataccaacattgttcctgttaaataaatcatgcttgtttatggtttacataatgcctgatatttaatttgctccttatatcctgataatactacaagattcatgcagttttttgagtacgcactcgattttatctactatatatcttgtcttctacaaaatatttttcaggaacaatcaagcactcgagtaggttgtggtcgagtacacccttttatcgagaacgttctcggtaaaggctgagttgtcgctctcaacctaccaacggagaccgacgacctatctcatgtatagcgcgcgtcggccatggctggactatttgaaaattggtggttaacggataattcctcgcgaacgttgtcggcttgatcacccggcatgattgtgaacagatatccgaatatgctataagttgggtatgtgagtcatgctggccacatgagatgcacatgtaataaccaactctagcgcccctataggtgattgagagatgcttgctcctggttaatgactagactgttgtagcgacgtctcgctgccgatcagtttaaattcacttgtggaccgttgaactccatccagcgttgtcgaggactctatgtctctacggtcttacaccgggatcgaccaagtgagtacgacaaatattgataaggggagtcgtggataacaagtgtggatattgtgggtaccccatacccatacggcatggttatccgactagtcataggggataacttatatctatggaatatgtaatagatcatgactcgggtattacgtttccttgtatattacggaacggcctaaagtcctggtttgataatattgtaaagtagatttaggaaaccgataccgtattggttaaggtttctatcttgtaatcctgccccccatcctatataaggtgggcaggaggccctctagggggcagatgacataacctgatcatcagatcaatacacacccggcggattcaaatccccaaacaggagtagggtattacctctcattgagagggcctgaacctgtctaaatcctttgtctccgcatccatccacttttaggtctcgtgcgctacccccttttattattgccgaattcatgtttcgacagttggcgcgccaggtaggggttgcgtcgagtttcctatcaacgagtgcgatggaatcaacttcatgagtcgccgacttcgttttcgctttgggagttttcgcttcctcgtcgccgacaacttcaacaagttctctctgactcagattcaaatcagtcgggaaggctcaagacggctttgttctcatctggtcatcgccatgttcgtcgacaccatcctgtggtcagattaatcttaaaaaagaaatatcagtcgagatgttgcatgaacacgcccgaaggtttgcgtcgttgcatgccctgccatctgagatcaatctctgggagttcgacgatttagttttcgacatcaccggttcaagatcatccattaaatacatgccctgccatcggaggaacctgatcactatcaagccaagtcccacgcgaccgtcgcgacgattatttccaaaatcttctccgacttgggatctgatcaaccatgactaattaaagcaactcagccatcagcaccgactcgtgacaggatttgcatgtccgactgccactacacattgccattatattgatgcaagcagtcggcatctgttggatcttgcccagatggctggcggactcacgcacgcatagcacgcagcatgcaagcacaagccatactgcacatacagatggtttccaattcggtataatccagcatgttccacatacagtgcatgtctgtcacaagctgccgatatgatcccatgtccatccattaacacatatacggaggaggacactgagaacaaagctaagtgtctttattttcctttttatgtaatattttccattgagcaattttttatatctgctcatgctaactactcgtccagcgccggacgcctagttttatcattatttatcatattgatttttaatctcagattaatctcttgctattttttgttgttgttcgcatataattacgcggcactattgaggcgattaatgctggtcatggagtcgaggcgtctcagctttccggtcgatcggccgcgagtccactctgccggcttgtcttcgccaccgccattgctgataacaacaacgacttcaccgccggcctgcctccgtcgccgccgagtggtgcctccgcctacacggctggcctattatgccgccgctgttgggcgtctacgacttcaccgccggcttgcctccgtcgccgccgagtggtgcctccgcctacacggctggcctattatgccgccgctgttgggcgtctacgacttcaccgccggcctgcctccgtcgccgccgagtggtgcctccgcctacacggctggcctaatatgccgccgctgttgggcgtctacgacttcaccgccggcctgcctccgtcgccgccgagtggtgcctccgcctacacggctggcctaatatgccgccgctgttgggcgtctacgacttcaccgccggcctgcctccgtcgccgccgagtggtgcctccgcctacacggctggcctaatatgccgccgctgttgggcgtctacgacttcaccgccggcctgcctccgtcgccgccgagtggtgcctccgcctacacggctggcctattatgccgccgctgttgggcgtctacgacttcaccgccggcctgcctccgtcgccgccgagtggtgtcctcgcctatacggttggttggtcacaccaccgttcatgggcgtctacgacttcaccgccggcctgcctccgtcgccgccgagtggtgcctccgcctacacggctggcctattatgccaccgctgttgggcgtctacgacttcaccgccggcctgcctccgtcgccgccgactggtgtcctcgcctatacggttggttggtcacaccaccgttcatgggcgtctacgacttcaccgccggcctgcctccgtcgccgccgactggtgtcctcgcctatacggttggttggtcacaccaccgttcatgggcgtctacgacttcaccgccggcctgcctccgtcgccgccgactggtgtttctgcctacacggctggcctattatgccaccgctgttgggcgtctacgacttcaccgccggcctgcctccgtcgccgccgactggtgtcctcgcctatacggttggttggtcacaccaccgttcatgggcgtctacgacttcaccgccggcctgccttcgccgccgccgactggtgtttccgcctgcacggctggcctattatgccgtcgctgttgggcgtctacgacttcaccgccggcctgcctccgtcgccgccgagtggtgcctccgcctacacggctgacctattatgccgccgttgttggatgtctacgtcctcaccgttggctcaccttcgttgccgtcgactggtgtttccgcttacacggctgacctattatgccgccattagtgggcatcttcgctttcaccgtcgaccgccttcgtcgccgccgactggtgtcttcattgttattgatggacgactttgttcccacattggccacttctgccatcaccaaggggaatattacaaagctaagtcatcatttattttattctttatatgatatttttccttttcctctgcctcactacaccaattggtcttccattgagtagtgagtcgggggctacagatgttatatcatatttttcataatatttatcttgattgcttgcgacataatctgagtacaaaagtacctatcgagttatggagttctatcttcctatactttccgtttggtttgccaatgaatggttgcctttgggccgattcctagcacccgggggctcgttggatggaccgagtaacgcaaggtgctaagtattattcggaataaatcaaaagcatagagatgagataaatttattttctgctcttaataattgcaaaagtacccgagtagtaaactccgatccgtgaaactttgttccattaatgacgaactcatgtcactcatatgcatgtttgggaagtgcttaggccgactcccagtgcttggtggctatgactagttgggcagagcgtttaaacgtaatgagtcatctgctcggggaaatcaaaattgacaagaggagaaatacatatttataaatattttaaaatacttgattttttctcgagtattatatttatatcagatactactcatcctatatgtttgttctgcaggatccagatccagatatgcataaaagggattcatggctttaagcttatctcttacgctctaggaatggatcagtcagaacatcaccaccggccggctcgtccgccgccgactggtgttttcgcctgcacggttggcctattatgccggccgttgttgggcgtctacgtcttcaccgaccggcttgccttcgccgccgccgactggtgtttccgcctgcacggctggtcttttatgccgccgttgttgggcgtctacgtcgtcaccgaccggcttgccttcgccgccgccgactggtgtttccgcctgcacggctggcctattatgctgccgttgttgggcgtctacgtcttcaccggccggccgccgcatccgccactgactgatgtcaccgctagcacggctggcctgttataacgccaactgatgctatcttcttcacggctggctacatcgctgtcactactaataggcatcagtatcttcaacacaagctgcctacgtttgccatggctgccgactggtttcttcacttccatggctgcatgattctgccagtgttgattggcctattatgccgctgttgttgggcatctacatcttcattgccggtcgtctcgtctgctgctgactagtgcccttacctctacgtctggtttatacagctaccactactgatggacatcatcatcttccgtcgccgactgattatgctgccgtcgattggtgcttttatcttcacaactacgcgtcttcactaccggtttgcttctgttgccgccgacttgtgttcacttcattatggcaatacaactttgtcatcatggtggagcgacttcatctttattatcttcggcaccggcaaactctattgctgctacttcgcaagttttactacttcaccaaccacgacgtctttgtgaacctcgacatctcggcatgcaatgccatgatattttactacaacaagtgactctccaatattcaggatttctacttggacaccttcaacacatatcttcaatcaagcaatgactactcgacgacaagaagctataattctcgactctatgttcagttgtttctcaactaaccaaagagtcgggggctacacaaatataaggctcaaaatttgacaaattttatgtcaagctgaagaaatcaattaatcagccaatgagtcaactccaggagtctttatcttcatctttgcttcggagcagatgttctacttcagcaacttggagattatggatatcccatatctactcagcgctgccataatctactccaaaattctcaagtatcaagttcaagatttaatctacatgttcgggagtttggagttatcaaccaatcagctcggtttagacgagttggacaacaacatctactttcctccaagtgaagcatctacaacagctgtaacactaagttctacagtcatcttcgtaaatcaagaagcattgcatcagttttctttatgcacacgctcacatcaaggaaacttctcaagcttcgatatcttctcaatggtttgatggattgttgtcactgacatcatcaccagcacgtttacttcatcggccctgacgtctccgccgttgctaaggggtgactacgtcctcgccgtcggttacttttgtcatcaccgactttcatcgccgacttgttatttcgtcttcacggttggcctactatgcaactgccgatagaggatctcatcgttatcatggactgctacattactattgactggatcaacgacatggttatcttcatcaacatcctgtcaagtctcttcaacatagcctactctgctgccgttgatgggcaacttcgtcatcatagccggctatctctgttgccgctaatcatcattaccgtcggatgcgtttgccatcgccgactattttcttcatcttcataattggtggatttcgccatcaccgttgatgcgcgtctacgtcttcatcgttggtttgcttttgtcaccaccgactgttctttcgttgttgttgggcgcctacatcttcactgctagctgacctgactgttgccgactggtttcttcacctccatagttatgcaacttcattacatttgattggcggcatctttactaccactgacatcttccgttacttctgatgagcaatttcgtcttcatgttggtcatttcatctccatgccgaatgcgtcagttattgccaatagacaattttgactatgacagaaggacaagctatatgctcaggggctcatcaactcaagcgtgaggattatatctccaatttggacttgttccggatacattccacatggattcatagtcatgagtctattttctatgctcaaagactggaccaattattattccccgtaagggctatcaaccgaatacttgcgccagtcgggattcaattattatatttattttggagtatcccataagggataatcattcagatcagaagctattcatatgagctacacttggtctatattacccggaagatttattactcgggagcatgttacacgcgtcatcctttaaagggtgtcgaaggcatattttttggcctaggcctaatatgtctgcagcccatattttcaggtgtggcctgtcacgttcttttagggacttaggcactttttgcttaggccaaagtgcgcgtgatcaagtgcccaataccttaaaatccttttataccgcagttactcaactttttaggagttggtacaatgcatcttaaaaggtgtcaaacagtaaagctttatatagctggcccgctgacttttttatatagtcatggtgctgtttgggtttttaagcaattgattggatacaatatcattgctttttgccacgtaagtgtgcatttttattgaccaatattatggcttaggctgattatatattgtggtcatttttcaggcggttggtaaatcctttatgagtttatttactcggattttataccacatatgccatatatttccaggtgtggtgaaaccatgtgtcttctagggacttaagtacatctgttaaagcagtgtgcgcatggcgtatgcccaatactttggaaatttctttattcacaatatgcaagcttctttatagctattttgctatatcactcatcatattttacaaagcggttggtatatcactcggatcatgttatttggaggattcacaccgcatatgctatatattgatatcaagtcacttggttgattacgattatcaaaaccactcggttggttggattatttattccttgactatatgcttggtttgttcaattaaccacattgtcgggggctacacctattaggtgtatctagtcggtgcacctgactttattttccagccctccacagtcttcagatttggtaaaagtactcgggagaccatgacaaagatgattgaagcactcggctttggagtaatctggttcgagagaagattatcttttcgactgcgaaggtctcaggggctactgtggatattgtgggtaccccatacccatacggcatggttatccgactagtcataggggataacttatatctatggaatatgtaatagatcatgactcgggtattacgtttccttgtatattacggaacggcctaaagtcctggtttgataatattgtaaagtagatttaggaaaccgataccgtattggttaaggtttctatcttgtaatcctgccccccatcctatataaggtgggcaggaggccctctagggggcagatgacataacctgatcatcagatcaatacacacccggcggattcaaatccccaaacaggagtagggtattacctctcattgagagggcctgaacctgtctaaatcctttgtctccgcatccatccacttttaggtctcgtgcgctacccccttttattattgccgaattcatgtttcgacaacaagagatgcctttgtggatacggtttgtttccatatgcttatcagttgccccaaggtgatcgagcgatgcctactccaggttttcaaccagatggtcgtagtgatcttttgacacctaacgcgacagtcaacatggtcatgataacaacaaccgagactgacaggattgccgtagtcacccggacgacaacgtctaggactaacaagattagggcgacaacggacaaggttaacgacatcatgacatcacatggcgacgacgaaactccagatcccaagacttccagagggcccgaggttgaggccgtaggtccgggagttgaacctctgactacgataatccctcatcgacttcgtcatcgtcaggaggcagttcttgcaggtcacgagaacgccgtccatctgtttgtcacgcccggaaattcactggtaatttctggacttatttgtgcataaaatcctcgtccaagaatcagccgaggtacacaaactgacaatttaatatacaaatccatcataataataacgttatatacttacaaaagaatagaaaacagcagcggaaaaacagtctagcgatggctccagctccactcccacaggcagctcaactggggtataagccaaacgtcttctccttctggatcctttttcttcaactgaggtttgattgattattgcaaggtgagtacatggaatactccgcaagccacatagcaaatatgcaagtgcacaaggataccaaaaggatggtatattatagggctcatttgcaaaagcagcatttagcaaacattcaggagtagtaaaacagtagagtaattaatcattaatattaatcaacactaaacaggcttgtacccactcaatttatgacaggataaagttgaattgttagttggcattctgggatgtaagattggttctctaccttctttgggattacttttgggcaccatatggcctagagtggtggactttgctctgttagtagacagcatagaaagaaggctgacagcatgctccatatttctgcctcatggaggaagattaacattgatcaatccagtcctttcattaatcccaacctactaatgtccttattgcagctaccagttctagtcatcaaggccattgacacagctcgaaagaactgtctgtggagggggaataacccttcttctacaaggaaatctctaacctcctgggacagggtgtgcacccctaaagagaaaggaggtttaggagtgatcaatctgagagttcaaaacacagcgctcctcctaaagcacatggtcaaattctataatggtgctgatttaccctgagtaaagctgatctcacaaacatattatgattctaaagttccacacttgatcgtgaataaggattcattttggtggagggatatcacatctcttgcagacatcttcaagggaatagccaaatgtgaaatcaggacaggaacaactgcccttttctggaatgatctatggaatgatgattttaaatgcactagctaccccaatctttttgctgtgaccatgtataaaactgattcagtgaaagccatgtgttcaagacctttagaagattcttttaccctacccctctcagatgtggcctattttgaatttttgcagctacatcaatctgaacatacagtcaggaatgggggatgcttggaattttatctggggttcagacaagtacacagctaagaaattttataagcttaacttttctgcgttacaaccctccagacccatgatttggttgtggaaaacaaaatgtgtcatgaagataaaagtttttgcttggctcctgttctgtgacagactcaacacaagagatatgctggatagaagacattgtgccaaagaaaatgatgacctcacatgtgttttgtgcaatgcggattgcagagaaacaaggttacatcttttcttctcctgtccgttcagtatcagttgttggcagcacctgggaattgagtggaatcataatttggagtttttccaaatgatcgccctagcaagaatcaagtttgctcagacgggcttcctggagattttctttttggtagcttggcacatatggaagcaaatgaatggtttaatctttcaaaacgttcaaccctccttccaagcctagagatcactttttgtcaaagaagttcttctgcatatatgcagaatgaaggatcccttaaagcaatttgtttttaattgggtacaaaccatatagtctttcttgcggtttcctcttgtaactctgtaaccttgtaaatatttttcaatctttataaaattacaatgttgggcaaagccttggcagtaattccggtaaaaaaaaacactgaacagcacacccatgctgcacaggcccaaccatcctgaataaccatacccggctgtacagatctaactccaaaccaggagctaagtaaattattattagttatagcatcaataattatcgtgagaggtcttagactaatcatgaaaaacattgctcaacccgtccatgaccgcgggtacggctattcgaatagttttactctggccagaggtttacaaatttacccacaagacacaactccacaatatgtcaccatatcatcatgtgcccatgctgaacatgtcaccatttgtatagttgtgacaagacccctcacatagctcaactcaaagcagtgcacctttcctggatcataatcaccccctcaaaaaaccagacgcatggactccacagcgacccccacggacttctcgccgcttcacagtctggcgcaccaaaatgagccttgctatacaaagtgtctagccgttgcccattctgacttgtcgttagtatggttaatgtctcacaacagtagctcgtgaactggtccttaattgttatgagcacgaccatcaaaaccatgtgctcacaacccaccattaatcaagttttagttcacaattagttaataaccaatcacgattgaccatcgtgagctaccattaaatatccataagtcatagtgaaacatgatttatctcattaatgagctattgtttctaagcatggctaagcatctattataagcatatagctgaaccaaaccaatatataaggtttaagctaatcaaattataacccatacgaaaataaagtcatcttcggccataattaattgggaaaggctcaccacccgatgacattcgaaaataatgtaggagttcaaataaaacaatagctttaaacgggttcaacatgatcaaagggttatttgggatctgtgtgacttgccttgcaataatcggtctccagttagtcttctggaacacttccgatgcactcacgaaccttcgacacaacggaaacgacaagctaacacacaaaatgaggaaaaagactaagaaactccaaataaacagtacataaaaagtaaaaaaacatgtagatcattattttagatgaattatgagacttgaacggcctcattccgactttatatgaattagttatgaattttacaaaattaattccaattaaagcctattaaagaaaaaactattccaaattgattaaacaatttacaaacgatttataactgagattaaagattaaaacaacctccagaaattattggaacgaatttagtaaacgacatatagtaaaaagaactaatatgccatcgaaaagggataacaggatttatattgatttttggatggctgagaataaacttgaccgagttgaccaagatcggatggctcggattgatctggcaagcgaacctcaacgagtcaattctacgtgacacgggatcacccaaatgatcaaccgaaaccagcgaacggaaccggcagctctgaacggctctaaactaaaggacgactcaacgtggatgaacgaacgaaacacgagaaacacctcgttcgaacgaacgagctaacggctcaactatggctgcggctaaaccggtgagctagacacgattcacgataaagccctggtactacaaacgataggtcggtaggaatttagggatgcacctacggctttgcaactcagctaccgggctacgggcaatgaacaaaccacaacatcgacgactcgggatagcggtggtgttgcatggtctggggcagcggctagggagcgacggtgacacggtttagcagcggcacgattgcggcaacgactcggcaaggcgcggcagcggcaatgacccaacaacgacttagcaagacggctaccgagcggtagcaatggctcggctgagccggcaatgcggcagcggctacggtgcattggcgaggcggctaagcggcaagcaacatcacgtggctagggttagggcgacggcacagccggtagcgacggtgcacgggctagggcagcaacgcgccgagcaacaacacgataggcatggctgtggcaaagcggtaaacagtggcagcggtagcgatgcacgacagcggtggctgctacaagcggctcggcaaagcgacggcaacgccgcacgacgtgcaggcgcagcagtggcgacatggcagcgatgacgcagcaaaggcgatgccgcagcagcggcaacagcaagcgacacggccgacgtggcaaggcggcagccggcacggactctggcagcggcgcagggcttggacagcagcggcgacactaggcggcggcgtgcagcagctgtggcacagcgagcagcgaggcggcggcatctagtggcacagcgacacgacaagagatgcgcatggcagcggcacaacagcgactacacgaagacatgaacgcagctacacaaagattaaacctagggaacggaaaggaggcctcaccggggaagatcgaagaggaagacggcgacgattcggtggcaacacacgatgatgatgacgacgctaggaccaaacaagattagattagaatagattttttttttgcggggaagattagaatagattaagtccctagggataaactacaccggtaaacgacatgggagagaggagagctcactggagaagatgacggcgatgaccaagacgacaacggcgaggggtgacgacaagcagcagcggcggctagggtgcaggaggcggctaaacaggaggaggaggaggctaggggcggctgcaacaaaaacaggaaacaggaggggagaggacggcttatataggggaggattgaataagattaggtggggctgagggaggcacggcagagggggagatggattcctacttggaacgcaaggaaccatgccgggaaaacctagggtttggcggagagataaactcgaaaatgaatccaaattcgcgccggattcaaagggataaagtcagattttgggggccataggtagaggaggataagaggaatatttcccctcaaccaattttcgaaatgagccacactatcggccggatttgatggaggaggcggcgatgcacaggctcgggacggctggctcaggctctgtctggcgctggaagatgaacagtagcgtgggcaggagaggtagactttttgctgggctgaaaagaaaagaaggaagtgataagaaatagacttccccgaagaagaaggagacctggctttgtctggagctggaagatgaacagtagagcggggacgaatagtagactttctgcttggccgaaaagaaaagaagaaagggaaaagaaatagacttccctgaagaagaaggagacaggaaggaagcagagataggcaaagaggaaggacgggctgaggacaacagatagacttttccagtttcagcacgaaaaggaaaagggaatttaatttacttttccaattaaattaatcactaaaataatgcttgaattgttaaaaatacttccaattctcgaataatttcaagaaaaattcagaaagtacttgaacactataagtatttaaaaaattatgaacagaccatttaatgattaatttaatatttaaataattgctgaattgctctttgtattattaaaattagtaattgagctctgaaaaatccgagaaaattccagagagtataattaaccacagagaatttaataaaaattaaattcagcaaagctttatatttaggaaattttatttcccaaatttaacttcacttgtaaattaatgaataattaatataaattctaataacaatttataaatcctaaaacgaaaatcaggatgtgacactgttactctggattctcttcaaatggccaagttatgactataactggacttcgactaacggtgtagcgattctcccactacttatgcaatttgttaagtacaaccatacacctggtcttcgcctagtgtgcttgttgtgtcatcatctacgtcaatttctgtaagtgtttatatgtacaatatttgtccgttgatcctcttttcttacatcgcctcgtcttgaagtcagtcctattgttcctttacgctgttctgacagagcctccgagaaacctaaggggatttcggctagggacgcccagagttgataaggctttgttagatgctgcagagccaaacgaccatgtcagagtgctcactggatgtgtattaactaagccgtgtaatcgagaattggttttcccaacttcacggctgggggctaggatttgccatcctcagcttggttcgttataagatttaagttgcctttgtggaaaatggtttttccaaaaaagcagctgggggctaggagtactgtcgcaccctgaagttcccctccttgctttaaaatccttaaaatgaatcctccgaagaaatgatttaatttaacctagagttgaatctttaattaataaatgcatttaataaacggaatcgacatgtggaatttttcttggattctacatgtcaaaatatgctaacaggatttttagtggaattttcagagccttggaaataattttaacccattagaataatcaaagtgcaatatttaatccctgggaattcctttttttttctttttctttttctctcttgttgggccgtcggcccatcacctcccgcgcccccttccttaccgggccggcccgttttccctcctcctcccgaaggccaggccgactccccctctctccctcgggcgctgacaggtggggccacctgtcagccccttccccaacctccagccgctccccaagccggcgaccgccgcgccgcccactttctccgccttccccgcgcccccactcccgcacaccccgcctttaccgcacccacgcccccactcccgctcgcgcccacgttgcaagatggccgggattcgaattcgaatcccgcctctctctctctctcccctcccccaacttcccccgcaaacttcggcgaaatcgagccactcccgaccgttcccgacctctccgcccctatataatccatctccacctcctcctcctcatttttccttttttcgccggcctctcccgagctctccaccgctctcgcaccgtgcaccaatccgccgctggctcttccattgctccggtcgcctctagccgccgctagggtcgccgccgcaccgcaccgtcgccgccgtcgggttcgcgtggccgaaccccacctagcccacacctcctccgtcgaattccgccatcggaggccgccgtccgccgtgcgccagtgagcctttccttagccgccgccgtcggccacggttcccgctcgccgtggactccctctccccctctaacccctctctttttctctcttagggagtctcggaacccgtcggccgctcgccgtcgttccccggccatcgccgtcgccgttcgccgtcatcttcctccacgccggccaactcatggtgaggcgcctctcctcctcttttcccctccctctccctcctagcgccgagccaggccgagccgccgcttcggccgtgcgccgccgccttcgcgtagccgccttcgcgccgccgcctcccgccgccggttgccgtcaccggcgacgcgtgcgccgccgcccttgccatggcgggccggccggcttgatgccgagcccggccgatgcctcgccactccccttgggccggtgccgagtggggcccgcctgtcagtgcccctcttttcccccttgtgtcaccgactaatggggcccgcatgtcggcgccgcccccctccttgatgacgtcagccctgggatatattgcgcaattaaggtttttctttttatagtaaaaacacagtgaatcttctaaaattcatagaaaattcatccgagctccgtttaagcccattcaagtctcagtaaatcaagaaaaatgtgtagaatccattaaaaatggttttgttctctatttcagtagtcttatagcatgtttgtattattttctttgtatgtcgcttagatttcggctctcccgacgctccggtgtaccttgaaatagtcgccgaggttcctccagcagcagtgtaaggcaagtcatgcttgtcacttgaacatgttgatcctatattgcaaatgctctaccattttcccttaaatactgcatcgttttaaaatgttactatgggatgtttacctactgttacaaccatgctcctttattatcttgggatataacatgactagagattggactagggattgcttagccttgcttagttcaactagcacacaatgggggactacattaatgcatagatattagattctagtaatgatgttggttaatgccaccgctccggtgtcggttaattaaaatatattaaatggtgggctgtgggtgcatggttttgatggtcatgcccatggcaattaaggactggttcgcgggatgccttggaagaacttattgtacttaccacaagcgagcgtgggcaacggcttggcccgtagtgtaactttcctctagctgacgcatccaggcaagggtgggcgtgatggagtttggatgggccctgcgacggcctatccggcttccggattcacctaggcacgagaggggactgcccgctaccttgcgaggagtgggggtgaaacctgaggtgtggtgtgcttggttagagggggttatgcgaaaggtcctgtcacggcctctttccggtatgtcgtggtgccatgtcgacgcacggaaacgtgtcgtggggctgtgtcttgtgggtacagttgtacacctctgatcagagtaaaactattcgaatagccgtgcccgcggttatgggcggtcaaccaaattcaccgtgattagctcaccttagtgtagtctgatggaactgattagttcaggtggttggttgggcctgttgcaacgtggtgtagcgttgaacggtggatggttaatattgattaattattacaactgttttactgctttcaactactgtttataaatgctcgctttatgccaaagaacctctctagctaccctttggtaatatcctgcatcatacctctgttctggtatgacttgctgagtacagtgggtagtactcagtcttgctctatttttccccaaccccagagtttgggtatgcgtcagatggcggtttctccgaggagtaggcttcgtccgtgccgtcgaggatgcctgtggagtgttgtttccgctgccgttcaagtcaaggcttagctccagctatcttttgtttttccgctgcatttatgtaagacttttataatgtttgtaagacgtggatctgcatgtcaactttgtcgtttgtgtaccccggccgatcctggacagggattttaatgcacattctgcttgggattctatttaggaattcctgggcgtgacaagtaccgaactccgtttgctgaggacaagtctggcgagaatactcttttattgccacacgcagattcaatttattctcaaattttccatacatattataccatgatacccttgatcgttcgctcgggggctatttctgtttaatattttgttctattgatttcaggaaaattccattcaacgttgtcgaggactctaggtctctatgatcttacatcaggatcgactaaagcgagttcagcaaatgttttgagtattgatttcaggaaagtcggacattagaacagtcaagtcaaatttcagggctttgtcgcacactttacgactactcgattactcaaggacggttgatggagctcgacaaggaatatggaaagaagcgatggtgtacccgctgagataaaatttcttgacttcaatccaaattctcgattacgataagacaggagacttagtcgcatgctccataccttttcagttgacatcgtgattaacctagacaaaaccagtatggcgctgttgatggctgttaagtaccaaattaacgccgtcaatacctgcataaaaccataaaagtaaaacattcaatgtagtggtagggtttatttctaaccatttccacgagtgttggtgtatatttggatgcaggtgacgaaccaccaaagttgagacaaaaaatacatagaggaggatgtgaattaaacatccatattccagcctatggagctttggacccaaaaacctaatgaaacacattcaaatgggccaattgcaagtacatttgggctaaggggttatccaccaaagcctatgagaaaattcggagcaaaatgggctagaaagggtttggccgaaccaagtggttcggccgaacccctagctgcgccgttcggccccaaacttcacaggccggcagttaccgacttgccacgacagtttctaccgactttacttgaataaccgtcatctgctggacacatggcactaggaggataaagatgctcattggatgcttggaggatctccactctctcaagtcacctccacactataaatacccttctcctctccctcattcacacacaccaaagcacgagctgaattacaagaggctctagtgtactttattgtatattagaatagggagagagaaaggtagaaggaatcggaggaatcccggagttgtctgttatctcctcttacttttgtatcttgttaattactctgctttaatagaaacattattctgagcaattaaggtttgcttagtgagaattacttcttggttagttaattgcgtagacgcggtgtctgggtaattaatctccagtggttgctgcatatcctacagtacgtttgaggtgggtatagaggtggtgacagccctcaagagcacttaagtcctccctgtccgggtacatagtagagcgacatctgggaacagcgggttgccagtgcctaaagtattgcgttaggattaatgttaagctttccctagacactgtttctcattaggaaatcctctctgccctctgcccacattagctttgtgtccttggatgaaccagaggaagagataatcacacacgttcccttggattcgatacccttggaatactccgtaggggaagtgctacatcggtatatccgtgcttgaggattttatctgtgacgttaagaaataccaacatgcgcctgcggaggccgataagagggatctagcgctatctctgatcacaccgagaatggtcaagagagcacgacaacagttgttccaaggttttcggtcgagaacatcaactcgctcatggttatggataccacatacctaatagtagttgactaaactcggcagagcccaccacatatcatgtcttatacaaaatcatacctcgtatatagaaggagtttcggataaggaagtacgaatagagttctacatagaaactataaggactactcggattgtagccatattggtctccctagtcctatatggacaaggggacatctatgggtttaaataaaccccctaggaggagggggagaggacaatcaatacacaagacatatacaagccaacacacgccaagacatgccgccggatatcgatatcagagatatgcctagacagactcaatctggtgcctgcagaggccaacgagagggatctagctctatctctgatcttgccgagtgcggattcgagtaggaaaactaccccgttgtcgactacgtgatggttttctaggccgccaagttgacaacggctagataggttatcctaaatattgcactagtgtgattatgatgaataagagcaacaccggcttcggccaacaggagtagggctattacctgacaaataaggggcccgaacctgtataaaaatccttgtctccatttcttttacttcaatctcgcatataacctggtaccaacgatccccatactatgcaaaataccgtagtcgtgataccaaacatcaacaataccgctatagcacttcacctttgggtgaccacaaaaggatagtgaactcagggaacgtatgtaatctacctaaggctaagactgttcaaggacaacaactatcggtaggatagctaggctagaaagg

SEQ ID NO: 5948 - DNA, 16877 bp, Oryza sativa
atttcaactattaaatttgagtcatatcttagtataattcaataaacagagaaacaacgagactatagtgaaaacatacaaatcatcaaccttcaccaagaccactttaggaaatcagaaatacaatactacacataaacagaggatgaagatccattagtgccaaggtgggccttgatttcagtttataagatgtattctcaatctcagaccaaaacatacataataaaaaatcgccaaaacactctcacaaagttatatcatatacattaacgaccattgtactgaacaatttcaggattgttaataacaagaagaagcaaggttatacttatcaccaggaagtagaacacttgcgatttgccattagaaaaagaagttgacaacatagaaaatatctgtgaattttaatctagctatgagaattcctacaaggcagtttgaacaccacatgagtagctatccatgttaaccaaaaatggacaggtagaagaacacctcaatacctccaagtgtgctagtttattcctcatagtgcataaggacctcccggctgactgaaaatctaacttaggcctcaagtgtgctcatgtacaacaggcaaagtccatattaatgccttctatcctaccaatatgcatggaagctatatgtatataacaaattatgcaccaacactacaaacaattcatctatcaaatgtgatacgagaaaaccgatgccaattatatctgcaaaaaaagaaagtgagtagggcaaaatcatgtgcacaagacatacttttaaagtcgtgacgttcattggggtccatgttttagtttgcaaattccaatagctctgcatccatgaaactgctgcaaataagagcatggtcgcttaatttttcaactttgccagaaaatgaaaaaaaatcatggtaaatgactactaagcaaagaattgtgatctctaatgcattacacgagaataatatttgacaataacactattgattgtagggagtactaactttttgaattcactcctagcaataatatttgacatcaggagtattaacttattactcccaatatcaaatactgttgattggaggaagtagtctttttaccaagctctctaccaaatagctttagccttagtggcactaaaataggagaatcattcattgataaaaacactaaaaaacggttgcagtttaggttaactacaacaaccatttacctgctcctcacaagcaattcagagtgttccactcacaacattttagagatagcaacaatagcattagagatggtactgctttaagtggataatcatttagagatgatactgcttttagatataggaacaatagaattgagcatatagtgaaattttcggagtgcaataagaatctaaagaagcaaattgctaatgttaagtggtcaacattgagacattcaaggtaatttatcagatggatggcatgtactgctgcaacaatgatcacacaacgagcaaacaaaacctgtcaaaaaaattcgtgtcaactaaatttcatatgcagatccaaatttgaaacctttttgtagtaaaaaagttggttttaacaaccccctccctccctccctccctcccattttagttatgttgcattgttgcatattacatgatatgacctttaaatttccttgagggctttgacacttgtaggtcggtttttttctagggatgaaaatggccacggaaattccctgccgactgagtgtcgtttcatatcattggtacctttttgaccgttgtcctttttagctacatataaacaatagtttaattgataaatatggcctgttaccaactgaccgagggccatttccgtagagacagtaccgattccggctgttttgatcccttgttttttctacccggttttgacaccctattgttggtgtaataatctttgtaaccactctcctaaaatattaatgaaatttagttggccttgtccttcatctaacccagctaatattaattttttttctacattgtggatgatagctctgtccatgtcccatggaggaaagccgaccacctgaagcaggtgcagttgagctcctatttctcagtcaccacaggtgggagatgtttagtgaacttgtgattttctttatgtcggcagaagcagaaacagacaactaaatgatcatccatggcggttttaacgtctccatcaagagattctagtgggctagcagatgtctactggtaatatggtacaagcatttatgccaaaaaaaggatgataatataagcatatggaatatgtgataagataatgcctgaaacatgttctgtgatacctgcacaagattggccctgtgatcaaccatattagacctcgactctaaaactttgatcagcagaatccgaacaaaccgatatctctgatgccttgtcaaggccattcgacttgtatggagcgacatgatttgaggctttgagtggaggggtagatcaattcattatgtattcattagtacctgcaaatttatggtattagcactcagctatagctacaattggaaaagtccattatagtaactttctatatttacatgtggagtgtattagcacatcagaaaggtttatgaaatgcttaactgtatccaaaacctcagcttgagtaaacttctaaaataccctttcaaaaaaccagaaagcctctctaactgctattgctgatcctacagttttttgtttttcttcagttccttgggatgccatctatcctttcatgatctcattccaaacatgtgaatccatgcacccctgcctaaatttttcatcagtgagtaatgaaaacaacgctaaatataacaaataggacattccaagatagatgagttatagcctaattaggtttcaaaaacattcttaaaataagtaggcaaaagttctcgcatgccaacagatatttttgcccaactaccactgaaatgatccgactttttttttagaacttgaaatgacagacttggtagcatatgtccatctgatctcctctataaactaaacaatacatggcgggagaagagtagaaaaggaaggctaactaatctaaatatgtggttttcctttactgcttgagaacagtcattagtatctctcacattatggaggaattaaaaaaatgtgttgaggcctaacagtgaatgatcctagataataatcagacaactccacaaaaggagagacgttatgtgttttattagtactatattgcaaaattcgtaacccgttcaaaaatatttaacataacccaatgagagaatggacaattagaaaaactaagaacaggatgtggctaacaacatgacatcggttggtaaaaaggtcaagctttttaataggagtgggacggaaggaatggattatatttggctgcgaaatcaatcatgttgatacactgaaaatctagaatagattagaggaagaagatgctgacagggaggagctgcaagaaaaaattaccatgaaactgatccttgccgatctggctatccctacgcaggctgaacatgtcatcgacattaaccgcctcgcagtcggcgtggactcgcggcagccgcaactgtcatcgtccattggtcacagggacagcacggcccctccatggcgcccgcagtcccctacggcggtccaagcctgcagtacaggctggtcgccctcgccggcggaggaggctggatgaccctgctgatgatggccagtcaaagcatgtggccccagtggaggttgagccgcagcaggaccgtcctacccccgatgagaaaagcaaacgtgcttaggaataaaattaacagaaggacaaaaaagctttacctgcagctccttgaaggtgatgttcatgtttagccggttttgcagtaagctcactatttcaccagcacgtcgttggggcggttgggctgagacaaaacacaaaaaacatgcacagttcatgtcaagaaagttgcatatttggagcatattctgcgagaaagtaaaaatgggatcacggaggacatggtcggggtccttccaagaagttcctgatggccataatcttgctctccagcccaagctgctcggtgtcaagctcgtcggctagctcctgtgtgccaccggcttccacgtcactctgcaactctactcctctagagaaagccggagccgcctggcgacgtacggtcctcctcttctcgacgcaaccactgccttccttggcgccggctccgtcaccaccgccgtttcttcgatggcagccgcaacggagggtggagcaccgaccgtcggcgacggcggcgaagcacgcagcaggggcggcgggctcgtcagcaacggggcgaggcggtggcggaagtggcggcgctcggcgacgacgacggtggtgacggaggcggagatgctgcccggcgcacgggggatgtcagatccccgtcccccgaccacatgggggccagatccggacgctggtggccagagacggcggtcggcagggacggagggaggcgaaggtggaagtggcggcgcgaggcgacgacgctagtggaggcggagatgggtgcgctcgccgacggcgacgatgcgatggggaggctgaggcgctgggagacgacggggcgacagcggcggcgacgacgcaatggggaggctgaggcgctgggagacgacgaagcgacggcggcggcgatgaggtggacgcggcggcgcgaggggaaggcagaggcgtaggcggaggcggaggcggaggtggtcgcgcgggacggaggcggcggcgcgagggggaggcggaggcggaggcaggagagcgagaggatggggacgagtgggaggaggcgagacggaaggcggcggctagggtttgggggtgggtgggctagtggggatcattatgcaaaaaatcccctcgactttaagattgtacagcgcggtcccgattcgcgttttttctctcccacgcacggaatatccggctactacaagggccttcacgtaaaacatcggctcataggaactgtttgctaaggacccatattgaattatatataaatcggagggatttttcgcaaaatttccaccgcgcgcctcaatcccagccgcccacgcctgatcggacggcgggaggaaaaaggggcgacgtggcccgcaccaacatcgccccagcccgcgccccttaataatatgcgattcgccactttccatatataaaccatatagcaaaatcattcatgaggtctatccactgggcattataatttttgtttttcatatttgtatcaatgaactgcacaaacaaatttatattccctccagtataacaataattgtccttttttaatcattttccatggtattattggtcatactttgacaataactttataacaaataagtttgagacgattgtaacaaacttcatacttgttaattatcattccagggtttttgtttggcaaaatttggtaccacacattgaaaatttgtggtttttgcatgtagacatcacaaaaatatagaacggtctgagtacatcctaaaaatatggtaatctgctgaaggacggtctgtcaattattttattatttttagcctatacaagaagagaaatgtttcgaaaagacaagattaccctgccacccgtgaagaccacccggtctggtctgtttcaaccattcgatcgattcccatctcctaacctctctctgggcctcacaccccaagtccccgatcctaggcagtggtaagggcttcaacaattgcgagctgatggtagctcttatctaagagctaactcttcacatacattaaaataaatgcactaaatgtatatgcatgagaaagagagaggagaagaaaataaatacaaagttagagcccatctactatacatactaactctaatatgatcttatagctaatatttggctctactgttaaacttgctctaattgcttgggagggcatgtcatcacctattgcacgcaatggcttgtcgagacccctcatcttttaataatgtgtgcacaatgcatgactagtgacaacataatagtggcccgctgttggtatttattatagtcttaaataaatccgcaagaacatggatactgaagtagcacttcactttagagtattccaagggtatcaaatcacagggaacatgtgtgtataatctaagaacaagattcaaccaaggacaacaactaattgggatgcttaggaaagagcggattcctatgggttaattaagttaagttaaaactctataaattgtttcgaacactggcttactcctgatcttccaaggagactccggcctacagctctatgatgtaccgaacgtggagaattacaaaggacagatatggctgttaccacctgccatcaacttctacaacccgtggagcacacaacaaacaaacgtaaactccagccttaacaccatgtctacgctattgattattaccccaatctcgatgtcacacttacataagattaaggtactctaagtacagcgatgaacctggaatgatgagaatatatcttaattacttaaataagaaaagttaattccaaaggagatcacaaatacttatgtaaaagaagcatccaacgaggtacaagatcagagagagagagagagagagagagagagagctgacatcttcggcactcctctagaattccttggaagaatgtcgacatccctagcactccttcggagagaagtccgacatttggggcacgcatgcacgcttttcaaactgctaagcggtgttgcttttgcaaaaattttctatataaaagttgttttaaaaaatcatgttaatctttttttaaaaaaatagctaatacttaattaatcatgcaataatacgtgcttcattttccgtgctagggaggagggattcccaacccctcctcccgaacacaccctttgactgtgttcttcccccatttttcccaactcacctctctcgttttctgcgtgcacgtttcccaaactactaaacggtgtgcattttgaaaaaaaaatctataggaaagttgttttaaaaatcatattaatccatttttcaagtttattttagataatacttaataaattatgcactaatcaccgctctgttttgcatgttgggagtgagggttcccaacgctcactcccgaactcagcctaaatgtgtaagtgagttgcactccacttgttgtgtaattttagagtgtagtgagctccttcttttatagcctccttaagtcggttggaaggtcggtaactgccggtaatcaagcataaccacctttggggcttcaggatcttgctccacgcgtcggcagatggcaaggggaggcaaaggtggttcagcataccttgggttcggccaaccccattggcccacctcccagccaatccttcagctgggaggctgcctggtgggccccctacaagttgtaccttgtatgggctcaattgtaggcgattatgattgacatgtagggcctccaatccgtgtactcacgtctgattgtctagatatgtattttgtcgcatggcgggttattttcgtccataatgcacccacgtacaaatattcaccaagacttgtggaaatggttagtaataagcactacctctaagtttagtattctactttgtattctttcatttgcatttgtgcatgaattgatggttggaattggtacttaaggaccgtcaacaacaccatcacattgagcatttacttgtccctgagtaaagattattgattacatcagagcaatgaatccctttgtaatgatactggtataataattatttcaagtcatacctatacttgtgaatcttaaattgtctaccgtgtcatcttgggtgattgacgaatggaacgaccatgattcaagttacctccacttctcctgatgagtgccatgggttttttcctttttctcataaaaacataactttaatcctcaattgattctcttgaatcactcaatgtgtatgattattcaccgagtcatagtgttgacggtcattaagtgcaaacttttaccatcaactcctgcataaaagaaataaaatataatttcaaaacttagtggaaggggtttataactaaccatttccactagctttggtaaatatatgtatgcaggtgattttcggtagaaaacacacccaccaagtgatagaaggaacctccggacaatcagacatgattacatggattggaagcctcacatgtcaatcaaaactacctacaattgagcctaaccaaggtataacatgtagggggggggggcaccaggcaacctcccagccgaaggagaggccgagaggtgggccaaaaggttggccgaactataaggtcgcccgaacggaccttggctcctctcaccatctgcttccacgtgtatgctcttgatgactccccaatggcggttatgaaggtttcatcggcagttatcaccgatgtaaagcattgtaattatgagctacaaaaggaaaaggtcttcgcactctcaaattgcacaacaaagtagagtacaactcactttcatatcatggtagctactttagtatgtgggattaggaagagagtgagagaaagctccggaaggtgtgtcccaaatatcggagttttctccgagaattcttccatcagagtgccggagaagcgcatgagttgctggctttcttctctcgcttgtacctcggtggatgcttcttttaaaaagtaagtattcaagtttccttatggtatttaattagtttatttaagtgagatatattctcatcggtgcgggatcgtcgcttagtatttatacttaatgctctagtactaagactctggataaacaagatagttcttggcgaggctagagtagtaatcgataacgtaggtgtggtgtctaggttagaggttaccttcgtttgttgtgtgctacacggaaagtagggtagacgacaggtggtgataaccctgcccgtcctttgtatcccttcatattcgggtacattataaagctcaaggctggactcaacctggcagactaagggagggctggttcctgatgcattcgataaagttttgcctttaatttaagttagctaaatacgtccataggaatcctctctagcctatcactcatcatgttgtcctttgatagaattctgttcgtaaaagtatatgcacgttccttatatttataccctggaatactctgtttggtttgggctttcttccaaaagccggggtaatatatgatcttttatcgaaaaaaaatgatggagatcacttggcttttttggatgtttatcacttggctcaagcacttccccaaaactatgtcaaaatagtggtgtctgatcacatgttagttgaagtaaactacaatccgttgctagagccaaaaattggggtcaatcgtgatgatgaggaaaagggttaaataatggctgtcaccatggtttttaagaaccagcagatatgtatacacactcaatctgcgcagttttgatagggtaatggggtgaggatagctatattctcagcctctctcagagcatctccaataatgctccaaagttgaagatgatagctaggaatttccgatatttcaaaatagcagatgccgttgtttcctttaccacatgtttgaataaagaaataaaaaaagctcaagaagtatggatatctttcccacgaaaggatatatatatatggaccaaaccatcaagcagtacatatgcaggcacacatatttggggacattcataggcgtattaatggtcttgacacttcagcgtgtgaagatagggccgtggggtggaactggaggccatgcttgggatgaaggaggccatggtgccagtgctggcagttacaccggagtacgccgaatgagtatagggtcttcctggtgtgtcagctcgatgttgtttgaatacgacgacaatggcaaacgtgtgaaaggtaccctgcatggagagagagacaatggaatacccgaggtatgtagcaagcaatacttgatagatttgtgatcttaggatttaggaagtgattttccaagtgaaaacaatttctccactccttataggatctactctatcttattagaaacttatatttattactgccatgtctacccaaaatctaaatatttttgttgaaaattgattaggcgccaccaacatctgacgtcatcctattcgtcgccctctctgggtggcttttagttaaccggtacctataaattataggtacaagtttttctaaaaaaaaccgacacatatagtatttgtgttgattttcctctacaaccagcatatatagttacccaaaggtgacgtttctgtaacttttttcatcctgtggaggtagggaaaggttcatatgtgccggttttaaatgaacggacacctatgagggttttgcagtaatgatgcgctaagggttcagtactgtagctgtagagaaagaaactattaacttaattaccttcagtggaaaggtgggtaaattttacaattaatataccatttaaagaaatgcccacgcaaatgaatggttggattttactcacaccagtgccccttgtcacttgtaccgtgtatcgtaaaacaactcctggtaacgacgatgggcacagatcatgaccaatttattaaagcccaaggcctctgcttcttgcttctgacaatctcataaaggttttcatgagcggtgaaccggtgactagttcatttaatcatgatctaatagaactcatcaactagttgtattatagaatcagtagggactcttctttaatcgtggagttgtattaatttttccactgttttagttatgtaaaaacacagacaaatactcagtcgtcgattgaacggtttaatttgggagaaaattaaaacaaacagcttgcagagagatgctttgtactaattaatcactgactgacaaataacctgatgcatggacgcacacaggaggagctcgacttccatggggaggtgttgacgcacatgtgcggctaccatgacaaccacctcatccggtggttgcagttcaggagcaaccggaacaggacgttcggaccatacggcaatcttctagaagaccaggctggatggacgcggttcgaggtctccatggagcactcggggtccatcgtcggcttctgcggccggagtgacgacttcgtggacgccatcggcgtctacgtcgccgtctggaatcccgagaggttctatgatagcatgcgcaggcagggcgtccgcgtttaccgggcgtcgcctctgcgcatggacctgcgtcaaatagaagaagagaaaaagaaggaagaagtggaacgtgggcgcctacagaaggagctcgaggaggggcgagaaagtcttcggaacatacgattgaagcttgatatgccgccggatcagagaaaacgcctgatacgacgcgacctgcgagtggagcatcaagaaatcgaacgtcagttacaagagatgcagcaactggaacgcgagcgtcagcaactggagcaacaagaaatcgaacgtcagttaccctcgcgtcagcaactggagcaacaagaaatcaaacgtcagttacaagacaggaacgcgagcgtcagctacaccggtggagaaactttgtaaccggtggagaaactttgtaaccccctttagtcccggtttccaaaccgggactaccaatccgggactaaagatcgctatctttagtcccgggtgaaataaccgggggtaaagatcgatctttagtcccggttggtgttaccaaccgggactaaagatcgagctgacccatttttttttttacatggccctgttgctgcatggtttatatatatatatatatatatatatatatatatatatatatatatgcatatatatgtatcaatacatatatatgcatacatatatatatgcatatatatatattatattatattatatgtatatacatgcataatatatatgtatttatacatatatatgttatgcaaatgcatatatatatagatatatatatgaccaaaatatatttacattatagaaaatgtgtacacatgcatatagaaacatatgtagtcatgtattaattacaatccattatatgtcctagctagctacgatttcgacgtagtagtactcgctgctagctcagaagctaaggaccggtgaattgtgtttccgtcgtagtagaattcacccttgggatcaaggatttcttcgttgatgaatcccatgagttgttcttgaaccgccgcgataaattccttgtgtgtggtcaggttatccctcatacgaataaactatatgaatgtatgaaattgattagtaattaaacaagaaatcgctacgtaatgaaattttgaatttatttatacgtacattgagctctcttgtggtgatgatttggtttgcaaggcagtggcaatactcgcacacgtaatagccgcacaagttagttccctgcttttgctttgcgcactacaaataaatgacaaacaacgagagatctaattaatatacacttgtatgtatttgaatcggagaaatataaatgtagagcatgtgtactcacaggaaatttgaacttccgcctaagtctttctctccatttgccgcggaccaaatgacggaaccgataccaagccctacatggagtttaaagctatgattcgtagtagcaattaacataacaagattttcttaattaacaaaggaacttatgacggtacctgtctataagttcgaaaaccttgtcaaacgtagactcttttttatccattgagtcatatacgttgacggtgcaggcctccaggtcgaagagtaaaagcacccagtggaatctgcaatgtgcgtgggatgcattacatatgaaacacttagcaagttcgtacgggaatgaaatttggtatgtaggaagacagtaaaattaaactaactctgtgttgtacggcaacagtatgaacgtcttgtaatgctgcgccttcaggagatggacgagattgtcctctgtttcttgtggatattggtcgagcattgcgacgtttactttccgagggtcgatgaatccagtatcgaaaaccctccgccgtcaggccctttgaatctccattctacaacgataaaagggagtatattattttctatagtctacttatatacaaggacctaattaattaaaggagacgtatagtaagaaatctaactgaacgatatacttacaaaatccagcaactcataatagagacgtcgagggcgtccagctggtatagttcgtagattcccctgaaattgatccagagaatgtcatctccttgcaagaagtccgtgtccctgatcctcgctccgatcatctctctaccggtggcgctcatctccatgtacagctgatggaacttgtacatttgtgtgggtagggactgcagcagctcaggcttgacaagcggtttaccgagttcgtacatgtatttcacttccgccttttcgattggtgcgactcctagcaattgatccgtagttagaccggtgtcagtaataaattgttctatcgtcatttctttaccggtcaccaacggctcgatctcctggtttggttgctctccaagctgagggactggtttggactttccagaagatgctttcttcagcgttcgctcatagtccgatagcttgatggcctccttgacagatgcagacatacccctgaagaagttcctgacactggggtctataggaatcttcttttctggacttcgaggcttgaattgtctcttgacttctgatgcaacgtaagcgtcaagctcctcttgcgtgcaatcgtaccccgggtccttgttcttggcggcgtcaactttcgccttcttcgttgcccttgtgtgggcaggcggtggagctgggggggcccttgactttgaaggtgccggaagaggagcttgcgggggagtaggtgtaggagcacgaggaggagtcggtgcaggatcctgaggaggagtcgatgctggagcctgaggtggagacggtgctggcggagcatgaggaggagacggtgcaggatcctgaggaggagatggcggagccggaggagatggtgcacgagacaccgcttgtcgcccagggaggatgatgtaccgcctgcgccatagaataatggcatggcatgtgtctcgtagatgcgtctcaccgtcttctccagggtaatccagctcgaggtcctcgtacgcgccttcgaccaactcaacttcgaccttcgagtatcctgctggaatcggcctgcagtggtaagtacctgaagggtccgttgggatggccatgcccgacgccaccttcatgttgtgagagattattttttagtaatcaacatatataagcagcaactagcggaatggctaaatcttacctttattgataagttcttcaaaggaatatgcagctcacatggtgtccgctgagtgatgtcatcaacgggacaggtcgattcatcctgtgtttgcatggcgtccatgctctgtgatcctacctgccccgttgaggcgcagctgctacggtttcctgacgggctcaccattgcaggaggaatggtcggctggggatcatgggaccgatgtgcggccatgcgttcatcaaccttccttgccacctcctcttgcatgttgagttcatagctcgatacccggaactctagctctgcaatcttcgcctcggtatctctcttgctcctcatccgactcctgtacgtgtggatgtcctccttgaaaccaatcttccaaggaatcacccctttcccccgtgttcatcctggatgctctggagtctgcagggcgagtgtcagctcgtccctatctctgtctggtcggaacgtgccctgagaggaggcttccactgcatctgttagtcgtcgcgcagcctctcgtatctgatcgccgaagaccagtgagccatcagctgggttgagcgttccaccgtgagcatagtaccagaacttcgatcgttccggccaattggctgttgccggttcgatacccctctcaatcaagctagcctccatctgctcccacttcggcatcgcgacgctatagcctcctgaccccaagtggtgatggtacttcttcttggcggcattttctttgtttctttccatcatcgcctgcccttgttcacctgtcttatatgcaacgaactcgtcccagtgatcccttagctttgggaatgtgtcgaagttcggtgtctgccccttcagtatatacttctggtacagatctcccttgaagctctgaaaccgtgctgccattttcttcagagtccaccttttcactttgtcctctgtacccgcaggaagggtgaatgtctcgagcattgtggtccacagcatctctttctccgaatctgggacaaagctctcatgatctccgcgtgcccttgttcttcgccagtacaccctactgacaggcacgttatcccgcacaacccaaccgctgtgacgtacatagttcttggcggcttcggccggggcactaggacgtccatcttcttccacttccgttatgatgtgccgaccctcaagcttcttcgctgcacctcgttgcccgcgtgccctcttctgtccaacggagggttgactaccactagcctcctcctcctggttcccctccacatccctttccacgtgcccctgctggttcccctccgcatccctctccacgttcccttcctcgttcaagtactagtttggatcctcgttcccctcttcttcattccagtactggctgcttccctccgcgattgtatcgtacaatatctgttcctcatcgcggtcagccatctgttgatacaagaaacatctgctaagtcacgagacatttatgttttaacaatctaagtcatgtatgctaagtgtaaatgtcgtacattagaaccatacacaaccttacgtgctaagtctaattacaaatcgtgatataagctaagtctaggtgacgtatattatacaaccctagctagtaaataattatatactaagtctaattacaaataaaataatcttatattaaaactcaaataatattacatgctaagactaaaatagtcatgtatatgctaagtgtttcgtgcgtatatgctaagtctaattaagactacaatagtcaattgctacttgtcgcaccaattccgtagtcaataattacatactaagtctaattacaaataaagtaatcttgtattaaaactcaaataatattacatgctaagactaaaatagtcatgtatgctaagtgtttcgtgcgtatatgctaagtctaattaagactacaatagtcaattgctacttgtcgcaccacttccgtagtcaataattacatactaagtctaattacaaataaagtaatcttatattaaaacttaaataatattacatgctaagactaaaatagtcatgtatgctaagtgtttcgtgcgtatatgctaagtctaattaagactacaatagtcaattgctaggagtcgcaccaattccgtagtcaataatgtcatactaagtctaatttgcaataaaataatcttatattaaaactcaaataatattagaacactacacaatcttatatgataagtctaattacaggtctaataatcttaattaattgcattacaaatataacaatcatttatattattatgtcacttgcctactccaattccttctagggctagctcttccactcaggcttgacggacgactccgacaacacgtcttttctgcaagatacaaaaagatgtattaggataaatgcgaagtaacatatatatatatatatatatatat

SEQ ID NO: 5949 - DNA, 9278 bp, Oryza sativa
cgtagtcgtgataccaaacatcaacgatacggctatagcacttcacctttgggtgcccacaaaaggatgggttttttggggaaaaaaaaaaactttttttaccaaagggggggggggaaaaaccggtaatgtaatctacctaaggctaagactgttcaaggacaacaactatcggtaggatagctaggctagaaaggattttctatatgttttcactatctaagctaagtaaatgtaattttctaactgctgcttcgggcaccgatccctgctggtctgccagcgtggttccggctatagctgtatgatgtatccgaacatggaggattactaggacgggattctgggatatcatcacctgtcgtctacctctaacaaatccgtgggatacacaaaaaacaaatataatctctaacctagacaccacgtctaagttattaattactactctaatacttgcgcaggaatttcctcctttatctagagccctagtactagagcacttagtacaaatactaaacaataaacccgcaaagatgaaaatttatctcacttagactaagtaattaaataacaaaagaaaggatcctgaatgcttacttgatagaagaagtttctctgaaaccggagtagagtgcaccgacagctccggtactcctcaagaattcctcctagaaatctacactcgccgaggtagaagtcgaagagagcgccaaacttccgggcactcctccagagattccctaactctctacctattttctaatgtacaaaagatacaatagaatctcttataattcagctcaaagttgtgtgtattggaatgagagcctctcatcttttataggctccaaatgacggttatgaccatgggaaatgaccaaaataccctccaaccatcattggggagtaatcatggccatccacgtggaacagatggcaggaggcgccacgaatggttcggctgaacccaaaaacactcctcccggcctctccttcggctgggaggttgcttattgggcccccaacatcatgtactacgatttttttccaattctaagtggttttgattgacatatggaccctccaatccgtgtaaacgtgtcctgattgtgcggatgtgtattttgttgcatgacgggtgtgttttctccttaaaacacttgcatacgcatatttcaccaacactagtggaaatgattagtaataatccctaccactgagttggataccatattttatttcattatatgcaagcattgatggtccaatattatgatttaagaactgtcaatagtggttttcatacaaaatccttgcatacatatatttcaccgatacttgtgaaaatgattagtaatagccactaccactaggtttgatgttttatttcaattgcttatatgtaggaattgatggtcggatttggtatttaaggaccatcaacagggttcatctctccctccttaccatgcacagggctgtggttccctctgacgggtgtggcaatggcctctcccctccctagcgctgcagtgaccagcactacctaagccagcgccacccctcaagctcggaagtgatgagcactgccgactgccaacgttgatgcctctcaccaaagctaggcggcggcaatagagtaggcgaggaatactacaccatgacataaaattaccggcagatgtgtattagcaaaaatatagaattatctactaactacctgttggtaaaaggtttgaatggaccatatgtcagcaatgctacaatataggagtaggaatctatttctgtcagcaattctatataacttcaggtcaaagtatatgtcggtaatactaactttaaagtcagactatgtgttggtaaaacttgccaatccatcatgtgccaccaaagtttcatccgtgtgtcacgcccgtgataaattcatcccgaaataaaaatcattctctaaatggaataatagaattaattaaaattcgaaaagaaattggcaaatactaaaatacgtacaagaaaaattcgaatgttgtccggagattttttgttaaattctccgtggtctaaaaagagccctcaaattttacttgaattttcagagcaccgaaaatattattaagcaacaaaaacaattatcagagtttattaaaaagaaaaacctaaaattaatccccctcctccctttgggccaagtctggtccaaagtcctcccactctctcccggcccgcggccaaagtcctcccttcctccctctctttctctccctctccttctctccctccttctcttgggcctccccttcccctcccggcccactccctcctctcctcctccttctgggccgcccctcccctccctccttccctctcggcccagacgcccggcccaaatcaggccgagccgaaccagccgcgtgcacgcgcgccgattgcgaccgcgtgggtcccacccccggtcgtcgtcaacctccagccgcccggcctccttcctctctctctctcccgtgcaaacatagctccttcctccccccaaatccgcctcaatccaatgcctacattcaaattaaattaggggaatggaaaccccattactccctcttcaattcccctaatttttccccttgaatcctgtccccaattgccggggatttattccctcccttgaccggcattcatggccgccggccggattcccggcgccgtccccgcccttgccatggcctgctcccctctgtgacctataaaacgggatctcctccctctcctgtccccgttttgcctcttcccgagctcccccacggccgcaccacttctccccgccgtcctccttctccctcccatgccgccggccacttccagccgcccgtgccgccgcgccagtgcgtcggctggccgcgccaccatcttcctcggcctcgcaggtgcctcctctacgccggcctgccctccgtttcccgtggagacctccggaagtgcatccccgccggcaacagtggcgttgccgccactgttccgcctccggccgcctctgccgcgtctcttgtgcaccggccgacgtcgccaccacctctcccggcaccggaaagccgtcctcttgcccggccaggccacggcgtcgcccgtatttcgccagaacaccgccgtgccgcgccggcctctccatcagcctcgccggaatttccccggtcggcccttcctccactcgtgcgccgttggccgcgcaaccaccaccttcggcatcacagcggcgagccagcaacgtcgtccttggcttcgcctccccttcagttgaatccgccggcgttcgtcgtcgcctcctcgccggttcccatcgtcgtcctcccatcgttcccggtagtcgtggtgttcgtctctccgtcaagccgtgctgttcgtcgcccgcctttcgtcaaggttgctgcagccccgtcgtcgtcttcgtcctcggctctgcatcgtcaagcgttgcatcgaccgcgtctcgccttcgtccaaggatcgccgccgaagtcgttccctcgccgttcgtctccgtcgtccccgagccgtctccgccgcccgttcgccgtcctcgttcccacgtgtcgtcgcgtggtggtaagggtccgtcctttcgctgcccccgtcctcgtcctttcggtgtcgccccgtgcccattgtgtggttgtcgaccctggtacccgtgtaccggtgtcggtagtcgttcgtgggtgcgtgtggtgaccgtgtttgtgtgcccactcggtagccgcgtggtttccacgtgtgcagcccgcgtggtgtctagtggagtccgtttgtcggccactcgccttggttgacacacggggtctgcttccgtcgacccgtggaccgtctctatgtattcggtctaccgtggtccattaggttgacatgttgggtccgcatgtcaatagcgcagccttcctgtcttttccaggctagcgcttgcacatgttttatagttgcaaaacctaatcataataatccgtaaatcttcatataacagcattaaactttggatgatcatatcttggtcatacgaactcctaatcgacccattcaagtctcttaatgtttgtcataacctaaagaaccgtgtgctttctttttatgtattgttattacttctttttaggcttgtagttttgcttgtgtgcttcgcgtagcttctgtcattccggaggtttccgaagcatgcttcgcggtcgtcgccgaaggttcggagtgccgttctctctgagcaacgcaagtcgcatcacccttgagcatattgaatcccagtttataaaattattttgatttaaattattgcattaccgctttacttaaattcccgcgttatcactgttttatttagccatgcctatttacctttgttatgaccttattattattgctattgttattattatcttgttcaccctaggataaacaaaaccccaactagtgggtactctattaacggttccactagtatgaatttaggtagatgcttcgctgattaattaggcaacactaggtggttttataactttagactttgggaattcttatatcatttggacagtatggaatggttggcttatgttggaattggacacacacctccccctctattcaaaacccctaaaatggttttaggctgggctcaaggtgcatggttctgctagtagcacctcggccactataaggaccggtcttcgagcctctgttgcaaagcactactgtactaaccacatgtctaatgggtaaggcttaacccggtgctcagtctagtcctggcaagagtacacggatggagatggacgaagtcggggctcgatggacatctctagggcaaatgaaggctacacgagctgcggctcggtagtcgagatgtcatggcacagggccggtgtcctgctgctaggggctcaatcttacctacctgtctcgggatttcggccataggcgaggttgggtcggtgcttttgtcacggctaggatgggtaaaggggttatgtcacatcctttacgatgggttccacggccgtggaatgcagagtaaagatgtgtctagagggtaaagatgtacacctctgatcagattataatctattcgaatagctgtgccctcggttatgggcatgcctagcaatgtaccaaagttagaagtttgcttcttaaaacttgcttaacaactaaaatgtggaatgattggcctgagttggcttgggatgagctgggacccaggtcgggttgccagttcggtctgaatcatcgtaggccttgggttaaggcaggttcgtgtgggttcacggccttgattaataatattgtgtagctctaggatcgtgtttgcaaaatagctttgggcaactaagtgacttttaaatgttgtttactgcaaaacctaacccctattattagccccttgtaccccttgcattaatcatgcatctcccggtgtggcttgctgagtactgtggttgtactcattcttgctctatctctccccccttcagtaagagaagctttagagaagaagtcctaggtggagtcctggcttatgccccagttgagcgcctgtgaagatggaaccgtaggcccgctagtccgctgctgtttacttttgtttgtcaggcctgaagtgtctttgtaataatggaaatattattgatataataaagatgtgtcttttatatcatgtttgtgtggtgtaccctggcttttcctgggacggggattaatacactagcgttcgggaaaatgtaaattttctcggtcgcgacacgttggatcctaatcgaacagtcttgttaacgccagaatttggtaagcccaaagtcatcatcggcctagagtcagtatcggctttagagtcttggaatcagccgatgggagtcgtcaaatcgccagcagttgtattcttggtggagtgggatcaattagaggaaatttatccagaagagtccgagttcaaggaggatgcggcatggcaaatatatctattaatttggagtagtttgttagtttccttttatcttaaggaaagtgtgtttagtgtcctataaggactttatgttttccttttatctttaggacagtttctttcttgtcctacaaagactagtatctacccatgggtataaatatgtgcacccggggtcattgtaaattatctctcttgatcaatacaactactctcggcgcatcgccaccctctttaccgaggttttttacttatcttccggtggaatttggcacctgacatgaggctgcattggttcagttcgatctctggcgaaggagtaagtcctacgttccaccggccctggtgaatctattggctatattggtgttgttcaaggctgcattgcttcgatctcttggatcgctctggtttggttgatatatttgcctacctgatatctcaattctatctctaattgcattgtgtttagagacgcatcggtttagttgggactgtctcggttaggtctgatcttctgtcttagccgatatatctctgcaatcacaatgttgttctaaatagatttgttatatccatcacattagacagatctagctcatcaagcattagattatcatatacaatctcgtgctgtatcggttaggttcgacctactagattgttgttgataatataaatcttgttgagccgataggttcacgctagtgttttatcggggtgctagccgataagttatctggacgttgcatcggcttataaggattacatacaagttggatttagccgattacaacaaaggtttcactgtttatctaatcgtttggattctatgacatcggacctccagccgatgtatgctttaaccttcggatcaatgcttattctatcatattgtattgctagccgattggtttatactagattatattgttattttattacatcatcatcagccgattgcctttatatcattatctatattggacatatagccgattgcttaaatccaatcgttattggctattatcggcatcggctggaactactccatcggcttgtcagccgatcggctcattgatctattatttgtatatcttgtcagttgcagggtcaaactgattggcacgcccgcatctcactaacctttggttctgcactggagctaagcagatctcccaggccagtgtatgtttttcgcgtcaacaagtctagatccatttatcaagatgatatatctctgctacttaaaagttccgtagtggtgacggtgactccaaccttgacagatacgcgaaatatagaaagtcggatcgcctaatcgaacggctcagatcgcctttctcttcctacgcatccagcgcacgcgtctccctcgaatctcgatcgctctctcctctcccctaccctcaaccccctgatccacgccaccgcaaccccctcaaccgcccgcatgcccgatccgttctctccccctttcctccttccccaccgtcgctgccgtcctccccggcactcccaatccctttctcctccatgccgcaccgcctccccatcgtcgcagccgccccgtcgcccctgctcgcctgcatccaccacaccgcctccctccccagtcgagacggcgtcgcctcctcgcccccttcgcagccagattgacaccgcgccgttcaatccaccgcctcaagcaccatgcatcgtcgtcgttgcaggcgtcagcacgggcgcgggcgctgccgatcccgagtcgagacgacgtcgtccgctgctgcttctccaccactgacggttgccctgcgtatatcctccctattatcgcggtccccacctgctcctgaatcctgatccacaaaaacagcggagcgccgtcggcctctctgcctccctgcgaccaccagtggcatctgccccgccgtcggctctccctcacccgcgactcgccgacgatggtgctccacaaaccattcaggccgtcactggtctccggagcgcccgaggccgacgtgtctcgcactccctataatcttgctttgctgtagcagtaacaacatcataacatatcgtggttcatacaatggatcaggctggtaattcgattccaattcttgctcctgaacttttttattggtgataatgttcagcagattggtttggtggtggcagtgcggcaccactgatttgtgttagacattggtccttatccaaccctctaatctcttgattatgctcacttacgatgacttcagctcaggtggttgaaagaaacactcctagactgctatttatttttacgttacagggatttggctacagatagttgcaagctgcaatgttctgatatttgttatgttttagagcaaaatctgccttatatataatgttataattaggcttcgaatttcttgcttatgttctttaaaaattccaagtaaccttttcagttctttatgtcaggttaattgacagatcgagttgcacttacacatatcttgttttaggaaatgctccaatggcccttgaatccagcaaagtaagtatttttttatgcttgatctgtgactgatctcaaacagataaattgaaatgagtaacttgtacacagataaaaaagtgacatgggacttgattagagttacggtatttttatcttacgaggcgccagcattatttgagttttatgagtcaaatattcttccattttttcctgttatttggttgtgtcatgtcattatttgagttttattgggtaaattgtgtcctgactggtcctgagctggatgtagtgcttaattggtgcaaaaactgggcttaagttgcagtcaatttccagtcatgtgtttgaaaccattgttttctgattactttaattaaataatccatgatcacaatataaaccatatgtgcaaatatccagtcatgtgtcgtgtgcatgatcagatgactgctattggctataatgcagtgattctgaaattgctatttgccaaggcttcctatttttgctgaactgctgcagcagtatagtgccaccaaatgaaagtgaacacgtaagcatattgtttgggagaagatcacagttcggaatttcagattataaccaagataaagaatcactcaactttatgatcgacttgctattcatgtttattactccctcatttcctaaatgtttgacgccgttgacttttttaaatatgtttgaccgttcgtcttattcaaaaacttttatgaaatgtgtaaaactatatgtatacataaaagtatatttaacaataaatcaaatgataggaaaagaattaat

SEQ ID NO: 5950 - DNA, 8823 bp, Oryza sativa
gaaagcaactaactttctccctttctctctttgtataaatcccgtaggaatgtattttattgggtttagtcccacatcagtaattgatgatggggagcacgacttataaggtgggggcggtcctcacccatcagacttgtcttttgggttgtgtgggcctaggacctaaagttgtgactccggttgggtctgtggtggagcaggcccagtgtgacctgggtggcccacggttggtggtttgggttgcgcactctaacaagtggtatcagagcccatatttggaatccggcacaatttccattggtcacatggtggagaggccaggtatcaagttttcggagtcacatgggttgatgtgacgagggagattgttgggcctgaggccaggtagcaagtctttgaggtcgcatgggttgatgtgacgggggagattgtcgggcccgatgtgtgacgggggagattgttgggtttaatcccacatcggtaattaatgatgggggagcacgacttataaggtggggacggtcctcacccatcagactagtcttttgggtggtttagccctagaacttaaagttgtggctccggttgggcctgtggtggagtaggcccaatgtgacctgggtggctcacggttggttggccgggctacgcactataacatatttaaaggggcatatagtaaaatctaataaaccgatcgattgataacaaccaccaccactttatccaaagatcgacagaatgcaatacatatatataatatactgtttcatggagatcaattaactcaatgcatgtacagtacggtgcatgatcatccatccgaattatgctttgaaaggttaatttctgtgcgacatatatcaaattcttttccaaaattgctaaaaagaagtgtgattttagattaaaggatggtcgactacacacagcctgttacatttttgtttcgtacataaggttcgcagaatgcaataagactaggaaaagaaaagctactacatctccaagagtcctataaacatgttcccaaaagttaaatttcataaaacccctcctataatatatggtccaagttgcacaaaaccataagatcttagtacatgacatataacttcaaaaattataaattatagttctaaaattttagagaacccaattttgtatactcctatattcatatttaaaaaagctttacttacgtgcatataacatttatataatggataaaacactcataaagttaattaagatgtgattgtagaacttaaaagtgtggttggtcaaagtcaaaatgatcaataccgtggttttgtgaaactttatggccagaatatctaaagttacgtgctacatgacaaaaatcgtgtgattttctacaacttagttcataataatattcttggttaagtgagatttactctttggtataaatcaaaaacaaagctctctaacaggtaccaaaaccctctcccaaattttaggcacgaccaacaacgctccaataatcatattcagatgagaaatctcttgggtatattggtgcgaactggagctcagtgatgacacaggtagcagttggcctgtgtagcaatttgaagaaatcgcagggcaaaatcagaacttgtctctgataaaaaaaaattgcaggtgcacttccacctagttctaattccttgatgggtcggaagaagaaatttgtgcagaaatacagcatttaattaataacattaagaaaaaccggaagttctgattggaacttgtggaaacttctgacttttgggatcataaagagctcaccgtttgatagtgctaatacaatctgaacttccaatttgaacatcggaagttcctaactaggttttatatttgaaccattcacatcttatattttgctttaatttcctaggttttggaaatttaatattttataattttcctatagattgttccttatctctaagaaattgatttaatcttcagtgattttctcataattaaatcacttgttcgtcacacaaaacatgacatgtcctttcacaaaatgtgattatccatcagcacatcgcaatcaccaatgccaccaccaaagctgtagtcactggaaccgctgccgccgctgtccgtcaactactctccgctgttcgcactccatccatacaaaagagtgaaggcatgcacggctggaaagttgagcgggagggggataatacatttgccgtcatttacgtaggctcgtatttctttcctaatctttactagtgtgtcatttatctatattttagcttatataatatgaggtatgatcaaactcggtacggtctctaaaattaatttttagcttatattttctcatattgtattataccaacagaaatataacctaaattcaaatgttaatcgaatgatattattttcagcaaataaaattcaattcatgttatattaattgttagttaaatgttttttaaaaattaaatcttaaattgcgcacaaatattatattatgggatagagaaaataatatctaatgacttgttaactaatttaatttatgtgtaattgacttgtttcttcgtttctaggttcctctagcattaaaattaaggacgaaaagacaggggcaatatagactgttcaaggaggttaccattcttcgggatggagaattcaatggccgatgcccctggttatgttgttggttacaaaggtgtggaactttctacttttctaacacaacgtacactctattttcacccaattattatgattccaattcctttcctgataagatctgtatttgatttgcatagaagatataattccactatatctgtcttgatatgaaacaataatgaattttcatatggaattctactgttctagttttcctacgcgattgaacattagtgtgttttgtcgattggctagagtccattcgatgtatctcgccaggtgtgcatgcaccacagctccatttcatttatccaatggttatgtgtacacatgctatacactgataaatactccctccgtttcaaaatataatcgtttttagactctgacatggtttccgatatgctactttaaccaataatatctataaaagaaaaatgttttaaaaaaagagttacatatgatgataatttgtttaataataaatctagtaacatcaattttatatgattgattttttttctattaataatcaaagttaaaaatatttgacttgttactatgctaaaaatgtttatattttaggatggggggagtatatagtatgaacagtagaattgtatagggggctagcacaaaatttgtgctagtgaagtcgtgagtacatgactccatttaccgtgcatcatatcctagtgccaacaagtattggatccaacaattacacttactacaaacatttaatacttcacggatttatacatgcatcgacaatacaatttcttagcctctccatgcgatcagaatgggaattactttcatttcatcacttccacgggaaatccatgaattgaaatggttaaacatagtatttgtgtaggttcgaatacaattaactaagcctacaaaacgagatgcatggtagattatgtgagcataagtataataatcaaactttgatagattaaaacacacccaatctcaaaagccaatagaacacacgtcgagcagcctatccaaccttctagggtcggtttgactgagacctggatggtctgaccatcggtctaaaaacaagtcaatacttctttaaaaatatgtgttttttcgataccaatcgttggatcgatcccaaaatttgacaaaatatacaatacaaattgtttgattaaaacaaaataacgaacacacggaaatagagaaaccctgtatattttattaatcacgattgattaatatgaatgtataaaaaaataggagggctcctgcacgagttctcatgttgccttcacgaggatacttaatagaaaggtacactgactggatattacgttcagtccgctaagtcccagtgcctacggaacacctctgattaagttgcacttgtgatcatggtcttccaaattatttgctcgccgaaggttgaggttggtgcggatttaatggtgtatggcagaacaagtggctttgttttgccaaacccggtcatgatcgatacgttattattacatcggtgtatgaaacaggtgtcggaatgaggggatgacttttgcctcgttggtgcctagcaacggtgcatctgttcctgtttgtttggacgtataaataatatagcaacctagcattgctagcgctcggtcataattttgtcgataatagaaaaatgtggtggccatagctttgtcagctttagccaatgcatcgtctggtctcatcggtctcggacatagagtcaattatgtatttttaatctccacttctccttgcatcttgcttattttgtacggaggatgtttctcttcaggaatttgggactcgctcctctagaatttaggatatgtggtcctacttaaaaatcttttctaaacatcgtaaatgtaacaatgttaataaataccatacaagtatagataatataatagatcaaacatataccttgacgtcttgctcttcagtgtgtttcctttaccacaatcgaggaagaagacaatttaaaagtattcttctttgttgtgtatttttttaaaatggatgcaatatctccatctttcttcatgtctccacagttagcaatctacaatatagtagtacaatttaatctcacaacgcataagaattaaaatttaaaactgaaaattgaaaaggctacacaagtagaagaactaaaacagaagtcgtccagcggcctccgattccgatacacaatgccatgccatccaacgcgccgagtcaccgatcgttgattcgatggtcagaagcagggtcgacgactcgacggtcgagtgtcgatggcggtcgtcgctcggccgttgaggctgagacgctatcgctcgacgctcgtgacagcatgactcatttgttgatgatgacgatcgacgagaggagtaatgggcgcggtcgccggctcgccggccgccgaggacgctgagacggagggagagtcagagaagtgggcacgcgacgcgggcgcatggcggacaacgaactcatcgtcttatctcaggcggcggcggcgaccagcggtgggcgtgggcgaaggcaggcgcgggcggcgctcgcggagtcgaggtgcctcgtggacttgcttcgctctcctgttgcgggcagcgggcagcagggcgcggcgaaaaaagaggagttgcgggggaggtgaaaaacgagtagtcaagttgaacatgcaatggcgcgtgtcagtctcttcagtctccaaattgcagttacgtgtgatgatttgggaccaggttttttcgttttctttttaatcccgatatatacacatatctgccagtggactcgctcccgacatgtgcaccataaaaacacgaggatagtccgatccgccgattagacatacctaagtttgcaattcaagaaggaaggaatgatctgatttctagatcgctcaagttgatgaagaaaagaggtactttgatcatccagtaaaatgacaaatttaccaaaatctttgaaggaatttattcaccacctcacacgttgataaattccctgtatgcacatcaaaactgactcaatcccttccatgccctccagtttaaccaatcccctgtgtaccctcgagattttattgtgttctctcccatgtccctaccattaggtatctgttagatctatcagtgtatacatccattacattgtcagtaatttttaaaaagaccaaaatgcctagcgaaaccctaggtagcaaccagcaagccagcaacagcgggaaatccccaaataatctccaatctctcgtctcccctcgacgcgggcggcgcacagcgccgccgctcttctttcgtggctgtcgctgtcgttcctcccgtggtgacatgtacttagtgtgtacctttcccctatatcatgagaaaattagcgtaatgacaaccttggttaaaatgcttagtcatattgtgactcttaagggtataatggacatctccaggtaaattaaccagtcaatgctgtgagaaataacggtagagacatgggagggatcacagcgaaatctcaagggcacacaaaattggaggacatggaagggattgagtcagttttaaggtgcatatagggaatttactctagcacatgatcatctccgcctgcgacatcagcttgatgacaagggatgtttgaacattgatctccactgcgcgcgcgcatggattggctgtgatttctcaggagcgagtctctctgtttttctcgtcgctgtgtattttctcaagtctccgtctctccgtctactgcaccttttaaacaggcagaggcgaggcgatggcgccctggcctaatcccttccgagattctagcacaagccagcgaaatccgttgattatctgcataacacgcaaggaggagcatatccacccgattgctaaagaaagtcacgtattactgctaatgacagtgggccctgcatttgatttttttaatttcttctcgctggagataatcagcgtaatacacgtgatcggttccaaccgagcaactaatactagtcaaactctcttatttgaacgcctgaaaactgtttaaactacgcatcaaatttaaaatctgttttcaccaacattttctattcgaaaagaacgagtccaattattgggtatattcggacacgtttattatttgataattttgggcccatatatcatacaatctcgctgcatgtgccaaaatattttttttattaatacacattgatgtttgttatttgaaatatttattcgataaattttaatataaatttttgtcaaacactaacccagaaacaactccaccaaagggtttgcaaactaataaatggtttaaggaaaacaccctcaaaagccagctatctcagaatttcaataaatgtgaactaaatgtcaaacttaagccaaattataatgtatcaagaaaaaaaaaatacacgaatccttccaaatccgatggatgaagtattataaaaattttggatggattaaacttgaacaaaattactgcaaaacgaagaatcacaagttaataccaagactggacataaacgcaaaacttaatacacactggtggagaaaccttctttcgtcggtcggccgatttccacaatagtcccggatgcaataaaaactggggctaaagatgatctttagtcccggttcaaaagggtaacgggcatatttgatctttagtcccggtttgtgttaccaacctcatctttagtcccggttcgaatgctgtcaggtcatatcaggcccccccgggatctttagtcccggttggtaaagatcgtaactttagtcccggttggtaataccaaccggggctaaagatcccggtgatctttagccccagttggtgctaccaaccgggactaaagtcccacccctatatatatgtcttcttcctccttcagctgcccgagcaagtttcaaaatttcttcaaaaaagaggggaggtcatgccaaaatttctattgaatttattttggtgattacatacaaatcggaggtgcctaaaaggtttgcaactttatcctccaatgttttttttgtcatactacatttgcacctatgttttgcacactttttttgtctccaaaatttagttgtaagttgatgagagagaaaatgtgtgtggggaataaagaatatatagaaatttagttcatttgctaaacaaggttttataaaatagttgagaaggaaaactctagtgaaagttaatcttaaataatagaaaacaaactaaaatgaaaattaaaagaagtaaaacacattaaaattagtttaaaactttacaaatagtttttaagaattatttggtgtaatattttatgatttttgtatgaataaagatatcttataattattgtatgactgtcattattgtaagaataattatttgtgtacggtttttttgactcaggtagatggatcggcaatggatgtacgctgaccggcggtccaaagagtttattgacggcgtgcactattttttgagagtggccgaagctaacaggcaaaggggttttatttgttgtccatgcaataagtgtaagaattagaaggagtattctgcatccaagactattcatttccacttgtttgagtcggggttcatgccaagctataattgttggacatcccacggagagtaaggtgttgaaatggaagaagatgaagtggaagacgacaatattccggactttgctcagtatgttggatttgaaggaaatcaaacgggcgaggaggaaatagctgctgatggtaacgacgttgcggatgatcttggtcagatgttgcaggacgctagggaggactgcgaaagtgaaaaggaggcccataaattggacaagatgttggaggaccacagaacttcgttgtacccaggttgcgagcaggggcacaaaaagttggataccactctggagttgttgcaatggaaggcaaaaaatggggttagtgacaaggcatttggcgatttattgaaactcgtcaagaacattcttccggggggaaacaaattgcccgagactacgtacgaggctaagaagatagtctgcccgttaggactggaagttcataagattcacgcatgtccgaacgattgtatcctatatcgcggtgaggagtatgagaacctagaagcatgccctgtttg

SEQ ID NO: 5951 - DNA, 24430 bp, Oryza sativa
atatatgtatttatacatatatatgttatgcaaatgcatatgtatatagatatatatatgaccaaaatatatttacattatagaaaatgtgtacacatgcatatagaaacatatgtagtcatgtattaattacaatccattatatgtcctagctagctacgatttcgacgtagtagtagtcgctgctagctcagaagctaaggaccggtgaattgtgtttccgtcgtagtagaattcacccttgggatcaaggatttcttcgttgatgaatcccatgagttgttcttgaaccactgcgataaattccttgtgtgtggtcaggttatccctcatgcgaataaactatatgaatgtatgaaattgattagtaattaaacaagaaatcgttacgtaataaaattttgaatttatttgtacgtacatcgagctctcttgtggtgatgatttggtctgcaaggcagtggcaatactcacacacgtagtagccgcacaagttagttccctgcttttgctttgcgcactacaaataaatgacaaattaacggcgtgagatctaattaatatacagttgtatgtattaatttgaatcggagaaatataaatgtagagcatgtgtactcacaggaaatttgaacctccgcctaagtctttctctccagttgccgcggaccaaatgacgtaaccgataccaagccctacatggagtttaaagatatgattcgtagtataaataattaacataacaagaatttcttaattaacagagaaacttatgccagtacctgtctataagttcgaaaaccttgtcaaacgtagactcttttttatccattgagtcatatacattgacggtgcaggccgacaggtcgaagaataaaagcacccagtggaatctgcaatgtgcgtgggatgcattacatatgaaacacttagcaagttcgtacgggaatgaaatttggtatgtaggaagacagtaaaattaaactaactctgtgttgtacggtaacagtatgaacgtcttgtaatgctgcgccttcaggagatggacgagattgtcctctgtttcctgtttcctgcggatattggtcgagcattgcaacgtttactctccgagggtcgatgaatccagtatcgaaaaccctccgccatcgggccctttgaatctccattctacaacgataaaagggagtattttattttatatagtctacttatatacaaggacctaattaattaaaggagacgtagtaattaagaattataattgaacaatatacttacaaagtccagcaactcataatagagacgtcgagggcgtccagctggtatacttcgtagattcccttgaaattgatccagagaatatcatctccttgcaagaagtccaagtccctgatcctcgctccgatcatctctctaccggtggcgctcatctccacgtacagctgatggaacctgtacatttgtgtgggtagggactgcaccagcttgggcttgacaagcgatttaccgagttcgtacatgtatttcaattccgccttttctattggttcaactcctagcaattgatccgtagttagaccggtgtcaataataaattcttctatcgtcatgtctttcccggtcaccaacggctcgatctcctggtttggttgctctccaagctgagggactggtttagactttccagaagatgctttcttcagcgttcgctcatagtccgatagcttgatggcctccttgacaggtgcagacatacccctgaagaagttcatgacactggggtctataggaatcttcttttctggacttcgaggcttgaattgtctcttgacttctgatgcaacgtgtcacaccctgaaaattcaaaatatataaattgttgtttaaatggaatttttagaatttattttaaaagtcttgaagagaagatctaattttaattaataaattccaatataaaatgggcccagataaaatttcattaaatactttgcttaattctataattcctagatttttctgggatttatttgagctaaggaagtatttttaacaaatggaattgcatttaagaaataatttaaattgaaaaaggttttaaaaagtctcttttggctttgggcccaaaacctttctctctctcctcggcccagtccggcccagtccgccgccgcgcgcgcgcgtccgcccgctgacaggtggggcccacctgtcggacctatcgtccaccttcggccaccgccgcccgaaactctagcgccgcgccgccgccgtctccttccaaatccggccgctcctttccgtttccggccgaattgatagaggggaaatgatcttctcgatctcctctacctcttctcctttggaaacatcggctaaatcggtttggaaatcgatggattcgagttggattcggattcgtttttcccgaagtttccttctcgtcgccggccgccgtgggccttcgccgtcgcctccgagtccctttaaaaggaccccccggtgtctcctctactcgtcgccaccctcgccttcgcctctcgtcgccggaaacgccctagcgccgtgagacctcgagccgccgtcgccgccgtcgctccagccgtgcgccgccgtcgttcccgtcgtcgtcatcgctcgggaaggccaccgtcttggtcgccgtagcgtcgccgtcttcgtccgccccttcgccgccgccggagaccgccggagcaccgtcgccgtcgtcaagccgaagagcgccgccgcttcttcttcgtcgccgtcgccgtccgttgatcttccgccgtcgctttggtcgccagtgagtccgccgtgccgtccgctactcgttggtgccctccgttcgtgccgaagcgccgccgttcgccggcgggcttgtgcgtccgagccgccgaaccgccaccgccggtggtgacgtcatcgctgacgtcatcggggccgttcgctgtgagccggtcgtggaccgatcgatctcggccgtccgttttggatcgattgatctcggccgtccgttcgtgtgaaccgccgccgtgcgcccggtccaccgaaaccctagcccgctgacgtaataatcctccttttccttttcaaaaataattcattattgcgtcataattcaattaaaatcaatttaagtgttttaatccgatttaatcttcaaaaattcataactaattcatcttagctccgttttagttggttcaagtctctaaatttttctaaaattgagatctacatgttaaaaatatccacatgtactgttcaagcttgtttatgtgctgttttggtgattttgcttctttttgtttagattccgtcgtttccggagagtccgttttcgcaggagaagagtttgaagagttccaaggccagcaaggcaagtcacacagatcccaaacaaccctttgagcatgttgatcctatttaaagctattgtttctattcaaatattgcatttgttttcgaatgtcattgggtggaattaacctattgtttgttatagcccttttgttcttgattaccttattccttgataccttgggttattataatttgactagttgagctttatttatattggttcaactagatattagatataattgcttagccctgcttagaaacattagctcacttctgggataaattatgactcactattgcttaatgatggcttaatgatagttcacgatggtcaatcgtgattggttaattaattaatgtgccaactaaaacctggtaatggtgggttgtgagcacatggttttgatggtcgtgctcatgacaattaaggaccagttcacgagtttcggttgtgaaacattaaccgtgccaaccacaagccagcatgggcaacggctttatcttttgtatagcatgtttcattgcggggcaccagactgagaagtggcggagataagcccaccggggtcgctggggagtccatgccttgtttataagggggtgattatgatccaggaaggtgcgctgcggtggattgtgttatgcaaggggtattgtcacaactcctttccgaggtaccgtggtggtattgaggcacatggtgacatgatgaggggttgtgtcttgtgggtacagtggtacacctctgatcagagtaaaactattcgaatagccgtgcccgcggttatgggcggtcaaacaatgtctttcgtgattagtctcacacttctcaccataatagaagatgctataactggtaataatttgattagctcctggtttggaatggtatattcctggtttggagatagaactgtgcagccgggatggttgttcagaatggttgggcctatacaacagggtatgttgtatagcgttggattaatattgtttaattacttaactgttttattaaattctcaaatgtttgctaaatgttgcttttgcaaatgaaaccctactatgccatcctttgttatcctgtgcacttgcatatttgctgcgtggcttgctgagtatgtcatatactcaccttgcaatcattcatcagaggaagagttctacaatgaggctgatggtgtggaggattaggtgtagccttggtcaagctgcctgtggagtggagccgtctgcgccgtttattttatttttccgctgcttagatctttattgattgagatgaactatctacctctgtaatgacattttattcgtttattaattagagtaataattgtactctattatcaatttgttattgtgtacctcggctgattcctggacgagggttcacacacatgtaagcgtttggaattttggatagaaattccgggcgtgacaagttggtatcagagcccccttgaccctaggttatgccaaatggttacccatagaagccctctaaaaatattggaaaagtagaactgttctcctccctttctcttttaattaaaccaaactaatggcacatgcacttcataatctcttttaatggttctcattcaaaatttattccagtgttattagtactgtacatctattactatattaatggctcattttccagcaaaagttttacaatgttgttttatttaatcttgctgcaacaaaataaatttagcaagttgattttataattttcttttatttcttttgaaacctgatgttcaaaagtacaaaatttgtaaccttgtttccaactgtttcaacttatcttgcaaagcttggtttactttatttacttacctttttactttgattttctaaactttattcaaatcaatccaaaaacttgtgctattaattggataaatgtcttaactccctcctttcacttgtctttagatgccgcgctacaagcctgagtacttgtttgatgttgagggttttgtccaggagtcgcgtacgatgtcctttgtcattggatttgggactgcccctttttatgcccagattcctcatgatcgtcatgaagagaagtgccaagtcaaagtcaccttgaacagtaatagtgaagatatcccctcagtgatgttcgaagctagaggaagaaactacatccatgcatgtcaggaggtggcaaggatcgccataggagagctccgtgatcgctacagtgatcagttggccgacactgagtatcgttaccatcctcgccaaccccagggaagtgaccgtggcagctaccttgagactgaaggaattgagaatgatgctactacaagacatttggttgagatgctgtgggctatggatgaaagtcgtgcggagactgtgttagcagctcaagatcgtgaagaccggaatcgtggtaagatttgcaagctagaagacaaggtggatcgtttggagaaggaactagccgcgttgaagggagaagcaccgccgcagaaggccaggattcgtctcaccgcaaggaagagagctctatttgtccctcgctatcaattggcgccaaaggtccgtgtggtggagaaagaagttgccccaaccctagcagattccccggtcaccatcataagtgatgatgaagaagaaggatccaagcgcaaccattccaagattgagtgggtagctacccaagatgatgaagacgagccgaacgagccttcaatcgacctccgatgctcggaagaactagagtgacttgttaagtcgttgtcttcgatcgttgtgttagcttgcttgttttaagtttggttgtgtgtgtctcgcatgtgatttacatcagtggtgggatgtaagtgcatgtgtttgttttcttttgagtgttaggaaggggggcagccgcctccgccggatctgggtggggcacggtcatccgccgctgagagcccgctgttccctgttgcccgccaccgcgagcccgcctctcctagtccactgccgctacgcgcctgtgccgtcgagcccgccgctcttggtcgcccgccgctgcatgcacgctgccgagccgcgtggtgccgccggctacgcccgcaccgtccacgcccgggagtgagaggtaagagagttagagaggatagagagatgagagagtgagagagagcgtagaaaggataaggatgaggatgggtggatgagatgaaattttgaagtgttgaggagggaaaagaggaggaaggatagacttgtaggcaggtttttaagaggcccgcatgtgaaaatcgattttcgcgtgcgggcattttaagaggcccataggcgaaaataggcttatttttttgtgcgcacccttacgaggccccttgcgaaaatcaattttctcgtgcgggcctcttaagggtccgcacacgaaaatgggaggccaatttttgcgtgcggacgtgaaaacggcctgtctgtaaactaagtagctcctcgtccaggaaaatcgtttctctaatactccctcaattccaaattgatctacatatagtttttaatgatctacatatttgtgttaatttattaggtctattcgttatttgtgcattggagtaaatgaacattgatgcatgcatccatgcacacaagtatttatagcacacatgtaatatcttgatttgctattggctaggaaatagtggggatggtgcatgtatcgagtttgttgctagagtaaatatagtattagagagttattagtttttcttgattttggtgtacctatgaaatatgttgatcaatttggaatggaggaagtagtgggcagtactgccgcagccaaactttgtttttggtgactggattatattcggtaaactattttcataccttaagtaacatccccttgtttttcatatcactaaaatagctatcaaataatttgaaaaaattaatatgatagatcaatatgaaatacaaatttaataaacaaaaataagtataactgagttctaaatgatattttggtcattttgtaaaaactacagacataatttcacgtttacctgatgtgatggcaaaaaagaaagagtattattgcacgtaagatggcatgttgttgaactattgtctatcaacggtattttacaatcgtacacttcagttctaattcaaaaaatttcacatacaaaaatttcttcaatggacacaactcacccgaatgtgaggctggtgttagttgattgagtcagcccattcccagagagttgattatagtgcacaagatcagtgacaaaggcgcctattgttgatccaccatcagcataggtcgcgatgaatggacaaagtaagcttgtgttgcattctggctgcacatccctatcgggcgaagtgcagaacatatcatcacatttcaccactttttaacttactgagctcctagggtcatataatgtcagctttttctgcacacaagaagatgtacgacaaaccatattatcattcagaatttcacatctataatgtacaaaaccctaaatggcaaaaagaatttttgcaaggtactgaaaaataaactctaaacctaccaatatatcgctcttgcgagggcattgcttgcaggggatgcagttaacccaaaatgcactgctgccagtgtccacctgcacatagtattccattgcgggtgtcccaatccctatctccgtgtagtatagtctgtgtcaaactctatcagatcgtaataagccaacctaccaagaagaaatggatagaaccaaaggaacattgaagcatataccctgtgctggatgtgctgatgccaccaaggccaccaagtgagaagtccgcagccacaaggcgactaagatggcggttcctatcgtgggtttgtaatgcacctatgtcactccccttacacccaccgcccatgatagagaatttgcggcgcacctggaataacccaatggccacggtaccacgagtagaggatgctaccaatagggccgaaaggattgctgatagaaacaaaggagccatctcttcagcaaagtatgtaccattcttttcctttatgtttttatgaagctttaaacagtaattcttggttcgtcatctggtcctcatccatcgcagtggactgttctatgagttttaatatgaaatggggtacgaacatggagccaaaaaatgcggggagccatgaacaggaaacatctagtggaagaagtcagcaattgttcgctgggagagtcagggaaaataggaaactacgtggtttttgcggttgagagtggaattgtgcatggggctacgggcattatgcaggccatccattatgtctgcaatttttgcacctattttgagaaaggctcccaggtctaagcttcttatctttaattatggttatgaaaatgccatgcatggctctctttctttttgggaaagaaactgctaatctatgataactaaagagtagtgattggctgcctaaactaaaatctaaacgtattactgcgtagtctatgaagttagaaaactaatcccaaaaaaactatgatcctggcaatctgactacctcaactgctagttggagagtggcttggctacctggactgctcaattctgttcagaccatcagcctagttaccatagacttgatgagaaaaaataattttctatgtcacaccatgccccaaaaattcacaaaccagaattccaagcagaacgtgcattaaaccactatccaggaacagctagggtagttgaactaagcatggctaagcaattcctaatccaacatctagtcatgttacatcccaagtttacaaaggaataaggtacaaaaataatagggctgagaacagtaggtacaacatcccatttagtaacattataaaacaatgcataacttaaaggaaaacatagagcatttgcaatatgggatcaatatattcaagtgacaaggatgacttgccttgctctgcggctagagggaccttggcgactatcttgaaatacaccggagcgttgggagagccgaaatctatgtgacatacaaggcaaacaatacaaataggttataagactactaaaacagataacaaaaccatttttaatggattcttcgctttttttttgatttactgagacttgaatgggcttaaatggagcacgaatgaattgtcaatgaattttagaaggttatctgtgtttttactataaacaaaaaaagccttaatcgatttattgcgcaataaaggtcctggatgatgtcatcggagaggggtggcgctgacaggtgggccccacatgtcaggctcataggtcataggctcatggtgaaccaagtccacggaaccggggatgggagcaccacgtggcgtcgacgtggcggccacgtggatggcctcgtgggcggcagccgaatggccccgatctaccgagtggtagatcggatggctgggaacgcatggcgatgcacgggcatggcttgagccagcccggtgggcatggcgcacgacggcgctagtgcggagcgggcagcggcaaccagcggcaagggatggcgcgcgacggcaccgcggctagcggtggcaccatggcgacatggcaccgcgatgcgacggcaacgcgcaagcggctagcggcggagcgacaaagagagaggagaggaaggggagggcctcaccgatcacaaacaaggatggtgagtgacggagggaggtcggcgaacagcggacgacgtcaggagagacctagtgtaacgccctgaaaatcgctctaaatttaaatcatgttttaatgaatttctagaaattttaaaagcctaaaagagcctccaacaattaaaattcaccaagatttatatcaaattggcttgtgggtattattaataaattccccatatctcaaaatgtttaaccaatttttacttgaattttcagagcatcctaaataattttaaggcaacaaaacaattaaagaattttataaaatggaaaagctaaaagaaatcctcttcctcctgttgggttgtttccagcccatctctccctctcttggcccagcccagccgccccctctccttccctctctcccctccccctcccaatccttgggccggcccagctgctctctctccctcggactcagagacaggggtgttccactcgatgacaggtgggtcccacccgtcatccctaacctccagccctctctctcctctccggccgaatctaccacatgtccacctccgattcgcctcctccactcgccgtttcatcaaattaattgaggggaattaattcccgccttatcctctccaatacccccataattttccactcaatccccgtttattcgtggtggattttgatgatgttctttaatggtgagctccaccatggcctgcgtcgggctcccatcggttgcccatttggcccaaaatagcttatttggcttattagaaaattaaaattaatttataagtaaaacttttgtagatttgttcgtagcaacttaaaagccaacattaaccaaaattacgttaaaagaatttcaaaatcaacttcaaagtcaagtttaaaaattcaaattttggcttattcttttactgtttaggccaaacgatggggctgtcgatcgccctacccggcgtctctctccctcccctccagcctataaaaggtacccccgactccctcctctctcccctcacaccgccgccctctccctctcctctctccgcgccgctctcttcttgtgccgccgccgtcgcaactccggccgcccctcgccggtggtcggaacctcattggagcccagcgtcgccaccatctgcttcgccgcttccttctcttccccgtcctcccctccgtcgagcacgaggaccgcgggaacgatgacgacaacgacgacccgaagcttctcgccgtttcttcctcaccgccagcaacaccgccgacctctcgccgccgcgtctgctcggtgagaaccgtcacctcctcccttttccgtttttcctcttcccgtgctccgttgcaccatcgccacgccgttggccgttgccggcgtgccgcctggctcgggtgcttctccttcctggccgtgcttgtgcgccgtgagccgccctcatggtgtaccgagcggctgccaaatgggacccgcccgtggaccccctctctctcttctctgtgcaataaatcaatttcctttagaaaaataattcacaaaattgcaaatttccatttaaacagcacctaaacttcaaatggccatatcttaaccgtttgaactccgaattaacctgttcaaatctctaatttctcctaaaaatgagtagatcccattgatgtgccttattgcttctgttcatatggtttttattagccttttttatttcttcgcgttggtcgtgtagatcctgccgttccagaagatcagctcttcatcgccgttgacgccgaagactttgtgagcgatcaaggcaagtcatatctatcttgaacatgttgaatcccatattgtgaaaattatgttgttttacttatattgcattgctttataaattataatgttcattattaatattgttttattggttattcctatgctctttgttatggccatgttattgatttcatatccatgattgttgtgaaccctagtaaaattataacttgactagtctagtgccctacatgatggactgactagttgctttaggtaaatgcttagtcctgcttagttccaacttagaacttttggataaactagactatggtggttaacaactaaaactggattagtattggactattgactggtttgtcaatagatgggtgataaaattctttgtgcaactaaaacatctttttgggctgggctcggggtgcaagctgattactttggtagtcgcaccccggctaatataagaaccggtctttgggcctctgttgcaaggcatcttcgtgcaaccacaagtctagtgggtaagacctgactggaagtttagatcttctcaaaacaaagaccattggttggaagggtgtggggccaagattaaggccgttttttcaccgggcgcaagggggggcctgtctcatcccgggggatccggcaacctttaccttgtcggggaccggcgggcggcgaaacctcagcaggttctcctgttttgggtagacctagatggatagtcttgtcacgacctctatccgagtaccgtggtggtacccggcgcgtggcaacgcgtgttgaggttgtgtcttgtgggtaaagttgtacacctctgatcagagttaaaaactattcgaatagccgcacccaaagttacttttgttttacaaaaccttgggagggtgaaatcatgatgatgtagtcatgtggtgattagcctgggttaaggcaggttcgttggctcatgagaccttgatgatattaaaatattggcttagaacaggatcgtgttttaaaatgagctttaacctgattaaaatgtttaaactatggctttctgcaaaataaaccctattaggccatttttcttgttttccctatgcattattattgcatttccggtgtgacttgttgagtacggtggtggtactcactcttgctcacaaaaataatccagaggatggacctgagaaagatgaaggcttggatctctagttcgctccgccgtcgagtgcctgtggctgctgctgttccgtagtcttccgctattttatttgtttatctttgagcgtgaggacctagagtcgcccatgaaataaagtacttcctttacgtttccgcaaataatcaacaatgctatgtgtacctcgcctcctgggacgaggattaatgcactgagcgtttggaaatggtgtatatttccgggcgtgacacctagggaacacaatgagaggggctagagggagattagaggtccgtggtaagctagggtgtgccgaccaaaggcggcggccatggagagctcaccgacgtgaggggagtgggctccggcgacgaaatttgacggcggaggggtggactatgtggccctcgggcttgcgaatccgacggcatcgacggcacggcccgacgcgacggctagcagcggctagcggcaaccggagtgtaggaaaagtggcagtaagtgggtgcgacggcgctagagcggaggaaggcacgagagcgatcagcggaaaaaggaaaaagggagaggaggaggaggggtccatttatataggggcgggaggtcaggaacggccgggagtggcgcggattcaccggcaaagtgggggaggtacgggaggagagagagaggtgggattcaaaaattgaatcctggccgtttccagcgcaggcgtgggccggagagggggtagtggggtgcggggagtgggtggcgtgcgcggggcgaggccattgtggtgcggtggaggctggacgtggccctagaacagcgggagcggcagttgtgggaggcggtggcggcctccggaggttgggggaggacccgacaggtgggccccacctgtcagcaaccccaggagacagaggaggggcgcgcgggctgttgggcctcggcctgaggccagcccagcgaatgggcgctggagggaaatgggccgaaggcccaagaagaagtaaaaaaggaggaaaatgaaaaagaaaaagggaaaaaggaatttccagggattctttaatgcttgtgctcgatttaaattgactagtcgccaacccgtgcgttgcacgggctcatattattgatagaataaatgataaaatttttaatcacacgctaaatagttggttacttacaaaattacagttgcttgatcattactaatttgatgttataaaatgaaattattaaaaatactaaatgagagtttgcgatttgtccaacttagtatttattaattttgaattttaaaattataacaatttatacaaactaaaaactaaacaatccatggtattttcagtttcatgttttatttaacacaaattcatgatacacatatggatgatcattacattccttaggtcatatacatacatatgcgttttaacttgcagttatattttgttgtgtcaagagcaaaactttcacaattcgaaattctctatatttataaattccaaaaagggattagaatgaactttatttcacaattttaaatactttatttagtatttcattacttaaattactttgtcaaagaagttcaatagcaaactattggtccaacagttaaagttttagacatattttttgcaagcatattaaaataatgttagaaaatactatattatttatacttaatatatatcttttaatccttatttagatgcattaattagctgctgttgtggaagtcggccttaattcaatgttttatttttgtgttgaaggataaaaaactaatgcaaacaataattattctagttgcatgtagaaaattcaagtatgttgaatccgtaaaagaaaaatatgaaaagattattgctatattccgatcgccctaaattagaggagagcagcagcagcagcatgggcaaaaatgcgagtatgttgttagtgtgaaaggaagagtagaagatatgatgagtatacttcagctgcatgaatattggcgtggcctaggccattcaaagtgcttgaaatttatgtacattttggagtgactgaaaaataggcagactcatatataaactattataaccgagtcaaaatcaaataaacacttggtgcactatcataagattcagtattgctaacttaatctccatgttttgaggtggctttgtatggctcgatctatctatgtgatcgatgttagcatttgccaataatcttttttaaacaaagtatgaagttaaaaaaaaaattgcacggactaaccttgttggattaagccttcaacatcttgatcctatacatgcaccatgtgtctgtcttagtccgtccatatgattcagccaggcaattagcttggctgatggatacggactgaaaaaaaaaaaagatagacatatatataacatcagggttaatcgataatcaatggccttaactgaaagcatgttgttaacaaattaagggtacatctctggcagggatagtcagccttgcgctgagcctctcatggtcaaatccatgattgtttttctatgcgctgaatcaatggggatacggagaaattactcacaatgaatcatgcatacatgcatttgcctgcaacaacagcctgcaaggacatggccgtgtggtcagcgtacatcgtcaccggcatatgaagcagcggcgccctaggctcgcaccgagatgccacagctttggcaggcgcggacattgcagcggcagaagccgaggcgactcggcgacatcgacgtcgagtggcgacttgatgtgagcatcggcgtaagctgcatcgatgctttccatagacgtgagcggcttgcctgaagaattaatcgtcttgccgcgctggctttgattccttttccatgtctctctattgacgcccaaggtgttgcatgcttcgttgattttcttctcttattgtgttgtgaattatagatagatctaatcatgtacttaacgctcaacagcaacagaaatattattgcctctcgcatatcctctcttatctgttccttcgtgaggtggtgttagattggtttaatttacacgtggcccacaaagttaaacacacatggaatttacaatctacagggatgataatatcatttatttaatcaatggccagatctttctgattaacgtgagagttcgtagaaagtgatttaatcaatggccagatctttctgattaacgtgagagttcgtagaaagtgcccaattagtataggtatagatggccagatctttctgattaacgtgagagttcgtagaaagtgatttaatcaatggccagatctttctgattaacgtgagagttcgtagaaagtgcccaattagtataggtatagatagatagatagatagatagattgtatccaatgcatacatagattaattaaatttaattgaacttactcaattcgaagcataatgtcacggatcttgcttatccaacaacttgtttgtgtttcttcgatttgtcctatgtaagatgctaagccaacaacatctgcaaaatgaaacggtgaaggttatgtatgtgttaattaatttggatgctagtaaataatgtaactaaacaacatattaccagataaatatgttttgctgtatactcttttggaaagactctcaatggttgaaaatctaaaggtttgttctagttttggtttgttttctagggttttgatctcctgaactttggcagtgttttgagaagttgagaattttgtcattgtgaactggacgatattctgctactgaagaaaccttgaaattagatatcatggacactgatccttcttgaatgccctgaacctattgacctgaaatttctttacagtagcatgcatcatggtgtcattcaataaataatataagtgagaaggcaaatgtaaatatcaacattatttgtgagaagaacagttatgctaacctcttcatcaatcagtatcatgtcaaggctaataagctcgttgctgttaggatttatggcaacccaaagtctaattacccattgttaacagctttccatgtttccttttcattgttaacagcttgaagcatatcacatgccattgtagttatccttcagttttgataaaaggaaaaataattttgaatcaggcaaccaatttatatgtcaatgggaccatgtagtaagtgagtctataatcagcaaaagttgatatgacgacaacggtttaagcaaatgaatataaaaaaatgaatattttcggttttgatgaaaaaaaaactctcaattaggctactatataatatctgtctatgggaccatctattaattaaactacttattaggaaaaaggtgatataaggatcataatccaaatatattttatctgcttcttctaccattaaacacaacctcaaaagtcagaagtgcgctttctttattaggcttttaacctagtagtttgttaatatagctcaacagcaatagtgatagtgtctttggtctattattgcgctattcagaaaattaccagtaaattttaacttctagtacaattagataactcgattcattgtcaaaatcacaatcggtaacatagcagtagaatatgttcgtcagaatagcaaacagtccattcaacaggcaaaagatcagcaaataattctttattaaaatcaaaatcacaaatcgagtcccagtttcgatgaaatacctttgtgtattacagatgcggcggagacggatgcaagtatgctcctttttgccaacgcaacgacaaatatgcgatagttgggaaaacggatgaactgtggaacaaacatactgatccctgaaatttataggattattaacgatggcgaaactgagtcttgtacggatcgtatcgttgcacatcagaaatcaaatttgattaacgaaaagaagcaccctatctggagttcaaatcggagtctagatcggtattgttaaatatgagaaactgatttagattagggaagagaagcaccagagttccagtcggagacggttcgctcgttgataaaagtcatcgccgcgagaaccgatgatctccaactcgcgctcgccgactatcccgcgaacggagagacggagagctggatgcggcgcgttgaagataaggtcgaccaatgcttctcctgcttcgttgaagataaggtctcagtcttatctgcctaaaatctagtaaatgtgcttgtatagttacgtagattttgatagaacccggcccacaaaacagtttttagacgcagctattaatccaagcccacatataactaaaactaataaaggcagatcacgtgaaaaatctacggtttagattaaatcacttatttaaccaacggtcaaaattctctgattaacgtgggagctcgtagaaagtgtccaattagtataggtatagattagaattatctccaaggttttgaaaattccattaaaaatcatgttagcctattttgacatgtagaactcaagaaatattccacatgccattttttattattatttgcatttattactttagagtttcactcttgccattaaacaattgattttcttgcaacaatttattaaattattttaggcttaggagaacaacttcagggtgtgacaacatcctaaccttattgcaatcagttatcattattcctaaaataaactaatatatgcaataacagtttaaataataatcgttagcgtctaaatttattaactacaatcttgatagatctaacctaactcagacaatatacactggtagagaagtagtttgtagtcccagtttgcaaccccaattagtcctgggttgcataccaggactacgaatccgggactaaacatcactatcttaagtcccagtagaaataatcgggaccaaaaaagcatcaacaccaactgggacaaagatagtagtgccatgtgaatggaaacgccaccgcactccccgcgcgacggccgcgccggcctccgtcgcctgccaccgccaggcgccgacctccgtgacgtagaggaaaagcagaaggggatgagggaatcggaggaggaggagaaggagatctcaagaaggagtggaggaggagaggggataaggaggagcggcgtgtgcacgggtggcgctcgtgtagataaaggaagagggagagagagcaagagatgcccaagatgtgggagagagatatttagtcccggttggtatcacccaaccgggagtaaagttcgttgaccgtgtgacatggtctgacggttattgaaccaatactaaaaatgatctttcatcccggttcccgattgttgttaccaaccaggataaaagatcaaaaagtacccctgggcttttgaatcgggagtaaagatattttttagtcctggttcctattctaactagggctaatgtggttttttgagtaaccaagcaaaaatggtttctccatgcagcaacagggccatgcaaaaaaaaaggtcagctcgatctttagtcccggttggtaacaccaaccgggaattctacatatgtattgaaacatatatatgcatacatatatatatgtatatatatatattatattatattatatgtatatacatgcataatatatatgtatttatacatatatatgttatgcaaatgcatatgtatatagatatatatatgaccaaaatatatttacattatagaaaatgtgtacacatgcatatagaaacatatgtagtcatgtattaattacaatccattatatgtcctagctagctacgatttctacgtagtagtagtcgctgctagctcagaagctaaggaccggtgaattgtttttccgtcgtagtagaattcacccttgggatcaaggatttcttcgttgatgaatcccatgagttgttcttgaaccgccacgataaattccttgtgtatggtcaggttatccctcatgcgaataaactatatgaatgtatgaaattgattagtaattaaacaagaaatcgctacgtaatgaaattttgaatttatttgtacgtacatcgagctctcttgtggtgatgatttgttctgcaaggcagtggcaatactcgcacacgtaatagccgcacaagttagttccctgcttttgctttgcgcactacaaataaatgacaaacaacgagagatctaattaatatacacttgtatgtatttgaatcggagaaatataaatgtagagcatgtgtactcacaggaaatttgaacttccgcctaagtctttctctccatttgccgcggaccaaatgacggaaccgataccaagccctacatggagtttaaagctatgattcgtagtagcaataattaacataacaagattttcttaattaacaaaggaacttatgacggtacctgtctataagttcgaaaaccttgtcaaacgtagactcttttttatccattgagtcatatacgttgacggtgcaggccgacaggtcgaagagtaaaagcacccagtggaatctgcaatgtgcgtgggatgcattacatatgaaacacttagcaagttcgtacgggaatgaaatttggtatgtaggaagacagtaaaattaaactaactctgtgttgtacggcaacagtatgaacgtcttgtaatgctgcgccttcaggagatggacgagattgtcctctgtttcttgtggatattggtcgagcattgcgacgtttactttccgagggtcgatgaatccagtatcgaaaaccctccgccgtcaggccctttgaatctccattctacaacgataaaagggagtatattattttctatagtctacttatatacaaggacctaattaattaaaggagacgtatagtaagaaatctaactgaacgatatacttacaaaatccagcaactcataatagagacgtcgagggcgtccagctggtatagttcgtagattcccctgaaattgatccagagaatgtcatctccttgcaagaagtccgtgtccctgatcctcgctccgatcatctctctaccggtggcgctcatctccatgtacagctgatggaacttgtacatttgtgtgggtagggactgcagcagctcaggcttgacaagcggtttaccgagttcgtacatgtatttcacttccgccttttcgattggtgcgactcctagcaattgatccgtagttagaccggtgtcagtaataaattgttctatcgtcatttctttaccggtcaccaacggctcgatctcctggtttggttgctctccaagctgagggactggtttggactttccagaagatgctttcttcagcgttcgctcatagtccgatagcttgatggcctccttgacagatgcagacatacccctgaagaagttcctgacactggggtctataggaatcttcttttctggacttcgaggcttgaattgtctcttgacttctgatgcaacgtaagcgtcaagctcctcttgcgtgcaatcgtaccccgggtccttgttcttggcggcgtcaactttcgccttcttcgttgcccttgtgtgggtaggcggtggagctgggggggcccttgactttgaaggtgccggaagaggagcttgcgggggagtaggtgtaggagcatgaggaggagtcggtgcaggatcctgaggaggagtcgatgctggagcctgaggtggagacggtgctggcggagcatgaggaggagacggtgcaggatcctgaggaggagatggcggagccggaggagatggtgcacgagacaccgcttgtcgcccagggaggatgatgtaccgcctgcgccatagaataatggcatggcatgtgtctcgtagatgcgtctcaccgtcttctccagggtaatccagctcgaggtcctcgtacgcgccttcgaccaactcaacttcgaccttcgagtatcctgctggaatcggcctgcagtggtaagtacctgaagggtccgttgggatggccatgcccgacgccaccttcatgttgtgagagattattttttagtaatcaacatatataagcagcaactagcggaatggctaaatcttacctttattgataagttcttcaaaggaatatgcagctcacatggtgtccgctgagtgatgtcatcaacgggacaggtcgattcatcctgtgtttgcatggcgtccatgctctgtgatcctacctgccccgttgaggcgcagctgctacggtttcctgacgggctcaccattgcaggaggaatggtcggctggggatcatgggaccgatgtgcggccatgcgttcatcaaccttccttgccacctcctcttgcatgttgagttcatagctcgatacccggaactctagctctgcaatcttcgcctcggtatctctcttgctcctcatccgactcctgtacgtgtggatgtcctccttgaaaccaatcttccaaggaatcacccctttcccccgtgttcatcctggatgctctggagtctgcagggcgagtgtcagctcgtctctatctctgtctggtcggaacgtgccctgagaggaggcttccactgcatctgttagtcgtcgtgcagcctctcgtatctgatcgccgaagaccagtgagccatcagctgggttgagcgttccaccgtgagcatagtaccagaacttcgatcgttccggccaattggctgttgccggttcgatacccctctcaatcaagctagcctccatctgctcccacttcggcatcgcgacgctatagcctcctgaccccaagtggtgatggtacttcttcttggcggcattttctttgtttctttccatcatcgcctgcccttgttcacctgtcttatatgcaacgaactcgtcccagtgatcccttagctttgggaatatatcgaagttcggtgtctgccccttcagtatatacttctggtacagatctcccttgaagctctgaaactgttctgccattttcttcagagtccaccttttcactttgtcctctgtacccgcaggaagggtgaatgtctcgagcattgtggtccacagcatctctttctccgaatctgggacaaagctctcatgatctccgcgtgcccttgttcttcgccagtacaccgtactgacaggcacgttatcccgcacaacccaaccgctgtgatgtacatagttcttggcggcttcggccggggcactaggacgtccatcttcttccacttccgttatgatgtgccgaccctcaagctttttcgctgcacctcgttgcccacgtgccctcttctgtccaacggagggttgactaccactagcctcctcctggttcccctccacatccctttccacgtgcccctgctggttcccctccgcatccctctccacgttcccttcctcgttcaagtactggtttggatcctcgttcccctcttcttcattccagtactggctgcttccctccgcgattgtatcgtacaacatctgttcctcatcgcggtcagccatctgttgatacaagaaacatctgctaagtcacgagacatttatgttttaacaatctaagtcatgtatgctaagtgtaaatgtcgtacattagaaccatacacaaccttacgtgctaagtctaattacaaatcgtgatataagctaagtctaggtgacgtatattatacaaccctagctagtaaataattatatactaagtctaattacaaataaaataatcttatattaaaactcaaataatattacatgctaagactaaaatagtcatgtatatgctaagtgtttcgtgcgtatatgctaagtctaattaagactacaatagtcaattgctacttgtcgcaccaattccgtagtcaataattacatactaagtctaattacaaataaagtaatcttgtattaaaactcaaataatattacatgctaagactaaaatagtcatgtatgctaagtgtttcgtgcgtatatgctaagtctaattaagactacaatagtcaattgctacttgtcgcaccacttccgtagtcaataattacatactaagtctaattacaaataaagtaatcttatattaaaacttaaataatattacatgctaagactaaaatagtcatgtatgctaagtgtttcgtgcgtatatgctaagtctaattaagactacaatagtcaattgctaggagtcgcaccaattccgtagtcaataatgtcatactaagtctaatttgcaataaaataatcttatattaaaactcaaataatattagaacactacacaatcttatatgataagtctaattacaggtctaataatcttaattaattgcattacaaatataacaatcatttatattattatgtcacttgcctactccaattccttctagggctagctcttccactcaggcttgacggacgactccgacaacacgtcttttctgcaagatacaaaaagatgtattaggataaatgcgaagtaacatatatatatatatatatatatatata

SEQ ID NO: 5952 - DNA, 72504 bp, Oryza sativa
  unsure (1)..(72504): unsure at all n locations
agaccgtttcaatgcaccttgctgacatcttctgcagttcttggatcctatttaggaacattagtcaggaagccacatctagctccactgaatattctaaaatggaatgacaaattttttataagaatatatcatcaaaaaatgattactgaagttaaggtatttatgtttagtttaccatgtttttaaaatcatactgttatggtgatcccagtataattccattggctcttttttttatgcactagagaaagtttgcaattgatgggagagctaagagttggcttctccatcagttagatggtaaatggaggcaatacaagggaaaactgaaaggaaaatattacaagcctaacttacctatggaacgagtattgcaaacggtgcccaacactgttgatgaatctcgatggcctacactagtttcctactggtactcaaaggactctaaggtaaatatatgttgggactttttagtgagtggctgtcattttgaattatctcagctcatttaaatgatgatatatattgtattgttagaaaatcagtgacagaaaccaagagaatgcactcaagcatccacacactttaggaagaaagagttttacaagaaagagaaaagaactggtaagtcatttagcacttttatttgttaattcattcttctatttcctcatgcgtttgagatttataactataggaagttaatggggtggaggtggaccgagaaaccttctttgatgaatgccataagacaaaagatggtagatatgttactgatgctactcaagaaaaaatggtactaacatatctttttttaactgtttgtacaacaaaatacactatgctaagagtatgatttttccaatgtagaatgaggtatacatgaaattggctgagaaaagagtagatagtcaacaactcactgaagctgattttgaacaagctatgttagatatgtttggaaaggatcatagtggtagagttagaggcatgggtccaaccattactcctacaaactattatggtggaaggtttctgaatatatcagcaatcaatgaacaaggaaccagctccagtaatgtcaatgctttcataagttagttttatggtctcatatatggcagagaaatatcccgaggacaatttgttggctaggctgccaccatcccttactaggctcatcccaacaagtgaggtatgggcccaagattactagttttaaatgtagcaacttatatgggcatatgcataagcttggaaaataatgcattcatggattcattttcaggttaatcaaaaccaagaagttcaggcaccaaatactgcgccatctcccagtcagagagcatcttctcagccttcaactgaagaagagtgaagttatagatttacagtggcaactatatcattccatactacttgctgcattaggattttttttagttatcttgtttaacaagctactgtttcactgttatcggaaataatgtttaagcattttcattgggaacaatgtatggatattacttgtttgtttcaatacgaagtactggtgctaaaaatcttgttgtgatctaatggtaatttaatctggtgatattgttttatgaattttatgaataaagttgtattaattattctcgtgtaaccaacactgctaaggacggtattaaagtagagatggttttccatgtgtctagaaatttgatttgaatttcgagttatctatgtagcgacggttccgaccgtctctaactatacgtatggcttttcaaaccgtctctaatcatttgacacaggagcaatggcaatgcctctaacacggttgctaaaaccatctctaccacaattagagatgggtatagccgtctctacagtgtataaaaacccgtctctagagactgtttgtgctgtaatggtttaggaaccttgatgacagtacaaatttagggaccgcctgtacaattcaatctttaaagtttatgggggctatatgaactctttcagtttgcattattgctattgcctatatatatttcttttttagatgattggcaattgatctaaccgctatgtacatcctcttgcgccacaaatagtatgcgatatgtatagcgtataacacaatgaatccctccaaaatctcaaggtcgtcgttcacaatggctcatacataccatgatgttttggactaggaggcatcaagaataggttatgccctttgcaattaatcggctgctacaggtatcccaatagtacatattccacggcgcaagcagtttaactgatttgacaattgttgtggcagtctgccaacaaattgctatctattgatatgccatgtcacgtcattatgcaaacatctaaaaattctcaccattggaatggcgttatgagcaatgatcgtcgtactccttcgctgtcctgtcactttatttcagatacttgtaaccgtataatctaacgcagagaaggacgacggtcgcccaggtgaagaccagcgtcccaagggcgttgcctaacctctcggtcatcacaaccaagtgaacaaagcgattcagctgcttctctggcacgaccatcttgttgccgccgccttcgaattcgccctgtacgtcgtcgtctaccactcgaatccgggcgctctgctgctcgccatgtctacggctatagtcacatgtcttccatgcttctgctaattggcagtagaaatcgtcgacaatctattatgtatatgatgcgtaactaattcaaattttccctttaatatgtgaccccgttgactttttatccaacgtttgatcattcgtcttattcaaaaaatttatataattatcatttattttattgtgatttgattcatcatcaaatgttctttaagtatgatataaatattttttatatttgcacaaaatttttgaataaaatgaatggttaaacgttggtcgaaaagtcaacagcgtcatatattaaaatacggagggggtactattcatgttctttctcgagatacaaaagtattggacaataatactgtagtgacagcagttagacctgcgtggttaacatgtcttggagactagctttgtaaaacacaaattacatgtatgtgcaaggaaaacctgtgccattttttcctgactcatgtagtaggacatgaagcctcatgctcttacgtgcaattgagctaaaccataaatggggatttaaatagtgctgagtcatagagaaacatatactcaatttgaaagtgctgatgaatatggctggaaccacacaaaagcttaagtgcctatagcagtttgcttgctactagcgccgttctctacgatccttaaaatatcatacactttgtgcacaatcctatatttccaaaacttgtgtagaattaggacccatcaggattggggtggctccagatatccattccactcgaacggtcacacagggatcgctggaaaaaatggcacgatgttgagaacacctaattatgttggtatggtaggaaaatgatgttcgaagaagatgatgaaacagaagatgactgaccatagcgaaacacatcaatcgatcggcactcatcatctggaagacgcggcgcggtgacaaccagaatcgtagcattgatcatgctcagaccattaaacgattatacaccgtggggtcaccatacagctatgcaagagatgatcaattggatttaaaccatgaaatttcatatggcagtagaacaatgattttgaaggagcaaactatataagattactccacgatcgagtacaaaaccgtggtgagagcgttgaagagcaaagcaagctacttttgtgaagagattaattaatgttgagaagagttaattgcattttcatatactactattttagtcgctcaatcgctgaagacgttgtgccattgagacattatcacatcgttccacatgttgtcgtttggtaatttgatcagtacaactttaccaattgtgtataaaagaatggcattccaatttttgaacccactattttttttatgtaatcatggcacacgaatgtaaaatggcctacatttatacttcctccgtttaacaatataagtcattctaacatttcccacattcatattggtgctaatgaatctagatagatatgtatgtctagattcattagcaccaatataaatgtggaaaatgctagaatgactttcattgtgaaacggagggaataactagtatatatgtaataattaagatacgtgaccatatataaactacgtaaacaaacagccaacttcacaaatagctcgagggccttctacacataagcacttcactcttgtcacacaaaacatgcaacgctaggagcatcctcatatacatccatctttatttccttaagacaatttgcaacttactagcttaggattgggaagtctctagaattttcatatatatacctgcacagaatatgccacagagctgcaatttcatcatgagaagcaaatcatcaatgtcactatccaagagtggttgaccatcaattactcccacagatggaggaaagtgagtagtatcttgtggttttggagcaaacaatacaaactggccattggtcagtttttcatcaaaatgaatgttcatcatcaaaatggatagcctgaaacgagtgcagtccttaagagctggtttggtttgagacctaaattaggcttaccaatatttggcaattttaatagtgtttagtgtctatttggtttgaagccaaatttcggcatgcctaagaaaataggccatttcaatagtgaacttaggctattttgacttcaatccaaacacaactttgccttatcaaaattagttaatgccaaaacttaccaaaatttagcactgacaaaatttggtaaagtctatttaggctacaaattaaaccaaaccaatcctaagttacagtcaccactgtggctagctgcatgtttggagagaaaaaaattaaattttttttcctctccaaacaaaatggcacgcccagtgggacatggttctcctcctatctttgctgcgcacaaatggtcgtcgagttcttcttcgctttcttctccgacaaacatgatggttgatgaagacctttggttagagctatttgtttttcttcttatggaacggctcccatcaagaaaggggaatccagtgaagacaacctggttgcacttgtttgtgattttgaatgcagctcatggaagtgctcaagttatcaacaagctcaattgggggcaatcgaggaatttcttacaaatatttcttcttttgggaagtgagagtttctagcccaatggagctaacaaccacggtgtggacactagcattttctagctgcaaagctggtcatggtgattgctggtgatgttaatttggagtcatcaatttgggctcatgtcagtagcgaatatactgccatagtgctacagtttcatttcaccggttctcctcccatctttgatgcacagaaatgaccgttgagttgtccttcgtgttctttctccgacacacatgatggttgatgaaatgctctggttaagagctactttcttctgtaatgataacaacccggtggcacttgcgatttcgaaagcagcctcataggttgtgaagtgctcaagaaatcgagaattcaagatgctcaaccggggcaagcgaattcgtacttaaatttgtgccggggagcatgtcaaaattctctgaacttactaccatgacatgaacaccggagtatttagttggacaactggccatgcatatatcgataaagccatgcatgcagctggctgtgaaccatctcatctccactgtaaaagggaggccatctcactatacagagagggcagaggtagaacacagtggcaagagaactgatccatctactcatccatagctggtgcgcttgcacatcaccggcgcccggccctgcagggaggtagaggccaaaggaggagaaagccatctgcggcgcacgcgcacacgccggtggctagtagaccatcaactttggcattcatatacaaccaacacatccatccatccatctattcctatccagccgcaccaacaatacacaccgaccgacggcggagcaacaacatgtacacagccggagcacatcggccatggcgagcgacctcggccgaagcaccgcgtccggcaggaggatgagcgccctgaccatcagcaagcacgaaagtgagatcaatggctgcacagggtaaagctaattaagattgtttcctcctccttttatccatggcacacgtacatgcataggccgatctatatacacacaccgttgttgccggaggagtcgccgtggacgattcatctacacgccacagaatgtcgtcatgccgcccatccgagtcgacgagatgctactcgtccttggagtcgacatcgcccgttcaagtccttggcgacgtcatcgagaggccagacgtcctcgctatggtgaggcgaacttgccacgttggagttgtcgtcgtgctgctcgtcaggggaacctgcccttcgtcacatcggagtttttttttttctccccatcatgtcaagagcgaagctatctgtccatgatgcacgctctctccattgtcgctaccctgctgtactacgtcgagggtcgttggagccgatgtggacgtcaccgagctgcttgcatccacaatacatgagaccttattgccattgtcgagcggatgaggcactgtcgaccgatcatcatccgtaggaggaggatgtcgttacgccgccctaccggagcagctgcagatgtcgccaagccatctccctcctcgtagctatgttgtccacagcaccgtggtcaccgagtccgccgctaacaagcgggcctcgatcttcttgtcgtggctagcccacggacatcacaatgtcgcttgcaacaagcctctaggatgcatatatagcatcggcagtgttcaactcgacatgtctgagtccactgctacatcatcaaggccaacttgcttctttcatctccactgaacagagaccctcaatggtcatgccaccgctgacatccatgttcgccatagaatcaatggtgacttcgtcacactcgccaaccccacggtgtgcaatcctcacactcctgttgttgcaggtttattagctactgctagcatcaacctcatactcgagatagtgcctcactttgatcacttagcatgccactgcccacacatgtgctgctgccaacagctcacggaagccgttggtgatgctcacaaattaatcaccaccaaaatcgtcctgacagccagcatcatttatatatgcaccaaggcatcgacatcttggctgctgcctgtgatatactcaagcgtctcaccgctgtcagcgccgtcaccacacttgagccattgctggtattcacatgaccgcctcaactgaagagttcaaacctgtcatagtatccggccttgacctccatgatatcctcgtggtcgccaactctgccgacgccatcaccggcgtctccacgactgcctccgatttcgacctcaagattgtcatcgctgccggtacagtcgctgtgctgctggcaatgtttccatgctcgtgaactcaactagagcgcacgtgttgcagctggtgtctgcaagatttccaccggtggttcctatcgctattctacgaggcgtatttactttgctatgtgttggcaaggcaaaggcaatccataaggcagaagagtatatttattttgtagcagtgaggtcaaattccttgtgctaaacatcagcaaagcaaagtcatgctgctcttctaacccgagatgacgtcgttcatgtgagttggatggtttgcaaactatgtattgccaaccaatgcaagttaccaaagtcatatggaagctaaatgctcatgcctgtgtattttccatcaaaggtataataaaagtgacacatcaatactccaccaatgtcaggaaggctttctcccatacaactctcagtttgtctgagctacatgtgaatggctccatcccattctctatatatgtacaaatataagagcaatgcaggactccatcaaacaatccagggttctgaaccaagacgattgactcacattttcttttaaaaaatgattaatcaaatgatctgtcattgtttccatgctttctgctcaattcatcatatgagttgctgaaagcatatactagaacggttttgatcgtgaggtgcaaaaatttgactgctttgggcctcaaaaaaaactgtcgacagcccaatagctagttccatactagaaaggttgccatttggttgtactatctaagagaaactgttgatgccgtgctatgcgtatacacttgcaactatcactctagcagtgccatcattgagacacatctattgattttgtgtctcttctaacgaagcctgattcccatacgttcataccactgttcaaaccatatacacggagaccatgacactatgtaatggcaatgaaacacataacaacctcattctcaagcatttcaagattattcaagctatcatatactcgctgctgggtggccacagtttttttcagtacctagcttgtgctaaagccaagctctctctcattcaccacccaaggcattgaacatatctactcaagaatatcgcccaatccccatgaaaatgcagaattgtagaccaatgctcattttttttgtccaatatattctcctcagacaatggcggaagcgctatgcaattatagccttcattttctaaaaaaggttcttttacaacattccattcagttcccatatgaaacaggggcaactggctttctctatatcatgccatgctcacgactgaagatttggttgccctaggacttgtccaaaactaatcaagaaaaagaatcaatctactttcatcacacaacacacatgtcaagcagtggctaccgggggcaatggaaataattgctcggataactaccgattagcgagtttaacatgtccctcgttttctcaatgcgtctcagaccggtggagacacaaaaccccaggggaagactatagagataaagagcatgaaagggctacctgtcccaacataagttgtagtgcagtgtgcagccacttgccaaccctgcgaggtgataataagggaccaaaaaaaaaagcctgtgaggggttctttagtcacaaaattgaatggctactctctgatttcccaaggggatggttctccgacatgtcatatgaagaagtacaattattgaaagaaattttacaatcaagctatgaccatcaaacaatattttagatgggatcattcaatcttcaagcaagaagtatcaaggatatcaaaaaaaaaagagggaagaagaagataagaagctcttgatgtttaagtctccagaatatcaaagtagcgaatcaagcatatcacacatttgatccgaagaaggagagtagccatgtaacacccttcagcaaaagtaatggcattattccatagccgatgtcctaaaaaaaccattcctaatcttagcccaccctagtctctaggttcgatgagacaagcattgggaggtctattgtcaactggtagccttgccaaaacatgttttcctacacatacaatcacaaaacattttgtgttgctatattcgtcatggtttttcgacgatattcaatgactaagtcctttggcagcctatctgatgtcactctatagctggcagccaatggaaaagctaacactagcttcaaaaaacatttcgtctagtaaaagttttttttttgttttgttaagctaatatgtttctcgactacaatctccaatataaggagtgatacgacacctatctttgatgatggcctttacctttaattgaagcaatggttaattctgctttgattgtatggtgtccggattgaccctgttacttcgaaacaaaatttcatcgttccattattggagtcaactaaataccatgttaaatccccattgattccaagtgatgtttaattccgcttgattctcatcgatgattcattccgcttgattcccagtgatggtttattccacttggattacctagcatctgttttgtggagctattccttttattacctacatggtcaattcaaattgatgcctagcaatggttcattctgatagtactatatgcatctaccttatgccacactatcattttgtataagtgatggtctattccgctttaaatcatccatgatggtaatttatttatacctatagtgatggtggttctgctatcgataaatgagagcagtgtagcacgccagcgcggctagtgtgaatctgtgaaacccttcgatcaagttggctggcaccgtggagtttaaatggtcccgacttgattgataagacccttcaagaaatggcatgttctttcgccatggattgggaaaggcatggatttacgcctcacacatgttttctttagtagtggcatgaattttcgccacacaattctttagaccatcattaatctgatgtcaggttcaaagaatgaatcccattttcggcatggatttgcgccacaatattcttgagacagttcatcatcattggtcttgagaaatatatatatgtttacagggggcatgtagtgttgcctcaccattctttacactggtattaatctacagccaggccggtttaaagaataaatcatcattttggcatggactttcgcctcaaatattcttaaaaccattcgcgaagggttttaagaatataattgtttatcgaaggcacgtattttcgcctcacaattcttcagactaacatgtgccatccgtctagttggaagaatgaatttgcggcatggaccttggcctgtcattgtcttaacaaatagtataattttttttctggggcatacacttttgccgcgcaattctgcatgctggtatcgatcccttgaagaataaatttttggcatggatttccttcttaaatattcttgagaccatttgtacctggtcttagaaattatattttatcgatggcactaatttaagcctcaaatattcttaattccttatacccctggcattaatatgtgtctcgggcctgaaaatcgatttcttattccttgggcatgaactttagtctcacttgttcttaaaagaactttagactccggtatcaatatgtctcctagatgactattgatttctggtaaatagtgatggatatgccgctatgaatattttgggagcagtgaaacacgccagtacggctagtgtgaatctgtgaaacccttcaactcattcagctgacatcgtggaattttgacgatcgtgtgggttgataaaattctctcaggacacggcacttttttttcccgctgtggccaggacatattatggcatggatttttgcctcatgtatttactctggaccccatctagaatatacaggtctgaggagtattttgttaataatggcatggttgttcgcctaattcatttactttggaccttatcactaatacacaggtccgagggatgtttgttaacaatggcatggccgttcgcctaactaacttactttagaccttatcatcaatatacaggtctgaagaattttttttttcgacaatggcatggattttcgccttatagtatgttaattcatgagtcgctggcatggatttattttgcctcagtacatcctggtggactatataccatagtgaaaaaaaatcacatagccctttattgcaaaatttggtggcataatctacagctaccgtgagatatgctagaagggattaaatgtattttaagcagtatggcggcagctacatgcgcttcttcaacatagaaaaaaccaccaagttcgtcttggttgtttattcggtgcttgaactctgcttgcagttatgaaattaaaaaaaaaatgctgtggtacttaatttattgttcctcaggaaatggaaaattttcaccaagttaattccgagccgctccatgctcgaatttaacttggtgagggggcattttgttcgatgatattttgtacaccttttttttattttataagaaatagggtgcgtcaaaatattaatttcggaaataacagtataataataaaattagtgattaattatcactaatggtacaatctgacatacacgagcatatatgcatgaatgttctgtgacacgtgccaatatctgctctagtgcctagagtacagacgtgtatatgctcatggtattgcttcaggtgataatatgaattttctttttattaatctgaatggaagcatgccactgtagcatcgtcattagaggatgctaatcacgtgatttgccggcagtggattgcttgcatggaaaaccatgtacgtgcttgcatagaaactcaagaaatataaaggcaatgtagctctgtctagagaatcccttgccatatgcagtgtgcacgcatatacgaatacaaggaagccggtataatttggatggaatcatattgagtatgatcctggctaattggaagaaatcataacatatggaaggaattgcaaaatcgtagaatcaactgattggcttgccatccatatgtgagccatgcatgcactgggcagagaactgcatccccttcacgctataaaagaaccagccatttcacggagcagagggagagacgggggcgacggaggcagcggagagaggtcgaggaccgaggcaggagccgagagcctgcgcgttcacgctgcggcagccgccgccgtcaggcgctgcaccatgtctagccttggcagtagtcagtagagcccaacatatacaggggaggaagagaacacacagaaacggaggaacacacacagacagaacacacaccattttggctggagaatctcggcgtccagcgagaacacgggcgctcggcggtcggtgacgttggccgcagtgcctcggcgtccggcgaggaggcgcgcggaggagaagacggtcgccggagcacgtacccagccattgccattgtacagcttattagttttcttttgttttcctgctctttctgttcagatcgtcatgcatgcacaacacggcgaggaggcgagtttctgatgctgctcggcccgccggatatagcgtcctctccgcctgtcggacgcaccgccggccggagatcgcgtcactccctctcatcggagacgtcggtcgccggtgacacatctacctgctgccacgacgtccttgcctcgccggccgcaacctctatcccacgacgccttgtgatgtcgccgagacgctggacgttgtcaccttcccggtcgcagcctcctcttcgcgacatcactgacgttcgctcgctctcgtcgacgttaccatcttcttcgaactcatcggctggttgctcgaggagaacgccggccggagtgccactactcggtgcccgcaaggcgtcaccagctccagctacgtcgtaagccatctcgtcggagttgccggggacatcgccgagccgcctgagtccgtagatgacgcaacgctgccaagcgatgctcgtcatcatccgctgctcgccggagaaggttttttttttgtcattttgcctcactggagcacgccaaagggagtcgaggcagccgccagggcgctacgctgcggagccgtcccatgtcgcggatgctgactgacttgtgcatgttattgtatacggtgacgagccaacaaaacaagacatgcatgcatgctactgtacatagtgacaagcaaaaatgagtttgcagattcatactcatttggggctgctgcgtattaaacttcccagccatgaccaattcggctatcattcacgttgatcattttacttttataatctaattctgatgtaattcctacgtcgtcgggtcatccgggctacactattccatgcatgtcttcaataacaatataaaccaacatgccgtccaagaccgatgaggctaaaacggcaaggtgaaccgagtcgacatcaagacgacgtcaccaacaccgcgtgtggaccgatgaggccgcgaacaccgccagcgcccactcacacacatctgcaccaccatcaccatcatgcatgggagaacgtgaagcgaagacagacgacgacaactagcgtagcttaatcggaggtatctcacgggtttaacccgcgagagtaattaaccgagtgtctttcgagaccccgggaaccaggagatcacaatcgccaagtcagatccaccttgcttatgggccatggagcgtatttgaccaaggattctgtatttttgtaattcttcgagaattataataaaatgcatttttccttcgtccactttatttttttttacttagtacactggcacgcctacatatttttattttatttccctgtgcggagggataaaaatttaatttttttttctctccaaacaaaatggcatgcccagtgggttctgggcgtgccattttgtaatttttttctctccaaacactgcacttgatctgaatttgaaactccgctcctcggtaatatatttcatacaataggggcatattcatacatactagtatatccatccttgaaatctggaatcctaacatagctccacacaaaatgttaatagccagctatgaacatatgcagtaaaacttggggtagcagctaggaatgccattgagatagaggtgaaaagttcaaagagatgtgacaactggatgagccttccctcgtgcagtaggctctctatataagttctaataaaagtacagagaaaaaggttacataaattgcgagtaaaccaataaaataaagtatgatgatatggataaagtagaagtacactggccacctatcttacacctctattacagttctctaagccatcacataattattgtttaactcttgttcgggcattgtgccatctgcagagtggatatgcccaagtttctgggtttctaaattgtcaagcaagatattttcatacaactgtagataaattaagctgtgagtaccagttgtacatttgttaacattcaatatcagctatatttctccttcgagtgtcatatattatcattcgaaacggagaattatgaaaatcgaaaataatggcaaagttaatcactaaaagtttgtacaggcaagtaatttgaaaatgatggcaatagaaaatggtggccccagaactcgtcgtccggcaaaaaaaaattaacttgtggagctatcatgctctcggttggtctcagtaggacaaggtgactttactttctatggcaatttacttttttttttacagtgatccatgacacttttgttgagatgttacttggctctttggcatcttttaagctattggactaggagtgtgtaccggccgataattcacacaaaggttacaagatgcttccacaatgaaaaataataataactgcgtgtctatattgctagctgaaaattgctgcaaagacaatgcgagaaaacattagcatttttatgtgttacgcacattacttcagtagtcacaacaattatactttggaggcactcggagtacttaaaaaggaactgaaggatggataaatagtcagtcatatttgctgttgggcgtgttagagtatatagctgctgctgccaaatggcaatcgtgagcaaggccatccccagttgtagcctgggaatgacactgatcttaccagtctctgagaatctgacaacccagtctaagagtggaaggtgttccgaatttcaccatgtttttacccttacgatctgtgttttgttcttttgctggccttgctatccatgtaccatgtagaagactgatttgtcttggatgtttgatgtcacgcccagaaattcacgaaccagaatttctaagctgaatgtgcattaaatccctgtccaggaccagccagggtatacaaacaacaattgttgacatacagatccacgacttataaaaatataaaagattacaaatgcagcggaaaagataaaagcgagctaaaccgggatagcttgacttcagcagcggggcgactccactccacaggcaatccttgacggcagcgacgaaaccaacttcgacaaaacagctcccactaggaagatcttcagctctggtgtggagaaaaagagagcaagactgggtactacccattgtactcagcaagtcataccggaagaggaggtatgatgcaggatataaccaaaggaggctaaaggttcttttgcataaagctagcatttaaaagcagaagttgaaagcagtaaaacagttgtagtaattaatcaatattaaccaatcactgtccaacgctacaccacgttgcaacaggctcaaccaaccacctgaactacaccagttcattaaggttaactagggtgagactaatcacggtgaatctggttgatcgcccataactgcgggcacagctattcgaatagttttactctggccagaggtgtacaactgtacccacaagacacaattccacaaatgtcgccatgccccgaagtatcaccatgatactgcaaagggggaaatcgtgacaagaccctccgcataaccctcccctaacatccacaccacgctaaggtttcacccccacccctcaaaaggcaatgggcggtcccctcttgcgccgtggtgaatccggcagctggacaaccggacaccccggccgacccaactccatcacgcccaccctcaccaccggtgcctaggaaagggtccagctatacttcagatcaagcagttacccactcccgcttatggtaagcacggtaagtctcccagggtttcccgtgaaccggtccttaattgccatgggtgtgaccagcaaaaccatgcacccacagcccaccattcagtgtattttaattaactaacaccattgcggtggcaccaatccaaagctatgctaatagccaaaatctatgtaataatgggatccccatttgtgtacttattgaactaagcatggctaagcatttcctaaaccagcatctaatcattttgataccccagttatcaatggcatatggtaaacaatatatggctgagtaataggacccatcccacatgacattgaaaaagaatgcaacatttaatagaaatgtgggatatttgtaaatagggtacaatatgatcaaatataatgcatgacttgccttgctctcgcactgataagacctcagcaaggtcttcgagaaaccgcggatcgacgaaacggccgaaatctacgcgacaaacaaggcacacaagcaaaatatgctataagactactgaaacagggaacaaaaccatttttaatggattctttgcatttttatgaatttactgagacttgaatggacttaaacggagctcggatgaatttcttatgaattttagaagataaactgtgtttttactaacaaagaaaaagtccttaattatttattgcgcaataaatccatagggctgatgtcacccaggggggcggcaccgacggccctgcttgtcagtggcacaaggggagagggagggggcattggggtggtccaccagctggtggggcccaccgagcagcggcacaaggcaggagggggagtggatggtggtttggcacggctcaagccggctgaccatggcaggccgacgacgacggcacgcggcctccgacgatgaccggcggacgacgagacggcggcgcccggagcgaagccgacggcgcacggccggaatgacggtgtggctcggcgctcgcgggaaggggaaggaaaggagggggagggaaggggtcctcaccggcgatgcgagtgaatcgggttccggcggcggcggatggcaaccgaatggtgatcgaggtgcaggcgacactggcgagcgcgacggcgacggtttcagggcgcggcggcggctttagcggtggtggcgcgcggccagagccggtagtagccgccggcgcgtgggaagaacggtacggcggtggcgaacggaaagcgagcggcggccgaggtagctctcgcggcggcgaagctagcggcggtgattgcccggtgaggtgacggctcttgcgacgacggcgtgcggccggaggcgacggcaaacggcggcgctaacggcgagcggcgcgggctcggtaggaggcacgggagggggcagtgagagcggaaaggggaagaggaggctcgggggagcaatttataggtggagggggaagcggacgtggccgggaaagcctctgatttcgccggcgacgtggggtgtagagagagagaatgggggggattcaaattcgaatcccgccccttgcgagcgcgcgcgcgggccgggagacgcgggagagagggcggcgacgtggggaggacgcgggagcggcgcggcgtaggcgcaggaggagcggaggaggtgggcgcggcggtttcggcggtggctgccgacgtggggcggtcggctggaggaaggggacgaccccgacaggtggggcccacttgtcggcgtcccggagagagagggagtgagggaggacttcggggagggtaagggaggagcgggccggcccatcaaggggcgcgcgggaggagaaaggtgggccgatgacccaagaagaggaaaaaggaggaaaaagaaaaggaaaaagaagaaaggatttttcttgagatttaaaattgcacttgctcatttttaattggttaaaattaattttaaggctctgaaaattctattaaaaatcttgttaatgtattggagcatggggaacctaagaaaaattccacaataccatttccaattattaattgcattcattagataggaaattagctctaggttaattcaaaccatttcttcgcacaatttatttaaccatttttttaaagcaaggaaaagggggaaatttccgggcgtgacatttgaccaacatcttagctggcagattgcagtctattgcaaggtcctgcgtgttagtgtgtgactgtgtgaaaatttgtaaataagaatgcaccatatagcgaaaatgttaggagcccgggtatcaaaatttacctctttgattatattccttctttattcttgcctcgtgtatctttttgtacgtaagatatgcgaggttttacagtgtttacgagctatttagagttatcgagaggtggggcaatgtggaccattgatcaagagagaaaaaaggtatgaaagaaaaaatattgtaaccaatggcagtagagtaattaactactgaaatattggcattacgttgaatcgaaatttgctcctcgctagttgcacctgatctgaattcgaaactttgctcctcgctaataaatttcatacacatattcttacatagtagtatatccatccatggaatctgaaatcctagcatagctccatgcaagatgtcaacagcctgctatgaacatatgcagtaaaaagttggggtggctgcttggaactccattgagatagaggtgaaaagttggaggagatgtgataactggatgaactttccctcgtgcagtaggctctctgtaatttctaataaaagtacagagaaaaaggtaagataaattgtgagtaaaccaataaaataaagtatgatgatacggataaagtagaagtatactggccacctctattacagttgctttaagccgtcgcataattattgttgtttaattcttgttcacgcattgtgccatctgtcaagcaagttattttcatacaactgtggatagattaaagttgttgtgagtaccagttcactacaagaatgaagaatcagtaaattttcttagcggccaaatgatttctttgacggtcaaaaaaacagccgccaaatttaaatatattcttggtggttctaactagctgccaaacatagacatttgtcaccattcaattacagctatatttctcctttgagtgccgcatattatcattcgaaacggagagttgtggaaattgaaaatattggcaaagttaatcgctaaaagtttttacaggtcaataatttgaaagtaatggcaatagaaaatggtggccctatgactcgttttctagctaaaaaaccgccacgtggagctatcatgcttgagcaatgatctctcagttggactcagtaggacaaggtggttttactttctatgacaatttacattcttttactgtgatccatcagaccatgacacatttgtttgtaaaattaaaggtgtttttgattattattctgtgatgaacaattggcattggagattattggttttgatatttggaatttatttacgaagtggttttggagaagattggatttcacaggtgatctacaggtgctgctgttttgggaccggtcagaccggacatgggttgccgatcagaccggcgcagcccgcggtctgaccggctgacgctgtgtcggtttcggtttcgcgttgtttgtttggatatccgtgattgtttcatgattatggcttctagatggatactatacgtatgtaatactgttgtttgctactaatgagtcaagttggagatagcttggtctcggaatatggttttctttgtttatttcatgtgtaggtgacttgatgcctcgggagagtatttgcggtgatggaccgggagtcggcttgggataagacgacgtccgtggtggttagagatcatgtgggatacctaggctagagttgatgcacgtggttggtgaagattccatatggcatacgatggaggtattgtgtgcgtatgggatgcggagtcgaatttggaatgagtccaaatttggtatgagtggttatgtaaagtttgtttcttgtactagagggtttcctaaggtgtttaggacttctagtatgagtttggttcgtggctttaggctgcctacctcgggtataaatagagggggagcgtgagggttcccggtatcgctttttgagagcaattgagttgagagttgagttagggtttcgagtttagtcgaaatttttgtaaggagtgctgttggtgcactttgtaaacacagagagaatcaataaagttgtcatccactttaagagttcttcgatttgtgtttcaccgggtttcgacggtctaaccggcgacacgtcggcggtcagaccggcggcatcgcggcggtcagaccggcatcggcaacaggagctgatctcggcggttagaccggaaattcaatctcggtcagaccgacggcaaccaggcggtcagactggcgcaattacttcggtcagaccgcgatccgtcgaatttgagggtaacttttatttctgctaaaaattttcggtttttgggtataccaaccattcacccccctctggttggcttagttagttgttgtgattcgatagtacattgttgagatgttacttggctctttggcatcttcttagctattggactggtgtgtgtaccgacaattcacacaatggttacaagatgttttcacaatgagaaataataataactgatatcctgtgcaaaacccaggacagtatctgcacatccatattgctacctgaaaattgccgcaaagacaatgcgagaagtacttgaaaaggaactaaaggatgcataaatagtcggtcatatttgctgctgggattgctgagtacatagcagcagctgccaaatggtaatcgtgagcaaggccattcacagttgtaggcttgtagcctggggaatgacactgatcttaccagtctctgagaatctgacaacccggtctaagagtgggaggtgttcggaatttcaccatgtttttacccttacgatttgtgttttgttcttttgctgaccttgctatccatgtatcatgtagaagacagactgatctaaattgttttaccaccatcttaggtggcagattgcagtctattgcaaggtgctgaatgtttctgtgatggtgatgggacaaatggcatgagtgtgtgactgcgtcacagagctgaaaaattgtaaataagaatacaccatttagcgaaaatgtcaggagcctgggtatcaaaattaagcttattgatttcattgcagaaatctatatttcttctttattcgtgcctcttgtatctttgtgtcccattgttgatcgcgtacagatcattttgtaccaaatataagagaggttgcaatggaccattaatcaagagaggggtaagctatggaataaaagatattgtaacaaatggcagtagagtaattaactagctagtgaaatattcggattatcgttgactcaaatacttaaaatgtaaatcttctgaggtattgatttaggcatcgattagatctacacgggaaaaaagatcaggttgtgtcttctttctcttcttccacatcgcttcattctcgttctagggtatgaattgcggttcaccaggaaaaaaaagagggagaagcgttggaatggttgagaattgaacaggagatgagatcagctcgacaatggcaaggggaagcgcatcggccaaacatgaggtaaatcaggaagattattaattttggatcaatattaaaatctaggtgcatgtattatagaataagttatttaattcctaaaacatgtaatttttttgttaattaatgaattctacaaagcatgtaaatcacttaatggaggttcactgagcgaacatgtacttaagaagaaaaatgtaaatgataaaaaataacacgtagaaaataaggtactgatgtggtacctacgtacttatcggcgggccaattccctacatgcccatgtgatttcacccaattccttctacgcctctaaaatttgtttgatctcttatatatcgctgagtttttatttggatcccttacatacccatttcgttagttgaccattagtttgaccattagttattgtagaaattattttattgtccttggtatattgttaaaagctagaaatgttttatgtgtaaattatttgagttgtgaaaaccaataaggaataaattaataaatatttgttatgaatatttaaaaataaaacattatttcattaaaataaaaaagatttattgtaaaaaaagttctgcataaaatttgaaaattacttttcaacaaatatttagtgaaaaaagattcgttgtgaaaaaacaaaggggatgtaattagtttatcacaaattagaaaataaatttaaaaatttttaaataaatttcagatcaaatttgatgaatttcgtatatcttcccaaaaatttaaacctaaataacatttagtttttgctcttaattttctggtgaaactaatgtatggatttaatcataatttttaaaaaataaaaaataataagttttattttttaagttgagcattaaatgattatattgcttgtattttgtataagttaatttttttgatatgaaaatttattgggtaggtaccacatatcgcaggagggccggccgtctgcctgtaagcaaacgactatgaagattgccgatcttcgtaggcaggacggccgtccgcttgcgaagacaattttcgcaggcggacgttagctagtcaggtccgtctgtgaaaataggaagtggccgcctgcaaaaaaaaaacttccgcctgcaaagataggtagaaaattttaaattttgatacaataataatttgcccaaaaattactttttaattatttaatagaaattgatgcaggaagattattagtaattatcaaacatatggtacttagaaatctacatatattgcataagtgaaaagtgttgtcaaaatatatatattacaatatttttttacattgtcacttaaaatacgccatctagttacattatggcatagcagtgttccactcctgaagttcttgaattcgtcacttgtagctcgggcaccctctgggttgaagaattctcctcgcacatgacagcactcacggtggatgaagtggcacagatcgcgctggacatttgtgatgcctgtatcgtcaaagcttgttcgaagttctattcttggcaactgcatgcattgaagaaaaataatatattagtattataaatatgtgaagctgtctagtccatagtctagagatttacatcctctgcgttaaccctgtacctcccattaaccctgaggaattcgcacgcataatacctgcagaggacaatgcctctaggttgcttgtgatacttcacgacatatcatagaagaaaatagttaaattttgcaattagtgaaataattggaatacattaagtgagtgaagtcttaccggctaatatgtatgtactagcagcttctcccttgtttgggtctgttctccaccctagaacttgtagtagttgtatgcactgtatggatgtcgtaccatttcgcattaaggaggatatttaattataatacattcatataaaaaatgcaagagtccgaatcacttattactgtaagattattagaaattctttgtataagtggtgactgtaatcgagactggtcctggactccgagttacactcgaagtcaacttggtttcttttctttcgcccaagctagtatctctgcaaacgaatacacacaaaactcattgtgtagcaacgtttattcgaatatataacaagtaaatctaatgtagaacatatgcacctttggtggaataatatataaggtagtcatggttatatccgagcgagttgtgtcctcatcagctagccaactgatgaaccgcaaaaacaatatcaagtcttgtgcaattggctaaatacattagtgctccaatggcatttaagtagggaattttgggtcccattatttcctcattatcttccttgggttttaatgtgtccttataagcttctatggatcgaactaccatgggggttttcaaaggatggcatttgttcatattgaagttaccaaggactgtctttgtgtagggagatcggtgcataaatactcctccatggaggtgctcgagttgctggcccaagcaaaacttggttttccccaagtccttcaatcaagctcgatattaagacaagccattgcttatttaggagagaatctattctatactgctgagtttgttcgagttcagcgatttgccatcgacattgtcttttatttaatgtcctctatggtggcaatgatatttagatcatagacatagaccgagatgatatacaaaatccattcagggatttctttgaaaacacatgtggacaatcataattgtttgaataacctctcttctagagatatctacttaactctttgaaccacaaccttccggattgtttcaatccataccatgatcgctgcatgtgcacactatacatgttgcagtttccttttgaatttgtgatcttgtgtcctttagggactctcatataaaattccaaatctaacgacccataaaagtatgccgtcaatacatccatcaactgcatgcatgggtccacatccttcatgaacagaacatatggaggtgattaattctcattgttctaagctaaaaaaaagtagagaagagatgggatcacatagctaatttttgggaggcctgcatgccgtaggctagcgaaacaaccaggaccacccaattagcatctatttatagcaactgtataagagcccctcgacgaaaaagtctaccaacgatctccatgctgcaccgtgcatctatgcctagttttcttaccctccctccaccataaatacgcacccatctgcaacatagatcaccaaacatatcgaccaatccctcttccagtcaagaaaaaaggaagattacaccaacaaacaaactagctagccaatggcctccttgtcatcttttccggctcgccgtggcggtggcggcactattggttgttggctcatgtgccactgagctcaccttcaaggtcgctaagggctctagcgccaaaagtctagagcttgtcactaatgttgccatctctaaggtggaggtcaaggagaagggcggcaaggactgggtggcgctcaaggaatcgtcgtctaacacctggacgctcaaaagtgagtcgccgctcaagggccccttctctgtccgcttccttgtcaagaatagcggctaccgtgtcgtcgacgatatcatccctgaaagctttacagctggctctgagtacaagagtggaatccaactctaagtaacagacatgtgtactcttgttgggtcacatgcgaaatatgaacatctaaataatcctctcttaaaagagatcgtgtcatgtttgagtgagcaaataattattatttttggttattttgttgtaataggccgatggcaacataaggcatacatgtgtccttccaaaatattgctgcggagctgtatgtgagcattgtttggaatatatgtcatttatataagatatatggaaaaaagtatatttggtcaactttcattaagatgattgcatctgtttgattttccaaagttttagtacatacttatgtccaaaccaatgtaatccatttcacttattttagcttgtcaaaaaatttgtaaagtcacatctacacttttttttcattttctaaaaacaaatagttgaattgactatactatgacctaaaactataagcattaagcatactggtacatcgtttaccttacgagagaatacattatataccactgtgtttgtcacaggtctatagtttgctattgactttgtcacgttctacaatatgccatcgacttttccttaacttctacgacttaccatcaccatctggttatccttcgtgagaaatgtataattttatccaatgaccaaaatacccctataacagatacttccaaaatttggaaaaaaaatttgaaatatcatattgtaaacatccaaaatttggccaaaaacttaaaatctgatattttagaatttttgtctacattttggaagtttttgtcctggaggtattttggtcattagaacaaaattgtacagtactaatggaggctaaccggacagcaatggtaaatcatagaagataagcaaaagtcgatggtatattatataatgtgacaaagtcagtggcaaatcttagacatgcaataaactcaatggcattgccggtctgattggcagagtccgagtcagactccattttcatcgggtctctggtttccttacttgggaaggcatgtttcggatttccattggtttctatcccgagttggacatggagaagggcttatagagggcaagaccaacccctatataaggaacaaggccggttcaattgttacctgacaaacacacaatcaatagaatcgttcttttactttaattttagccatgttttctactttaccctaattttagttcatctttatcgatttgcaccgtttgcccataaagaggtgccgtactcaaaaaatcaggtttgtcctaaaaaccttccgtttgcccacaagatggatagttatcctcatattgatttaaatcggcctagaggctgattttgatctctaaatcggcttcgctagccggtctagctttctttttacaaaacccatcttgatttggttgtttggctagatcggggtagttgctgactccatatccccgtaaggcatttaggtgctgcgatcgtgcttgttgacttctcacaaaaagttgccaacagtaacaacaaagataaataatgtgatggaagaggggaatgtgcagcacaccgtttcaaaattgatgattgatagttggtgacgatttcatggctacaacatctccaatgttgtactctctccatcctataatataagaaattttagagagatatgacacattttaagacaacgaatctagatgtgtcatatcccttataatataggatggagggagtataagtgaatgttatccaataaattcaaccaactttcgtaatcatacgtgtacctttttaacttttttatgcacacacgcacaaaaaaaaaagtggttacgtgtaaacaactatagacaccacgatcgatttgaactagagcagatggagtgaaggactccatatgtccaccacctacctctgaaatcgagtcaaaaagatatgcgctaattcagatatgacaacctattgtaactattaagcagagtaaataatgtattatcacctcaggatttaagcatattaaacagggcagcaaatcatcacatcatagctatgttctcaaacatctcaagattctatgaaaaatactctgttcttcctatgatatgtgtcatgcaatgcaatccatgggcttgtaaagacctttctctattatttattgcagcatatatgataataagtggtgtaaacaaacaaccaacttctccaaaagttcgagggcctttcactatatatatacatgagtttctctgcatttcaaataagctgtacaccaaggacatcgtctctctcatttaccaatatgtttagttctctagatactataactagattaagattaccggattaacttaaaaatctggtatgctgatgtcacgagagcttgcaattaagaaatacagatattaaactagtgttcgaccatagaagtacaagccattcatggactatataaataggccaaggctagtgctcagccaaaagctgaagatactttaactcgtattctaatatttatcatattgaaaacccttccaacatgcatgtgctgccttgtgtataaacatcttcagatacgtacacatgattaacttaactagtttaggcttaagaggcattgggaatccgggtgtagctactcccacatagtgcattacgtaagttgcattcttcacttgttcgcagtgagtttggtgttgtttcaggattcacgctggaccattcctattaaaaacaacaaacattcattcatattgatgtgtatatcagagttgccagagtaagtggtttggcatgcatctacaaagtattgtttacacagaaattttgcaactcctaggcaaagttctcatatccatcagactctttggtgatttccaaaaaactagaattccaagcgtgctgggggatttcgtatataccagaatttccattcttaaatcaaaccttgtagtcaatttattttattaaagcagatagcttgagatttggtcgatggataaataccacaacaggctaatctgtcagaaaaatggcactgcgagccgacatctagtatgcaaatataatgcttttttcatttaatttggcttggctagcatcatgctaattaggccagggaaacactaggagcatttcactagatcgatacgtggccggggggaagatcaaccatgaagatgaagcgaggccgaagggattgatactgaaccaaaacgaattaataccacttatttctggaaaaaaacgacttgcactttataattatctgcagtatatgtatatattctggctcttgtgctattattcaggtttgttcaacgttttggaccattgtccattagatgattggtgatggactgtttggaatctagccgattcatcaagcgcgagttcccccgcttcgcccccaaaatcaatcacagcaacgacatcatcatcgcataaacagaacaatacaaacaacacaaacaagaaatctaccggatccgtccgcgggtcgccgccgcggccgttagatccgacggagaagtcatcgccatcgccagatctgcgggagaaggttggggcgaagggggagatcactagatctgctcgccggaaacgccgtcgccgcctcctccgcaggatatgcccatgggagcaccgatgcaaccgccgctgctacggtagaagcttgggcgcggaggatgaggaggagggggtagagaaccgccagattcagtcgccgaaaacgccaccactatcgcctccgccggatctgcccgtcggaaacgccaccgccgccaactccgcaagatccgctagcgggagctaccgacgccactgccactgccttcactggatccacccatcggatatgccaccgccaccgatggatctgcgggagggggctgaggaacgccgaatctggcccgcaggagctgctgacaccattaccaccacgaggggaggaaaggggtgactgagtgagagggggagagagacgggtgagagtagggcagcgaatgataaggtcgccccccgtcacctcccacgcgtgcctttatccactcgcgtgcggctctctcttggctcggctcgtttgataggtgcgttttttttaaataccggcaccgataatatattatagctggcggtttttaatatattataattgtcggtttttttaaaaaaaatagcacgtatagtataggtattggtttttctattaaaccggcacctatattcacttaaaggtgatggattttttttttgtattttcagcctgtggaggtgggcaaaatactataggtgctagttttagctgttccggtgcctatagtgccaatatgtatgtgcttttttatactagtgatgctgagggtttcataccagaacttccattctaaaatcaatccttccagtcaatttattttattaaagcagacagcttgaggtttggggcaaggataaataccacaccaggctaannnnnnnnnnnnnnnnnnnnntgaacctacatctatatagtatgctaatataatgcttttctctttggcatagctagcatcatgttaattaggcctggaaagcaccaggacgttcacttgcaccatggaaagaagtcaacagccttcactgtatggttatgccgattcggttttttttacgtgtctacttggtgggtaaggatcgatagggtgctccggagaggaagcattccacgaagatgctagatgaatgctccggttaaattgctggatgaggatatccatctttgctaatctctatcattagtaattatttgcaataattaatatattttgttgttaattggtaattaacttgtcaaaaatagtattgataagatataattagtctattttgttgttaattagtataaactatgactatattaatgataattaatatattttattattaattaatatgttcaatccattcttatccacccaatcaaacaagaaattggatcatcatatctattagaaaaaaactgaccatatctgtgtaaatatggatgaccaaacgtggccggggaagatcaacgatgaagatgatgtgaggccgaagggattgatgctgaaccaaaacgaacccacttatctcaggaaaaaacggcttgcactagataattatctgtagactatgtatatattccgactgctgcttgtgttggtatgccggtttgttcaacgtttacagattaattattgtttcgtaccattgtccattagatgattggtgatggaatgtttggtacgtataaacttttataccttcaaatatatttttgacaaacagctaacttcaaatatttaaccaatgttttatgaatgaggcatcccaattattttttagataatggaaatggattatatctccggcttcggtcataacacacaaagtcataagtttaatacaaaaggtaaagataaaaataaatcaaaatgagaaataagatgatgggacaattccccaacccctttattattaactagcgttaaaccacacagatttctagctagcaattctaatggaactacgccacccatagtgaaataagagacccttggctactgattgcaaaaatatagcaccattacgcgtggtatcatgttcctcttgtggtagcatcgtagaccaaaaatggatccaattggaagacatgaagataatctacatagggttagacaattatttagcattaaaaactttatcattacgacaactcataattggccaacttacaacactagctccgattagaatcaattttttaatggacctaggtacccctttaagccaattaccaaaaaatatttttgacgttaccgggtgaagggatattaaaaacaaaaaatacacatatgtaacaaactgagcaacttgatacttgtcaacggtggatacccgtagactggataaattgagtattggagacaagaaacaaggattatactggttcaggcccctcgtgatgtaatagccctaatccagtttatacgagattaatatagaaaaccacatagtacaaagggtatagatgaatccaatgataccgacgagatccttgttgagattgatcaacgtgatctcccggcgacttcgccttgagttctttggcttcgtaaactatggtgggtgtgttggcgttatgatttgatgatcccgagcccttccgggagtgtgccttttataccataagttgccttagtctccaagtagaactcggagacaatgaaccctgcacgatatagaataatctctatcctctcctagtaggactctgataatctacatgctgtgaggatattttccataataccttgcatatttctttatcgcatagggaaacatatcgtaggatatgagatatgccaatccggcatatttggtaaattgtaggataggaggtatgtcttatccgtaaccctgaaaatactcaaagaaaagatgttggattatctcttgtggataacagaaagaacaatgtttcttcctccccccccacccttttcttatggccaggttttatttcgttagaattactttcttatgaaaaaaccacatacacacctttatctttagtggaacctttaagtctcatataattccttttatccaaacattagagttcataatcatatagatttgactgaaaattggccattcttatggagcgaccatacgaaacagtccttttcatttttgtttgacggagtcatacaaattagctagcctgaggatcccaattacttaatccacaattttcttagagattaacacaaatgtaaaatggcctatattacatatagtacgtagggcatgttcactttgatgacattttcaaccttaccaaattttggtaaagttgccaaaaaagtggctacatttagtttgttgccaaaatttggtaactatataagaaatcctaccaaaatttttggcaagttgtcaaaattttggtaatgccaaaatttagtaaggtttttttagcatcaaagtgaacagacccgtaatgactatgagatatcaatatatatacatatatatatatatatgtatatatatatatatatatgtatatgtatatatatataggagttggataatatgaacctaggtgcatctgcacctcaatcccacatgtgacacgtgtctatttttcgttgtagctgatcatcattttcaccaaagctcctacaacttgtacctacccagcccaaactcttatagggaaaattttaggcaggtacacaatgatgctgtagtcatgcatttctcacccacccatgtactagtactagtctgcaactgtattcatgtcttttcactaatgtgaccgtgagagagaatgagagagagagagagagagatgaacatgtagttttaatagatctcttggctacaatcacattactccatgtgattagccatcaaatatacgttgatttttttaattaatctgaccaccttgttttgtatgtccggaaattaatctatatctggttttattcggacatgatatatcaagatgaatgtccaatcaccaaacaaatacaatatatccgatgtccaagaatgacattgtgaaaataatatatcatttggcataaattaaaataaaaaatacatgatttttatttttacagatatatgctacataacaaagtataatttcattaattgacaaagaaaataatatacactgcaatttgttgacaccgaaaatgaaatacaacgaaaatatcattttgaaaagtcatgtctaaaaaaaagatgtcgcaaaatgataacatataacttgacatgtattgaaattaaaaaaaaaatcacatgcgtgttatttccaaaatggtcatgtgtactaaatttccatggataacaagagaaaagaaacaatattcaaatgatgagtaaatactacatgatgtgtggtcaactacctctcatctgttctttctctctctttgctcaggaagtacatgtcccatgtcagagcaacacatgcattacgtacctccctgacattttctcgtgtagacaatcttcattagtgaaaggtccatttagaaagcacgcatcttggaacgattgaatggttgtgattctgggtgcagatgaacctcggttcatatctgcttttatatatatatataaactgtgcaaacgaatagaaaacttctaacaaatctcgatggccttgctagctaggtgaatcatcatatacttccatctttttttttcctttgacaatttacagcttactagcttacaggattgggaaatctctggaattttcatatagctgcacaaattgtggcacagagctgcattcacagttctagaagcaaatcatcatagtcaatatgcaagagtggccgattagcagttactccgacagttggaagtagggtactagtacattctggtttttgagcaaacagttctaattggccattggtcagttctttttttgttcatgttgttactgtagctagaaatccaaaacgccaccaaaatggatatataccaaaaaaaatgtgcaattcttaagttgcagtcaccactgaatctgaagtcaactaaacttcatacactaggctcatattcttgctaatatacttcatacaaaataggggcacattcttacataggagtagccatttttaattcaactaggaagatagcccgtgtattcacgcgggcatgtgtcgtacattatgtttgaacatctacaatatatgatttctccataaattgttttcattagcattgctttcataattgtctaacctagttattagttatctttatagcatatcatatttaattaattcctacaagcaattatttataatattcttcatcatctactaagtaggtagacatattttgtgttagaaaacatgtatagaaaattaagtgtaaaatgaaaagtaagatgttttttaattgaatataggttgtcattgtttattgacggatgaattgggtgggatatgaggctctactaaatgcatgggtttatattattgtttaatttgagaaagaacccatatgtgaacattccatgtagagagtgtgtgagactccatgcaacctagcgcaaataatattggatgaagaaatatggttgtgcaatatattattttgatagatgatgtattatgaatacacgcttgtcttttaagatgagatagaactaatggttggaaataatgggcttatcggtttaaaaggcctaggaggatttatggggtaataggtggcgactttatataaaaaagaaaccattatctaaaattgattagatgatatataaaataaaattatcagtgtagcttaaaattatgctctttttaatatttgtttctctctatagttttgtagctgaaaatagggaggagactggagagaaacgaatagcgtagaactcaaatcagatatgagaaagggttcgcagtgcaatggtgttatgtgaatatgattggagagggaggtggatggtacattgtttttttttaataaaaaatcttcgtaaacaatctaagtgagaacctatgatttgttgttttctcattataaggatctttaagacatgacatgtggtggcttaagtttttttataaagagaaaggcaatctaatagttaaaaataatgggtcatcaaattaagtggaaaccgatggatagatatatactttattttctcttggaatttcaattttttcaaagttttaaaatatcatacatggtgacttgagagtgctacagagcacgcttaatcgatctttactatgtaaaacgattcaagaatatataatatacgttttcatgtttttcaatgtttcgttgttatttggtaaggagattttatttttattgaggtatatttaatgccttcatcagtttgaaatatttatgtctttaaatccaattgttaaattataactcgactgatttaaatgaaaattgatgaaattataagtctgccaatttaattgaaaattgatggttagatttgttttcttcggatcgccggccgagtctcccccaggcccacggctcggaccgggccccctggagccaccacccctgccggagccgccggtccgactgccgcccgtggtggcgccgctgctacccgtgccgtcgccaccgccaccaccggaggcgcctcggcgggaccgacccctacagcaccgacggccgacatcacagccaggatattctcccggtcgcggtcgctgcagagggggaggatcccgtccggaatcagcatttgctcgacggtgtccaggcccagcaccgccgaaccaccgtctttgcgtcctcctcgccccaatcccagcgctcacctacgtgggtgcacatgggatcgttatacctggtgtactcccacgcgccgcgggactgctcctggagaggcgtgatgcgacggcggaagtagtcgccgaacaccatcgccgccgttaagccctagcttcccaggcccttgaggcggtcccgcaccgcgtcgtactcctcgcccagctctgaaactgccaaccacgcggcagatcgttcgggagggccggtagggagccgaagtcgcggacgatccggcagcgcagtgtagaaccaatccttcttccaatcctcccacttcttgcggaggtcactatcgatgtactgccccgccacgcctggccggggctggaagtagcatcctccccctaccgcgccttgcagcagctgtgggacgaggaaggactggaacagccgcattgtcggccgcaccccgacgaacatcttgcacaagtgcgcgaagatggccagcgtcatcatagcattgggggcgagatgcaaggcatgaatttcgtagaaatccaagacctcgtggaagaacctggagaatggcaggatcaaccccaccatggtgaaggataggaggtgcacggatcgctctgggtaccgtggctgcggccgcgtctcccctaccctcacggcggcatcctctggaatgatcttgcggatgaggctaaggtgcctctccgccgtaatgcgcgatgccgggaggacggcgtcgccagcatcttgggccatgatggccagcgggaaacggcgaggagtttggcgtacggaataggatggagggagagaagcactagggcttgaggggcgagtatgcgggtgtgcagtcggcgagaggaaggagacgaactctccgcctcccttcccttttatccccacctcggccgcgctcgcctcctcgtttcacgcccctgcggttgccccatcgattcctgcgcctacggttgcctccttgattctcgcgtccactcatcacgtcgccccactgaacccgcgccccgcggttagtgcgcttgtcagtggcgcactcggcgcgggacatgcggtgttcacgagcacggctaggcgggcccgccgtcggtcccttcgcgtgcctagcaggcgggggagttgaggcggcgttgggtgacgattctgggtgtgatctggcagaccccccgacttttgcgccctaagtgccccagtgaacggcgcacttagtggcggtcaaatcgccattatggctgatgcgccagcctggccacccgacggcggctgcctagtttccccgccggacccacaaccacagcacgggaactcatgaggaaccacgccagaccgccctcagggggccaatgtccgacgcggtgccgggggctactgtcggtgatatgggcccgggggtatgcaaagtacgggggagttaccttcaaatgcagccacgtggccctacaacttggccctccccccacacctcggaagacgcaaaagcagccagggggcctcggggtgccacgtcacgcccctcgggccctcgcgctgccacgccccgaggccctcgcccagctgccatgtggcgaggggagcgcgcggggaggagactcaggctgaacccccatcaatgcgcggcgccccaaccgtttgtcaccgcatttaatgcggtaagggcggacgtgcggtgcggcctgattgacctacgtcaatcaggcatgaccagactgtgaccagcccgtcgccggtcacgtccggtcggacgggcagccgtgtccccacgttcgcccctgtacccggcggagtggaggcaggtatgccccgtcccatcaaggcatcatccggagctccctccacgtgagaaggaccgtcacaagtcttcgttcatttaagagggaatgacagagctgtcctccgtgtcaggcgggaggtggcgctgggtcccactcgaggacggacggccgcttagcttctgggcgaaggcacagatcgtggtccggtctgagtagagtgggtccccctcccgtgatagagtaggtagaagcggtgcatgtagtatccccttgaactataaaaggaggaccttgcccaccgagaaaaagggacgactcctagtaggcctaaaccctaggagaagaagagcgagagtgctctccagagtttaggaacctttgtaacactcaaccataaatcccatccataggagtagggtattacgctccatagcggcccgaacctgtataatcttgacaccgtgcacgatctcgaagcactcagggcagataaacgatttcgtcaagcgtgccttttcccccggccaaactcacaaaagggggatctcactgtcacccgctagagaggatcattcctcgacagcactagacctctactcctccctgagcatagtcccggtcctcactattgaccaaggctgacctcaagtcacctgcacacaatcagacaaaacaaccgttcctgggcacagatatcacaacctgacccacattagtcacacgcactcacaccaacattcacataaattctcaaaccaattcattgattaaatcatctgcacagccaattgttcatcacaaatatattaatcatgacaatgatttcattaatcaatcatccccgaattgcctccaaatacacaaatcgatcatatcaaatacatcacaaaatcttaaaaaaattacatcacaacttctacaaaattcatcacaaatccacatcgcatacaaatcaaatacatcacacaacaatctcagatccaatcaaatacatcacacaacaatatcagattctcccaaaaaaaaaaccgccaaagtaggcgccgcctcgccgcgcgccgcgccgctgccgcgctggccggccctccacgccccgctgccctcgcgccggcctggcatcctcgccctgccgcttcactccggcctggcatcctcgccccaccactgcagtagagaggagaaggagaggagaaggagaggaatagataaggagaggaacagataaggttgaggagaggaggagagaggagttaaaggagaggaggagatacctcgatctgatcggcacgcctctccgatctccgcgttgatcttttttcccggttggtaacaccaaccgggactacaaatagatttttagtcccggttaccaaccgggagtaaagcgtatggcgatcttttttcccggttggtgttatcaaccgggactacaaatagatctttagtcccggttggtaacaccaaccggtacttaaagattggaaagtacccctggagtttttaaaccgggactaaagatatttatagtcccaatttttaatacaaccgagactattgtgaaatctggtcgaccgaccaaagatggtttctccaccagtgtcaagcacaccctccaaatctccatcagcgcttgcccaaggacatcctctcacctgtagctctcatgttgcatgactgtaacaacatgtgcacctgccaattaaaattaaattgaatttaaagtgcactcttgtttgaagcacgatctacaccgacttgtaggattatttctcccaaggccatgtgctcctttccacctatgcctcatcaattcgccatctcttattcctgtcaaatttatttcatcgactgccaccaccgttcgatatccagctaggggcgcactaccataataattagcatcagcaccatctagccatgtatgcaaacccatgtcccagatatagagccacaacggggcagcacctgggaccctccatcaccgccatggtgccatcaacattgaactgttgattgcccctctgccaagaatactatatatgcatgccacacggtgcccctcagtgccttgctcatcattcctaaccattttctcggccacccatctatcttccactggcatatccacccccctcccaatttgatcatgcatgggtccacatgctcaatgaacggatcatgaggaggtgactaattctcattatctataagttaaaatggctgctttttgggaggcctgcatgccctacgctagcgaaacaaccgggactaccaaccttgcatctatttaaagcaattgtataagagtccttcaacgaaaatggctgccaacgatctccatgctgcaccacacattttcttaccaccccctcccccctccaccataaatatgcacccagctgcaacatggatcaccgaacacatcgatccatccctctaccaagcaagaaacaagaaacattacaccaaaaaactagctagctagccaatggcctccatgtcctccttccgacttgccgtggcggtggctgcactattggtcattggctcacatgccacagagctcaccttcaaggttgctgagggctctagcgccactagtctagagctcgtcaccaacgtcgccatctctgaggtggaggtcaaggagaaaggcggcaaggactgggtggggctcaaggagtcgggctctaacacctggacactcaaaagtgatgcaccactcaagggccccttctccgttcgcttccttgtcaagaacggtggctaccgtgtcgtcgatgatgtcatccctgaaagctttactgccggctctgaatataagagtggcatccaactctaagtaacaggcgtgcatactcttgtgttgggtcatattggaattatgaacctctaaataattatgtcttaaaagagatcgctccatgttcgagcgaaccattaattaattttctattaattaattttctgtggttatttttttgtaatgggctagtggcaaaataaggcatacatgtgtactccaaaatattgctgtggagctatatgcaaagcatggttttgaatatatgttatttatataagatatatgggaaaaagtatatttggtcaactttcattaagatgattgggtgcattatttgattttccaaagttttagtacataggtatgtccaaaccaatgtgttcctttcaccattttagcgtgtcaaaaatattgtagagtgacatctatacttgtttttttttttcctttctgaaaacaaattgttgattctcagccatactatgaactgaaactataagcactagccatcaacccatactatctaattatatcatcataaatattaatactttagttgcaaatgaatatttgttttttgtaattacaatagctcttatgttaaattaaaataagattttatatgaattatatataccttgttaattagtgattcctaattaatagaatacttagtggataaaattcatgatttttaattcgttttgactatgacttccaatggcatgttttcttaatacaatgtcccaatatattattgtttgtattataaataaaacaattttagtcatttttatccctcaacattggtaaaagaaaagtaatttcactgaatttgttggaggaatcatgtattttctgaagcaacgactattaatagaaacataagttattgaactgggtgaagcatatgcaacagataatatattatagtaataggataacacacctatacttatcgtgaaaacctgacataaaggatcaaaatcaaataacatataaacattataacatatagtgagaggacaccatgcactagtaggtatgaatggattcttctaggagccaaatcaagaactcttctatactgtcctatcctaatgcatatgaaatcagttattatgattcttaacattacttgttttggcccataataaaaatatcgcttataaattttaaaataatagaaaaaactgtaggatacattagtttttcctttgatcaccattggggaattgcaataatcatctattaatttggaaaatctattattttaaacaaaaaatatataatcattctctcttccatgatctagggaaataggaacaaaaataagccatgtctcgccacataccatttggaaaataatctattagtttggaaaaatcattataaacaaaatatttataatgattctctcttgcatgcatatatgtatgtatattactcctacttcactaaagccacgcatgcatcattagtggaaaaacctgctagatgcatgcatatttattgatttttttccttgccccagaccatgcatgaccgcctttataatgcaaattttccagtgcataaactaaatactatatatacagatagtttcagaaggtctgaacattttttcgaacataaatttgaaaatttttacaaaataaaaataaggatagaaaattcataaaacatagaaaaaatacattgtaatatattatatactcccttcgtccaaaaatataatcagtcatagacttcaaattttatccacaaatactagtatgtagagagttgcgcgtttgcgcggccgtaacatccctgtatattaaatgtgttatttgttatttacagtaatcaatttaattttacaataataattaacactctagatgtaggtgtgtggaccaaaattgtcggacactgaagtgacaatattatcatgacaaccaataatttaacatgctttcatgcgaccatatcacctttgtatttatactaatattgtaaacaggtaattagagaaacatatggtacatagtttagtattattgttctaaaataaacaatgttattgttacaataaatgattacaaatgaactatctagaacatatttcataagttttagtagtgtggctggcgggatggaaggccggtcagctggcagcaaagccagagacagaaggtttggatgcagttttttttttttaattaaaagaaaaatcaacgtatctatctagactatccagttgtttctctgggccatgatttttttttatttctctaactttttttaagcatcaatttgattggatggctatgatcttttcttctactttgtccttttctgaatcaaatggttcatattatcctgatcatgtggaggatttcagtaaagttaagttttggttttaactttcacttagagagatgagcatttaagtgtacaacatccatcactcaaccacctctcacttaatatttttcgataaaccttattgctaataataaatgttcatgttcctacactgtcgatgaatgatactcgtataccggatgattagggtattagggtatgttagaatgatgatctacgtaatacgacatcaagcaaacagaagacaagaattatactggttcaggccccttatcaggtaatagtactagtccagtttatatgggattgatgattgaaaaccgcatatttcaatgggagtagaaaaattcgacgataccggcaagatcgtagttgatgtattcgacgagatctcccggtgacttggctccgtgtattccggcttcgtaaactatggtgggtgtgttagcaatgagattcgatgccttgcaccccttcccaggggtctcttttataccgtgaatcatcttgatctctatgtaagactcggaaacatcggatcccgtacgatacaatataaattttatcccctccaagtaggactttggaaatcacttaactcgtagagatattttccataatttgtaacggattcctactacatgtatagatacaccggtcagaccggcggtacagcagcggtcagaccagtggtacaactattttggagtatagactcgggaacatcagatctacaatataaactttatccccttcaagtaggactttggaaatcacttgactcgtatagataatttacatattttgtaatggattcctactatgtgtatagatacaacctgtgtacgtgaaggtataccatacacgtatattctataagtcgtaagataggaggtatatatgccttatccgtaaccataacactctcttatttaaatttgtcttatttttgcgttccttcctaatctctaaagaaacttgacatcccatatatttaaggatgtacaggtgaatataaatataagaagaataataaaagtagatcaaatatagataaaaaagttagactatgcaaattgatggaatactacttgaattgtacgaggctaccacactatggacctttctaaatgccagaaaaatttgtaaaagcaaatagatggaacacttttatgaattatgggtacgatgacaacggattggcttcttaggtgcaagcaaacttgtcgatcaattttaaatcaaacatctgaacatcaaaaaaatatatatggtaaggtgatgacgtaggttaacactcctatatattagacgtgttgtgacagatgagaaacatgcatgtaaagagaactgaactggaaattagaagttagaatcaaaccttaataattgatagaaaatagcaatagcgttcacctgtcgctgtgtgcatggccatgccgtgccctcccatgtttgccattgcgtctatctgatcagatcgatatgcagtactacattcgtctcattttaagtgtagtcatgatttttcatgcgcaacgtttgaccattcgtcatgtttgaaaatttcatgaaaaaattaaaagaataaatcatgcataaagtattatttatgtcttatcatctaataacaacaaagatactaacaataaaaattttaaataagacggataatcaaacatttgacacagaaactcacaactgcacttaaaattaaagtgcattggcggtccttaatcttgtagggttgtgtcatatagatccctaaactttcaaaatgcatatccagatcccagaacttgtcaaagtgtatcatctaggtcccaaatcgacgcatcccctctaagatcctacgtggtgctgaggacgtgacgtgtccttttctttttttttcttcttttatttttctttttcttttccgttttcttctcattcttctttttttcctttcttctgctcgggtcacaaagaaaggagaataaaggggaaaaagagaagaaaaaaagaaaaaaaaattaaatgggtcctatttatcagtaaaataatgccatgtcatgtccgtgtggcatgtcacatcaacgccacgtaggatcctaaaggggttgtggtaatttgggacgtagatgacacactatgacaagttctgagatttggatatacattttaagagtttaggaatctaaatgacacaccccaacaaatataaggactgtccgtacacattactctaaaattaaaatggaacggagagagtagtacgtgcaagctgtggaaaatcataaaaggactgttgtagagctattaattaacgtagatgtttctgtaatgtatgttcgttgtagtgcatgcttaatacgagatgttttggaaaaaaaaagagatatcagtagcatcccagtaaatatggatggccctgtataccaccaccgattttagactgcttgatcgatcggtttagaaaaaaaaaagattacgcactttcataaaaaggaaaaaaaatattgtacttaaacggatcgggtcaatgggcttggcaataggttagatggattttaaagagacccacaccacatagaatgtggattcaaatttcaacggttgacatattacaatctgtttaatcaacggttagatcacatgagaggttctaaaaaagtgtctaattaatatataggtatagataaaacatcagtacattgtatagtttattgagatgtcaaaacaaactgcagtacgactgagtggtaataggtaggatggaaatgaagccagctttgagaggagcaaaattaagcttcatatcatatagttggccaatgccccaagctacagtcaacaagaaagtttgtacccccgtcgttttttaatagatgatgccgttgactttttcacatgttggatcattcgtcttattcaaaaattttatgcaaatatataagatataaattccacttaaagtactatgagtgataaaacaactcataacaaaataaattataattacctaaattttttgaataagacgaatggtcaaacatgtgagaaaaagtcaacggcatcatctattaaaaaacaaaggtaatataatactattagaataccaatttattgcaaggatataaaataaataaaccattagttacaaactttaaatagaaatatttttgcactactagtataccgttagttccaaacatttgaacgcaaagaactagtaaatctttcacgtgaaaaaaatgtagtggtggtttacattctatagtccatcgtgtaagcacaacctcactcccacgccctctcgagcgactcctagctgcacacatgatgtctgcatgatgtcctttcccaggcgcttgcccatgaacttcctgtgacctgtagctctcatgtcgtatggatgtaacagcatgtgcatccgtgtcacgtgcaattccaaaattaatttgtgtattaaatcctcgtcaaaaatcagtcaaggtacacaaacttattatttgatcatacaatagaaaaactaaaacaataaattcttagtcctcaccatgacaaaaaggtaacaaaaaggaaaaactaacaaagctttaaatccactccgacaggtagctcaactgaggcatactcctttttcaactgagattgatgattattgcaaggtgggtatataacgtagtccataggccacacaacaaattaacgaatgatctaacagagccatcataaagtcatagctagtgaattcataaccccgggaaacaaggaataaggttaccagtgcaaattggtcataacaaaggaataggtgcacaccacaaataaatacatgtttgaaataaataaagaatttaaatataggatcaacctgctcaaagggaagtttgagatatgtccgacttgccatgcaaacaaatgacttcaattcgtattctgaaacacttccgacaaacttgtgatcctccgaaatgatagaactacactatagcatgcaaaacaaagaaaaagactaataagaaaaaaagctatagcgtacaagagttttcaaggtaatttttttgtgaaaatctttaaagtcgttgttcgtccttcttttgaattggagcctcccaatccatttatttattttattcattgagtttcacccccccccccataatctgatccattttcccttcgaaaccaaaattccaaatttcaagaattctccaaacgatctctgtgaaaatcattccatcaattcatgtctataaactcatatggaagttctattcaaaatcacataaaaattgaatgaccactatatctctccctgggccaaaatcaaccacaatccaacccgtcaccctctgtgtcacttcctccaccatctccctagctctgtcctgcacctttccagcccactgccactgcaccccaacaaaggcagctgccccaaccgagtttattacgtgtgccacacaatgcccctaggtgccttgccatcgctcctcccgaccattcgctcgaccacccctctatcttccactagcatatccccccggcccctaatttgtttgtgtatgggtccatatcctcaatgaacggaacatgaggaggtgactaattctcataattattaataagttaaaaaattacgtggagaagagatgggaccgcatagatgtcgtacgctagcgaaacaaccaggaccgtcaaacttgcatctacttaaagcaatagtatgagtccctcgatgaaaatgcctaccaaagatctccatgctgcaccgcacatccatgctaggttttcataccggtccataaacactcctttagggagatgcttgagcaataggcccaagcagaactaggctttccccaagtccttcatctcaagctcaatattaagataagccattgcttgtttaatgtcctgtgtggtgccaaggatatttagataattgacatagaccgagatgatacaaaatgcattcagggatttctttataaacacagggggacaatcataattgtttgggaaacctctctttaggagatatctatttaattgattgaatcacatccttccggattgttttgatccgtacattgatcgctgcaggcgaacaatatagatgttgcaatttcctttcggatttgggatcttgagtccttcagggactctcagataaagttccaaatctaatgccccatacaagtatgcggtcaatagatccatcaaccgcatgtgtcggttcacatgctccatgaacagatcatgaggaggtgattaattatcattattctaagttttaaaaaaaataagtagagaagaaatgggaccacatagctgatttttgggaggcctgcatgccctaggctagcgaaacaaccgggaccacccaactagcatctgtttatagcaattgtataagaacccctcaatgaaaaagtctaccaacgatctccacgctgcaccgtgcatctatgcctagtttgcttaccctccctccaccataaatacgcacccaactgtaacatgtatcaccaaacatatcgatccatccctctaccagtcaagaaacaaggaagattacaccaacaaataaactagctagccaatggcctcgttgtcctctttccggcttgccgtggcggtggcagcactgttggttgttggctcatgtgccactgagctcaccttcaaggtcgctgagggctctagcgccagtagtctagagcttgtcaccaacgtcgccatctctgaggtggagatcaaggagaagggtggcaaggactgggtggcgctcaaggagtcatcatctaacacctggacgatcaaaagtgaggcgccgctcaagggccccttctctgtccgcttccttgtcaagaatggcggctaccgcgtcgtcgatgatgtcatccccgaaagcttcactgctggctctgaatataagagtggcatccaactctaagtaagaggcatgcatactcttgtgttgggtcacatgagaattatgaacctctaaataattatctcttaaaagagatcacgccacgtttgagcgagcgaataattaattttctgtggttagttttttgtaataggctggtgttaaaataaggcatacatgtgtactccaaaatattgttgtggagctatatgcgagcatggttttgaatatatgttatttatataagatactaggtgattccccgcgctttgctgccgaaatttctaagtaacttttaatattttttttaataatcgatctaaaagtaaaatttatattagttattagcaacaaataaaaatggtttgtcaaactatgttcagagagaaatatgatatgtatgagattgtagatgaaatatgatatcccacactttgattatatgaatgaatataaatgttaaaaatattgtgaaaaataatgtgaaggaagatgattggatgttgatttgtataattcaataaattatagatgatgttgcatgcttgcataagttttgcatgtatttattgctagtggatgatgaggtggcatgtttgcatgttgagctttagggttagtgggtcataactttatagtaagataggatatgggaaaaagtatatttcatcaactttcatcaagatgattgggtgcatttgattttccaaagttttagtatatacgtatgtcctaaccaatgtagctcatttcacctttttagcatgtaaaaaatattgtaaagtcacacctacacgtgtattttttttcttttctgaaaacagattgttgtatcaaccatactatgacctgaaactataagcataaagcatcggtacatcgtttagtatattcagatatcagaacaaactgcaagtcacattaatctcacatatccaacacgaatgagtgataatcggagtagaatggaaatgaggtcagctttgagaggagcaaaattaagcttcatatcatatagttgggccaggcccagagctatactcaacaacaaagtttatatactactatgagaataccaatctattggaaagaatctaaaataaatatgccattagttccaaactttaaatcatttttttttacattaccagtgtgttacaaaggatctaaaaaacataccgtttaattccaaacattcaacataaagaacaaataaatctttcactcctaaaaaatgtagtggtggtttatgatctgtcctccatcatgtatgcctaacctcacgcccatgccctctcgagcaactcccgcacgcatgatgtccctttaccctatgccaatggaaacagacccccaacccccaccaccagatcaaattatacttcctacgtgcttgaccatggacctccactcacctgtaggctgtagctctcatgctgcatggatgtaacaacatgtgcatcccgaactaacttgtgcattaaatcgtcgtctaggaaagtaggaattagctgaggtatacaaactgacaatttaactatatagtaccaagaaaactaaagcaattaatacttacaaaagaggctattagtcctcaccacgaagacaattgcagcgaaaaaagaaaaaactactgaagctttgtttaggtgatgattggattcactattattttatgttttgattattattctgtgatgaacaattggcatatgtgattattggttttgatatttggagattatcgtcgaagtggttttggagataatcaatttttaggtgatgattggattcactattattttatgtgaccggtccgaccgggctgtgtatgccggtcagaccggcggtgatcgagcagtcagaccggacggcccgcggtctgaccggccgacagtgtatcggtttcggtttcgggttgttccataggatatccgtgattgtttcatagctatggcttttagatggatactataaatatgtaatactggtgtttgctaacaatgagtcgagttggggatagtttggtctcggaatatggtttttttgtttgtttcatgtgtaggtgactcgatgcctcgggagagtatttgcagtgatggactgggagtcggcttggtggtaagacgatgtccgtggtggtcagatatcatgcgggatactaaggctagagttgatgcacgtggttagtgaagattccatatggcatatgatggaggtattatgtgcatatgggatgcggagtcgaatttggaaggagtccaaatttgatacaattggttatgttaagtttgtgtcttgtactagagggtttcctgaggtgtttaggactcttagtatgagtttggttcgtggctttaggctgcctacctcatgtataaatagagggggagcgtgaggcttcccggtatcgtttttgtatcgcttttaagagcaattgagttgatagtttagttagggtttcgagtttagtagagatttttgtaaggagtgttgttgttgcactttgtaaacacagagagaagcaataaagttgtcatctactttaagagttcttcgatttgtgtttcaccgggtttcgacggtctaaccggcgactcactggcggtcagaccggcgaagcaccgacggttagaccggctagggcgaggcggtcagactggcggcgacatcaggcgcggcagggattccagggcggtccaaccggaagatcaataccggtcagaccggcggctacgcttcggtcagaccgacagatcaatctcggtcagaccgatctccatcgatttcgagggtaacttttatttctgctaaaagttttcggtttttgggtataccaatcattcacccccccccctctagttggcttagttcttgtgattcgatcctacaacatcgaacgtttaaactcctgcatgaagtattaaatataggctaaaaaaataactaattgcacagattgcgactactttgcgagacaaatcttttaagcctaattgctccatgatttgacaatgtagtgctgcagtaaatatgtgctaatataatgatggattaattaggctcaataaattcgtctcatgatttactgacggatagtgtaattagtttttttattactgtgcgaacaccccatgcgacaccctgtataatatccgatgtgacacgctaaaactttacacacctggatctaaacaccccctaagtagagaatcgcttagttatttttatgcatttactatttacaaaattatttggcatatccgtgaatagtgtggatgactgacaaacctgacacacagccggataagctgcccaattgaggagcttctgtaccatagaaaaatacatgtcaccaattgcgacgagccaaaaaaattcaaaaaaccgaggaaaacgtgaacaaatttattgcccaagttgggtgaaaagttttatatgagaaggtcaacaaatttgttgcccaaattctaatgcctgctgttaatataaaatttaattcactgctaatttttttgtcacgaatttcatagtcaaaatagataggaaaaacaaaaagaaaatagaataaaagagaccaggagcccgtttgtgtgttaggaatttccagtaattcattaactcatgcatatataacactaccacaatagctatcctgcttcagttttgctggtaggaagaaaatggaaatattccaaaacactagaggggcagtgtattcgcgtcagattttcaaggtttggaatgcgaagctttggggattctagaatgtaaagaaagcacaaagagtcttggatatttaagaccttgcaactatttaagaccatgttggggttcctagaatgaagagattaaatgggatcgagaggattagttccaaacctcaataggtatggaatacttttcctccaaattaataacctttaatcccagggtgacatgaacgtagtaacaatgcaaaccattgtccaaatcatacagacatgaacataggtgacaatgcaaaccattgtccaaatcatacagatgtcaaaagacaggtagcaactcgttcagtcttcataatcttcgaagaacaaacagtagcaccatacagtgagaaatatcagatttgctctgcagcatcagttggatggaaataaccacactggaaaaatcaatgatttcctcaggaacgccaatgttgcaaggtaacaatttgagagcaaagggcttcatcataccatttcttgtgttgtagagtacaaatctatcatgccacaccacgatgttgcaacttactgaaccacttacaataatactaagcagaatgggatgagggcaacaacgacgatttggttcatcctcatctctcatatcttcatgaacaatatcaaatgtgaacctacacatacaagattggcatttgacaaaaaaaaatacagatgcaatctacaaactacaattgattaatgaacaaaaatggtaggaatgcaacatatcatttgctctagtttgagataacggaggtaaactttttcactctattattcagttctaggaaatattacaaaatatcatcttcagtgattgccaaaacatctctctcaatatgattcaacctatcattccccatcttatttctcaactcagtctattgacaattttctagctgaaaaggctcttttaaccttgtcagttacaacacagcaggaggtcacctccaccaagtgtccaaactccaaacaatgtttggttgtcacataggagtttcaatgtgtgaaactcaaattgaagcgagctttcagtggtcatgttctctgcaagcaaaacttatctcaaagaagggatgtaataatatttatgaatgcgattaatggtatttgtcctcttgttttatttctcttatagttgctaaaagagttaaatgttgaagtagaaccttccatattaatatttttcggaaagaaagaaaaatctgagaattgtgacaagagcatagcagattatacatgttatagtcatgaccaaagagtctaatgacaagtaagctctgtcttgataagagcaactagcggcacaaaacaaccagttagatcagttttgctgtgcagcatcattcggtaggaagtaaccacaccgggaaatcacgactcaactggtccacatcaaattcggaagctaatagtttgacggcaaaggacctcatcttaccatctctcatgctatacacaaatgtatcataaggcttccaatcatcagggacaaagtagatatggtcaccttcaactccatgatgtagaccagcaggaaaggacttgcagccacctaagccaacaaagatacagtcaccattcaagctgtgaatctcagttagtccataagggtttgtgtcaacatccagtgcaaacacttcatttatgaagttgtctcttacggtaatcgccattgtagtgtctgatgattaataatagctctccacgccacacaaccatattgcaacttattgcaccaccttcctggtagggatgattgcgaggcagctcagtgagagagctcaatacgagagaccatgaacccacgatcatcctcctcaagttcacaagtgaataggcgtgtcctgtgcctcatgagcatataaagcttcccctggtagaaggagagatctcttgggccatcaatctcaactccagagcaaacctgccatgaaatcatcccaggctgccagagagctggtactggtgcacccttgtggtctgaggaagcagccacgatgtacttggatgactcaggtgaagcagatagtgccacattacatagtgacattgtgtatatatcattgacaccaaaatggacctcaccagaaccattgacgatgcggagggtcttactggagtaagcaggaaaattgtaacgcatatggcacagctgcggtaggcgaatgaccttgcgagagaaaacattcaccaggaagcagtcaccatcggcatctctgttgtactcgtcgctgcgatccttgttaggagtcacacctacaagccatccatcaaaataacccacacatcggagatcatcagctgcaacttccttaggcaccggcacgcaccgcacaggcatcaaatcccccttgtctgataggctcgagaacttgaaaccaggaagcatcagcaggggcagcggcggtggcaggacgtggccgttcgcgctggctcgccagtgacggcacacggaccgcatcctcgcacggtcggcaaggcatggaaggaagtggagcacgattcccagaatgtccggttgaaggcctgcccacagtgacacccccgcgtccaactccaaccttgatctcttcttgggcattccgccgagcaccacacctgcacgagccaccgggtgtcactgtcacgctccacagcaaacacccacccacggccaggaaaatacgcaataacacataggacttaagcaacacaccggatctgtccaagctgggatccatcgccgccggcgactgggtccgcggggatccttgttccgacaagcaaagatgcattccgtcgaacagcttgcctgcacgacaaccaccggtggatgtggatcagcttccaggcagcagtgcagtgcagcacctcgtgagatacgcgaacaggtagaggtgaggtgaggtagctctcacctgagtttcctccggtagaatccatggcgaccggaggttttgtggctcctcgccctcgcctagggggaggggaggggagggggatcgattgagggggagagagagtccgaaaatgctaatgggcgcgcacgcgccagatgcgttgctcgcgcagacgcgtgctgctgccggctaggccttatgggccgctgttggaaacagagcccagaaccaaatcatgattagtatatcgagcaactaatgacttcacgtgattaatttcttggaaccacctatgcatctgtcgggcaaaaatcacccagatttttccttgcctttagattttcatccaatggagtaaaaaaaaaccgaacagacagccaaaaaaggccaaaaatgactgggccaacacactaaaaaacagataaaacatgggctgcaattggcccaaacaacaaattagaaaaataaatcaaacaaagaacagatctgagaggcccaaagaagtaaagtcaaccctgtccaaaagtatgaacttagctgccaagaaagctaaaagaaaaaggacaaacacaaatccaaactaacacaccagatccaaaaaagcaacagcacgcacaccatagagaacgagtaggagagaaagaagagaaaaaaggttgaaccaaagcaaaattcttcaaatcaaagtgaaatcacaggggagaaacaagaaataaggaataaatccaaactaggtatgttccataaacctatgctcatcctcaaaattgactacaaatcttagatcatagcaccatacgtgcccccatcccatatgcataaggagtgttttgaacaaaatacagggcacagttcatacactgaaagtaaaacttacagtgcatttgcactaaaattacatttgtaaaaacagtatatataacatgtaagtgcactgtaagtttagtacaaatgcactgtaaaattatcaatcaatcaaacaagtagaccatacagaacaacttctgttgtttactacctaaaaactgaatacatctattcaaacatgaactcaggagttccagcaccaaatacatcatatattccaaaacatatctgtatcagttgggcagcacaaaaaagaaaataaaaccacaatagtaagtagtatggtgatatgggttagagacaactaacctgcatgatggctgccgggtttggtcttgatgctggataggatagttgagatccatggagtcagaactaaactaaaattaagagaacacaagcatgaattaggacatgttccacagtaaacttcagttacaaaccaattggtatagcgcacaatccatatgaaaaacaaatatatgcacaagggataaataatgaaaaacaagttcagaaactaaaaaacaacccaccaaaccaatttcacattgatatatgctcaaaagtagaaatttacattgcatttgcactaaaattacatttgtaaaaacagtacatatggcatgtaagtgcactgtaattttagtacaattgcactgtaaatttgggtaacataaatttttgcattattgaagtgtaattgataaaatgatgcttgattagtaatctgtcatacagaacacctgcatatttcactcctcaatactaggtattcactcatttaagacaaatggctggataaaattttagtgatttccaatttggaactagcaaaacagattcatagttctctatatatttggcttagaatatagaccatagatcacatttaatattctcatacagaacattcaggaattatataggagtaggaccctccaataatccattcaaatcaaatctaggattaaaagaatatcagtccaagaacatcatagtaaacaatctagggtactcaatatcttggaaatgtgtgatgactcgatctgccatataaacaatcttagtacatgcagagcccgatccacaatattttagtacttatttcactaatacaactacaagtatatatgcattatacaacagttacatcatcattgagaatcatttatgcacatcaaatctatatctctagatcaggatagattcattagatcaacataactagatgatacacatggaatacaaaaattacagtcctacataactaaaattacatttgaaaattcaggtcattgtgtatgtaagtgtactgtaatttttatacatttgttgtgtaagttataatgtattactctatgatgtattgctgtattctaatacattcaataaaattttgcagaaatgaagtcatatgcagatcctgtcaaaattagcatcaggcagaacaaggaatctagggagacaaacaaggaaaaactacaattaggtattttcttttaaaaaaatcacatactatgttgatctgaacatcatgtagaaattttaaaaaatatcatagtacaactttgaaaaaaaaatcacaggaaaatgttcagctgcagggtgaaggatgcaaaatattaaaaaatacattaagggttaaacactactactttcacaccattgttatcaaaactagaaaagggttaaacactcaaaacacattaacatagcacccaatcttaaatagcactatccatgctgccatacatatgcaaaatcaaacactggaagtagaaattacagtgatttgaaattaaaattaaaattagaaattacagttgtaaaaacaatttatattgcgtgtaacttcactgtaatttttgtgaataagctatgtaaataaatatgtaatacttaacattctagtaagatggtttcagtggacatgtatactaatttattccatgaattttgcaagaatgaaatttactgaaccagtcaaggttggatccatggagaaaaaaggtattgaaacactacactacttattcaagtacaaaacatctcacaatttcaaaaacttcaactacatagccaaatataataatcacatatataccactccattcacttgccactcaataccaaacacacataaatacaatcacatatgtgcctaaatacaaaaattttaaaaatatatgcaaaaccattctaggctaacaatcataatttgacctaaatattatggccaaaaattacagtgctttatatctaaaattacatttgtaagttcagttgatacaacatgtaataaatccaaaaagtataaaacttacagtgatttataactaaaattacaattgtaaaaacagtttatatgacaagtaagtgcactacaaatgtggttcagtttataactaaaattacaacaatttatgactaaaattacatttgtaaattcagtttatttgtcatgtaagtacactataattttggtataattgaagtgtaacatgtatgtgtattgtaattttggtgcaaccacaatgtatttgaaaaatatattcatgtttgacataaaacatgcaaatgccacactaaacatatactgctaaagctcaatacatgctaaaaaatacaaatgattctcaaaagacatacctatttaacaaatcagtacctcatatacttcatttctcccatggcacaagtcgtgaagcaatacaagaaggagaaacaattagacaacaatcagaggagagcaaaaatgatgcaatgcagattgaaggaagcaaaagaaacatcaacatggctccaggtcagaaaatatatttggataaattttgctctaagaataaataaaggtaactacaattatgtttgttgattctaacatatgctctaatgatttatataaattttacagggaggctggcatatgcaggaagtcctaatatctacaatttgcaggagggtgaaggaagcagcaacaaaatgccccatttaggtactaactaagtttctaaactaccaggtcgacaagctccaacaaaacaattgcaacatacactgatctaatattctgatctttatctttttcaaaatgcaggatgcaggaaaatacaacatgtaggaaaaaacttcaattcaccagaattaagcaataccataggaacaattgcatcagaagttgtcaattatggaggacaaatgctatatgatcaattcacattgctaaactcagacccaagataggtacactaatcaaaaagcatagatgtagcatataaaactattttatacatgcagttataaactaataaacatataactgtgcaggaaggatagttgagctacactaacctcatgcaccaaataatttatagtccaactgtcaccatacagcaacaaaccgtaagcatatcaacttacattatatacctgacaaaaaaaagagaaaataataaatgaacatgcagcatttgatgtaagaataaaaatttatgaatacttatgtaacaattccctaattagtcatttaaatcagtactaactactgttggagacgaggcttgtagtccttatgctcttttaaattgtgaccaatttgtcccaacttgctttgaatcaacctcattatgtagggaacataatagatttcttgtccaatagtcccctttgagatggcaatctccttcattataacgttgataacatcgaaccgacgaccatccataatggcatcaatgacatgccaagcaactccgcgtatgtcatcattgttgccgcatcttgggaggatggtggcccttactatgcggttgatcacacttgggagagccctcaaacccgccacctttccatatgtgtgccttcccccttcttcataaaactgagaaagatgatcaatggagaaggggttgtaggtgtgctcatcatgaaggtcatccccgttgttgaagcgaatgtgcaagagctccttgaattcatggcggttgatagagcatcgaagggtccccgacatccacttcattgcatcacaatcgccggacacccatacggtggcatagaattgccggatgagatcttcatcaaaaggttgcttcatggtgacaattctatcaatcccaacggtccggaacatctcttgcaaatcttcaaacttcggtgtctcaccaatgtgcctccaagaaatccacttgtgttcggcgaaggctttgttggcatacacttgttcatacacggacttttggaaccatgtatgaaatcttagatcattacaattgttaggcctccggaattgatcatgatgacggaggatagtgtattgttgagcattcctcaaatttagcacaaattggatggtggaatcgagaggactcccatcatcacttgcctcatcatcttcactattgccactcccattgtcagcaccatcatcacttacatccatctcattaccctcaacattttccatattgtcgtcatcactttgaacatactcatctccgcttgattcctcattctcactaacgggatcgggcgtgggctcatgacgaccatggcgagtgcggggaggcatagctgaaaaacaagaagcaaaggatggataagcaacaattttagaaaccacatagtgaagtgggaggaagggcgagtgctgcctgtcaggggcggtcagaccgagagccacggccggtcagaccgccggccctccgacggtcagaccgcgggcccacggccggtcagaccgacggcgaatggccggttagaccgctctcggtcagaccgccactgacaagagcacacccaaatccttccacaatccacacaaatgattctaaaaattgttaggacagtgttgcacacgattggaactagaacatcaaggtgtaggtctatctcatcaagattgaagcaataggggaaactacccttaaccctaaagattgaaatagaccgatttgagagtaatgtacaagagggagaggaatttaccggttgaaggagttgaatcacaccaagaaactaccctctattggtgcaaatcgatgaacaccttttcctttacctagggttccatgccatggatcacaaactcaataaaaactcaaatcaatccatggaatagagagaggaagaggagggaattcacttacggagtaaccggagtgattttggcggttgaaccggatggatttggtggagggaggtggctagggtttgggagaggagagaggagtttttttcgagttggggaagaagaaggatgaatgggaggagatggagtcgggtaggggaggaagagagaagaaaaagacagattctcgggcccaccatccccggccggtcagaccggctatacgcggccggtcagaccaccagggtgcatccggtcagaccgggctctaaaggccgatcagaccgcagccaacagtccggtcagaccgcgcatatagcgccggtcagaccgtctggcccccagccgactgtgcatagcccttgcacagttcggctacccccacataataaaattcaacaaaaaaaattgatttttggagcaattttgaaatatgtgagttgaaatattgccaaccattcataatattcgagatttatgaagatttgcaacaaaactcacttgagtgctaggaggtgaccatttatggtctataggggtttttgggcgaatttgattttcaaacaacttttgaaatatttggattttgaatatgatttgaataccaaaaacatttcaaatcttcttctctaccaactttgttttgaaacttttctcaaattccttctcaatctcattttggggtttaatctcattttggccaaaaacaagattctagtttcttcaaaagagggccaaaatagcattttcattcaaaaaacatttttcttgcaaagtgagggttggaaaacatatagggaaccttttgaaacattttccaagagatggttttcaaattacattgattttgcaaaagttttgacttatgttgacttgggcattttgaaaacattactagcacttttagttgatttgctcacatacaaaaggaagtggagcacatgcaagagtgcaaaactcccccttaatgtgacatgctccattttcgcaatgaagaaccaaatggcaatatatccaaaacataagagcaaataggagcaaatacacaatatgcaaaagaagcaaccatggtgcaccatctcaagccacattagagaagtctatgacatttaactcattcctcaacttgcaaaagcgggtttcatcaagaggcttggtaaagatgtcggctagttgatcctcggttcttatgtggctaatgactatgtcacacttggcaacatggtctcttaggaagtgatggcgtatgtcaatatgcttggttctagaatgttggaccgggttattggctatctttatggcactatcattgtcacataggagtggggttttggtgaaggatatgccatagtccaacaatgtttgtttcatccaaagcaattgggcacaacaactacccgccgaaacatattccgcctcggcggtagagagggctacggagttttgtttcttcgatgaccatgacacaagggatctaccaagcatttggcaactaccggatgtactatttctatccactttgcaaccggcataatccgaatcggaatagccaacaagcttaaatttagcaccttttgggtaccacaagccaatagtagaggaatactttaaatatcttagaatccttttcacggccactaagtgacactccttaggagcggcttgaaaccatgcacacatacaaacactaaacatgatatccggcctagatgcggtaaggtaaagcaagctaccaatcatagaacgataaagctttaaatctaccggtttacctccctcatcaaggtcgagatgcccgttggttgccataggtgtcttgatgggcttcgcatcctccaagccaaacctcttgagtagatctttgatgtacttggtttgactcacgaacgtcccatccttgagttgcttgatttgaagtccaaggaaaaagctcaactctccaatcatggacatctcaaattccctagacatcatatcaccaaattccttgcaaaatacctcattagtagaaccgaatatgatgtcatcaacataaatttggcatacaaagaaatcatcaccaatgatttttgtgaaaagagtggtgtcaacttttccaattttgaaatcctttgataaaagaaaatctctcaacctttcatactaagccctaggagcttgttttaaaccataaagagcttttgaaagtttgtaaacatggttaggatatttaggatcttcaaaaccgggaggttgttcaacaaagacaagttcggcaatttcaccatttagaaaagcacttttcacatccatttgaaatagttttatatcaaaccatgatgcaaatgcaagaaggatgcaaatagcctcaagtcttgccacgggggcaaaagtttcaccaaaatccaaaccttcaacttgtgtgaaaccttgtgccaccaaccttgccttgtttctcaccaccaacccgttctcatcttgtttgtttctaaagacccactttgtccctatgacattgtggtctctaggtctttcaaccaaagtccacaccttgtttcttgcaaagttgttgagctcttcatgcatagcattcatccaatccggatcacaaagagcttcatctacatgttttggctcaagacaagaaacaaacgagtaatgttcacaaatcgaagcgacacgagatagagtttgaacacccttactaatgtcacccaacacttggtcaattgggtgatccttggaaagagtggtgtgtatccttggtggtataggtggatcttgtgccttctcctcctccacttcaacttgagcttgacttggcgtagcgaaagtagatggctcatcttgagtggaggtggatggcttgtcttccacttcaataggcttgacatctccaaatgacatgttcttcatagctcttatcaagccttcatcacctacatcatccaaattctcgtgcccctcttgggagccattagtctcatcaaattgaacatcggcggtttcttccacagtacctttgttcttgttgtagacccggtatgccttgctatttgaggcataaccaagaagaaacccttcatcacaccgactttcaaatttggttagtctaacaccctttcggtaaatataacacttgcaaccaaaaactcgaaaataggcaacattaggcttcctcccaacaattagctcataggaagtatttttcaagagacgatgcaaataaaacctattggttgcatggcaagcggtgtttatggcttccgcccaaaaggaatcggaaacaccatattcatcaagcatagtccttgccatctcaatcaatgtacgatttttcctctccactacaccattttgttgaggtgagtaggtagcggaaagttcatgtttaataccaagatcatcacaatagtcctcgatattggtattcttaaactcggaaccattgtcacttctaattttcacaagagtgcaactaaattcattttgggccctttttgcaatttttttgaaaagctcggcaacaatagacttatcatgcaaaaagaacacccaagtatagcgagaataatcatcaacaatcacaagacaatgactattaccaccaatgctcttataggttgttgggccaaacaaatccatatgcaagagctctaatggtctagatgtggacatgatactcttagtaggatgagaacatgcaacttgcttgccggcttgacaagcactacaaagcttatctttctcaaacttcacatctttcaagcccacaactagatcacgttttgaaagtttgctcaattgattcatgccaacatgggctagccttctatgccaaagccaacccaaagaagtttttgcaactaaacaagttttcaaatttgcttcactagaattgaaatcaacaaagtaaagatttccatatctaaaacctttgaacacacaagacttgtcaagaaggctagaaacaataacttcttgcgggaagaaagcacatgacaagccaagatcacaaatttgagcaaccgaaagcaaattgaaatttagagatttaacaaaagagacattatcaattgacaaatcattggagatagcaattttacctaacccaattacctttcttttgctattgtctacaaatgtcactttctcttgttcattccctcctacttcaaatgtagtgaacatagccctatcaccggtcatgtgttgagtgcatccactatcaagcacccaatggctcccaccggtgtggtagttcacctacaaaagaagatcaagctcttttaggtacccaaacttgtttgggtccttggaggttagagaccaaagctttgggcacccaaatggcattctttttaccaccgagtataggggaacccacatatctagcaacaatgctaccatcatgaatcttcctaagcatataatgagaatcaaatatgcatgtcttaggaggcttaccaccggggcaatcattcaccaaatgcccaacctcacgacacttggagcaatacttaccattgctcttgacaaaacgagtggcacggtgagaaggtttcttacccttctttggaatgaatccaagtccctcattgttaaggatgcaccgttgctccctcaaaatcttgtcaagagtgttcttacccttgaagcacctctccaagctcttgttgagcttagccacttgctacttaagctcattgttctcaacaacaagtgaggcatcacaaatagatacacaagagctagagctagagctagatatatccacaagatcatcacaagaggtagaaatgctagatgatgcaacatgagcaatatgtcaagtagcactatcatcaagcaaatcacaagatatgccaacatcaatgagagctccatgttgagtagtggaaaggaggttgtcatgagcttccttaagcttctcatgagaaatggtgagtctctcatgagaagtctttagctcctcatacaaaacctccaaagaagcatgatccttctttagggccttgaacttgacaatctccttctcactataagcatggagctcctcaaacatactcacaagctcatcataggaaatatcatcacaatcatcatcactctcactatcactaagagatgttaccttagaggagccctttgccatgagacaaagtggagcgaagagtgatggggcctccttgatggcaacaacggccatcttcttcttcttggagcttgcatcatcaccatcttcttccttggacccggaagaggcggagctctcctcatttgagtcccattccccgatgaaggcctcaatcttcttgccttccttcttgagcttcttcataagcttgtagcctccactctttttttttgatgacttgtctccatcatcatccttggaagggcacttggaagcaaagtgtcccttctcaccacactcaaagcacctcaagttggagagagtcttattgggtcttttatttcttctcctatttgagttggagccctttcctctctcctttctccttcccaagaaatcattgaaccttctagcaagaagtgcaatctcttcttccaagttcttattgacgtcattcaccttgcccttgtcttcaacttcagcttggagagcaatgcacttcttggaaggtgaggcttcctccatttccttcttcttcaacttatacatgtcattggtgttgatcttccccaagaggcttgccggtgtcatccttgacatgtcagagttgatgagcatggtgacaagggtctcatacttctccggtagagccctaagcatctttttggcaacctcaagatcggtgtagtttgccccaagccccttgagatcattcacaatgacattgagcctcccatacatgtcattcacactctcatgaggcaacatggagaatgtctcatattggatcttgaggaagtgaagcttggcatccttgtactcacttgtgccctcatggatcttcgccaacttgttccaaatctcatatgcggtctcaaggttgctcactctatcaaactcttcttggctcaaagagttgaacaaagcattcatggcttgggcattgagttggaggttgcggtgatcaatctccgtcaagggcgtgccggtgattgcaaagcctacatccacaatactccaaatatggaagctcatagctttgaggtgagtagacattttaattttccaagtggaatagtttgtgccattaaacatgggagccttccctacgtggttcacctcgttcgacatcttctctctaggcggtgaagcccaatcaagagagaccaagctctgataccacttgtaagatcgagatgtcgactagagagggggtgaatgggcgatttaaaactaaatgacacctaatcaaaactaacctaagttgctaggcttggtgagggtcaactctaactaagcaactaagttatgttttgcaaacctagggtgatagtggctcaaatatatctctagaaaagtaaatcacactcctatgtcaatgtttagcaatcctagggtgatatgatctcaagtttgtctctagaaaagtaaattgcacaaaagtaaatgcgacaatcaaatgagacaaggagacaagagatttttcaccgaggttcggaaactcgccggtttcctactccccgttgaggcgagcccaactccaccgctcaaccacgaagcttccgcacgcccccttcgtcaaggggtgggcaaggcgggagccggcccacggagaggactacccaagcctcgatcactagggtagttcttccttcactccgaaggtggtgaactccaaaccactcacaaaccggcaccgggcctcctccacaatcttctcggagaggtcaccgggcaacttctccacaagccgtttaggaggcgacaacctccaagagtaacaagcaatgacccgacgtggagatgatcaagtgccacactagctctacaatggaagcaaatgcacttgactcttggctaatcaaccctctaacactatatggatgaacacaaatctcaaatgagtgtgagagaggtgcaaggggtgtatgcaattgaattgggtgccaagagagtccccttgctgctggtgggggagtatttatactcccacccaccaaaactagccgttaggggcgaaatccccccaactttgtgctctgccggtctgaccggaggtatgtggccggtcagaccgtgctactctgcaacggctagaaaactagccgttgtagcgttgtcagagggcctcatcggcctagacggtcagaccggagttgattaggcggtcagaccggagtaggctcggtcagaccgccatcggctcggtctgaccgactacggctccgtcggctctgtatcggccatcccgaggagcaccatttcggtctccagggagccggtctgaccgggcatgtgccgccggtcagaccgactttatgggacggtcggaccgccaacttggggccggtcagaccggccaggacattccggtcagaccgccactatgtggccggtctgaccgcccctggtcaggccgaatccagtgaatgtgtgtgtgtgatgaaaaagtgagcacaagtgataatgcaatgacctaatgtggcaattaaaatcatctctttgctaggtcattacccctcttaatagtacggcgaaactagaaataaactagcaaatttgatcgccctacacctcgatcaattctaaattaaagcactagttttaccgtcttctttctctttgccttgcgccgtcaattttaatccaccgatcgtcatccatgtgcacacatgatgtggacctaacttaaaatattatctcaaagacaacggttagtccacaattagcacttgtcattaattaccaaaattaacaccgggggcctagatgcttcatccccacggtcgacgccagctgttgtcgatagacaattgcgtacatcaaaagacgtgcttcactgtcacgccctgaagttcccctccctgctttaaaatccataaaataaatcgtccaaagaaattatttaatttaacctagagatgaatccctaattaataaatgcaaataataatcgaaatcggcatgtggaatttttcttggattctacatgtcaaaatatgctaacaggatttttagtggaattttctgagcttggaaataattttaaccaattaaaataagcaaagtgcaatattaaatccctgggaaaatcctttttcccttttcttttttctttttttcctcctttttccttttattgggccgtcggcccattccttcccgcgtcggcccgctcctccctcccactcccgaagttcacccggcctccctctccctctcgggtgctgactggtgggacccacctgtcagcccttcccttacctccagccggttggagctcgctggcgccccacctccccacgccgccccccttctccgctccacctcgcgccccacttcgcgcccgtgcccacgttgccgccctctgccaccccactcccgcccatgcgcgcgcgcccaaaaggggtggattcgaatttcgaatcctctccccactctctctctccatctctcacgtcgccggccaaatcggccaccttcccgccctcatctgcctctctcgtgcctataaaacgccaccccgagcctccctctctctttttccgtgctcgccgcgctctctagtgtcctccgccgctctccccactccgaaccgagctccgccggtcaccgttgaacctcggccgcgcaccgccactgctagagccgccgccgccgcgccaagccgtcacctccgctagcttcgccgtcgcgggagctatcccggccaccgctcgcttgccgcgcgccgccaccgcaccgttttccccacgcgccgccgcctaacgccgcctccaaccgccgctagccatcgctagtgccgtcgccgcgccgctcctttgccgccattggcctcgcgagatcgaggcccgtctcgtccatcccgcgcgccccgccgtccgccgcttgtcgtcgccgtccgccgttgtcttcagccacgccgactgaatccctggtaaggactccctccccctcttttactcccccttccccgtgtgcgccgccgcctttgggcgcgtcgccgcctcctgtccgcgccgccgcttcagccgtgtgccaccgtctcctcgccggccaccgccgtctctcgcaccgccgatcgccgctgtcgatggccgctcgccgctgccgcatcgcctaaccggctgcccggcttagcccggcaggccctccctttttttcagccgccgcccggtaggccccgcctgccagccgccccctctccctctcttagtgccgctgaccagtggggcccgcatgtcggagcccccctcgctgacgtcagccctgggacatattgcgcaataaatgatttaagtactttttgttatagtaataaacacagtttatcttctaaaaatcatatctaattcatccgagctccgtttaagtccattcaagtcttagtaaattcataaaaatgtatagaatccattaaaaatagttttgtttcctattttagtagacttatagcatgttttgctcgtgtgctttgtttgtcgcgtagatttcggccgtttcgtcgatccatggttcctcgaagacgttgctgtggttccatcagtgcgagagcaaggcaagtcatgcattacaattgatcatattgtacccaatttacaaatgtcccgcatttctattaaatgttgcattggtttacaatatcatgggggatgggtcctactactcagccatatattgtttatcttacgccattggtaacttgggtattgaaatgcttagatgttggtttagggaatgcttagccatgcttagtttaactagtacacaaagggggatcacattaatgtctagactttgattattggcatagctttggattagtgccaccgcaatggtgttagttaattaaaatacactacatggtgggttgtgggtgcatggttttgctagttgtgcccatggcgattaaggaccggttcgcgggatgccctggaagaacttatcgtacttaccacaagccagcatgggcaacggctaggcttgtagtgtagctttcctctagccgacgtacccaggcgagggtgggcgtgatagagttgggtcggccggggtgaccggttgatcggcttccggattcaccgcggcatgaaagggaagctactcgttgccttcaggtctaagtctaagtctaactgacgcacgcgttccagttgctgacgcgagcgtatcagttgcgatagtagcactggtggagaaacaatctttcgtcggtcggccgatttccacaatagtcccggatgcaataaaaaccggggctaaagatgatctttagtcccggttcaaaagggtaacgggcatatttgatctttagtcccggtttgtgttaccaaccgggactaaagatcatctttagtcccggttcgaatgctgtctgggcctgtcaggcccccccgggatctttagtc

SEQ ID NO: 5953 - DNA, 35384 bp, Oryza sativa
gcgtcaaatattttgggatggagggagtataaaatagttcctactgaacgttgtcggctacttgttgattctttttaggtggtgtttgttcctgtgcacaaataggtctgcacatgcacatgcgatttctcttacagttattttggtgctttaaaatgctttacgtattggtaatattagagcctagaggtcaaaaactattttgtatagagaaaattatcccacatagccatctgttgtttattcaagaaaatattctatgtatcttctgggaaccatatgtgatacacaaattgaattttatgtccattgttagagaatccatttgcttgaatcaaaattagagaatcatatatctgatggaaaattgtctttttaccaatatgtttgccttgcagattggtagttcctctcgtcctccaggcaccagctatggacaatatctatacctcaaggaagcctcttcatgttcccctcaatatttctttctgggtgcatgcactctatgcttgctatgcaaaacccaatgtatgtgaatgtgatccttatgctgcaaaggtgctactataaacacttcgttttttatctatttatttaaacattctttgttggtgtcggtgcattgcctctgaattttagatccttttttagtgcaaaatgcatatgaatgtgtggcattgatattcccttggagatgaagcaaggtattcagtgtttgcaaattaacatttacgagtaggatttacctagctagcatggcctctttcatagccacttttgcatgtatgaatcttgtgaattgtggtcctataggcaaatagaaaggtaaaattacgtgatcaactcgagctctttttcatatttgtgccactcatatttgtcctaagttttaactgtattttaatttaatcttaaattcagcccaactactcttgcggatgttatttaatgaatttggatgtgattgtactgcaagttaatctagaaattcatttccctgttttcataacaacaaaacttttaaagatgttatccctttattgtcattcaagtcagcattaagcttgctggttgaaaatttgaagtttttttagttcattctgaagtatgaagtagtatagaactttctgattttctattggtgtttagctcttaattgttgttttatctgagaattcactgctgactgctagcttaaccatctcaataaagctgatgaagacaaggtgctcgatattcagacgatattggtcaagtataacatatttcatattgaccagtgagaagcatccgaaagaagtaaacgaatgagcattgagttccagaaaatggtgtatagtatagatggaattatgaaaagcatctctttccttctcttccatctctccctcccttgattcccagccatagaatcctagatctggatggtggattggagtattggtgaccgggcattgtgggtgctaaattctcctataaacttgatcaaacttgaaaaaatttaactaataatatgaatcggagggagtagtaagaaaagtaaccaattgttgaaatcatagaggcgacatgacgctgttggatgcggatgacgatggtggctctaatggaagcaaatagtatgatgtcagcgctggtggaagccgatagcatggaggtggtggaagtgaaggatgagagtgatgacctattgctgaaatctgacagatgacagggagattgaaaggcgttttgatcgatatacatgccgatagacagggaagagtgaagacccttccagggagggcaattgactatgcaaattgcattttactccctcaaaatggtattttacatttaagttattttttggtgttggacataattcgatagtaagagattgccagtacatagatgtaccgagtagagctgtcaaaaaagctcaagactcacgagctacttgagtttgattcgttatgatcctgattcaagctcgaatttcttgggcgagcctcagcatccagcgcatgttctttctagcaggcttttcctccctcctctctcttaatttgcccgttcaaattatatatctaccagagtagcactaggactggcagggcggaagggcatactccctccgtcccaaaataaaggcaaaccctgggtttccgtgtccaattttaactgtccgtcttatatgaaatttttttataatttgtattttcattgttgttagatgataaaacatgataaatattttatgcgtgatttgtctttttaatttttttatatttttttcaaaaataagacggacggtcaaatgttgggcacggaaaccaaggtttgtctttttttttttaatggagggagcatgcatttgttattccatgtcccaaaaagagcatggctagtactggtactagtgtgtggcttgctttaacgtaggatcactagcattactttccccatctaatcatgcatcacagtgtcaacttttcaagtgaatgggatgaatctgttatagtatttcactgcaccaccaggcaggcttgagaagagctcgaagctcgaactagccgagcttgagctcagcttcaagctcacagcaaaccagggcttgacttgagctcgactcaagtctgtagcgagcttgagcctacatatggaagcttcctcgagcttggctcgttgatagcccctagtactgactcttactttccactcccttcatccaactgatctgatctgcgcataaggtttgtctactttgaccaaggataataaaaataatttccattgtgaatataagccacattgataaggttccatgcacaacagctccttcagcgtacacgtgtgttcttctgtgattctactccgacaaaaaccgtcctcacatttttatacgcatatcaatttctgattttgttttgggttttaattatgtgctgatcaaaattggatggagagagtaattattgttgttggttgactttgatgccgatgataaaattaatacccagtgataagtgctttgctatgggtgttgaagattttcaggatggttcttagttaaataagggctgtcgtccctagtcggttgcccgtgggatggttagatgggtgtatcggtaatcaattacgtttcctttgcttttagtctatgatatttagcaggtcggctactgtgtaatctaaagatgtactccctcctccgtttcgttttatttgacaacgttgactttttagcacatgtttgaccgttcgtcttatttaaaaacttttgtgaaatatgaaaaactatacgtatgcataaaagtatatttaacaatcaatcaaatgataggaaaagaattaataattatttaaaatttttgaataagacgagtggtcaaacatatgctaaaaagtcaacggtgtcaaataaaacgaaacggagggagtattatctttatgtttgtctatgtttagaacttacataaatatttcttgatgtcatcgcttgaggtgaaaatgcataactaattactatcgcgcggatatgggtttgaaacaattgagatttttgcaaaatagcatgagaagggtctcctagggtatgcgctttgggtcattgtcatcgagttgatgattaggcggtgcatgcctcggtagggcattaacatgctcatatgttaaacatctcctttggtcctagtttggcactgtgcttgttaaaccattaattgttctaggtcatgtacatgatgaggatgggtgctattctttttatggatcccatctatcaaatataatgtgatggcacatgttagagaggtcagcggtatagtacttgtggatctcggcatcctaaattcatgaaattttggcggtacggtatccattatttttggtataatttcctgaaattttagattagtatttcgtagaacaaaagtttgaaaggttcaattctaattgccttgtcttctaactgaaatttggttgtaaattttaattcagccacataaattcataaacaagcaatcacatcacaacttcacaaggctaatctattttcaaggtaaattaaactagggacgttacagaagtactcaccctttgttcttaaatattatccgaaaccgacaagggtaatgccgagtttgaggattgtgcctgatgtcttaaccctataagttgcctatgataccttagacagatgctattatttcttttttcgtagcttcttcagtttctactaccttcgtcccaaaatgttcttacctagaaggctaggactgttcagattagttattctaggatgaataacatatctcattctaggtagcaacattttggaatggaggaagtagtaaactgtgtaagacttttcaactttatcagacttaacacaaaataaaaaccacagtaattgtgtgtatgcaacatattatatttcagtggtatcaattttttttcgaaagatgcccatcctattctcaactttggaagattagaccggcataacgtctcggtgttgaggggtatatcacctaccactaccactgaaagaataatttgtcataaataagagcactgttggtatttcttatgaccacagataaatctgcaagcacacggaataccgctgtagcacttcaccttcgggtgaccccaaaaggatatcgaactcagggaacgtgtgtaatctacctaaggctaagagaatccaaggacaactataggcaggcaggctagagaggactttctatgtgctttaattatctacgctaagcaaggtaattccctatctgttgcttcgggcaccgacccctactggtctgctagcgtggttccggctatagctctatgatgtatccaaacgtggaggattactaggacgggattcagggctgtcaccacttgccgcctacctctgacaaatccgtgggatacacaacaaacaaaggtaatctctaacctaaacaccacgtctaagttattaattactactctaatacttgtacatgaacttccttctttatccagagtcctagtactagagcacttagtatgaatactaaacaatgtacacgcaaagatggaaatctatcttactcagacaaagtaattaaataatataagaaaggaacacgaatgcttactttatagaagaagttcttcgaacccggagcagagtgtatcgacagctccggtactcctctagaattcctcctaggaagctacactcgttaagaaagaagtcggagagggcgccaaacttccgggcactcctccagagcttcccttcactctctaccttattctaatgtaaaaaagatacaatagagtctcatgtaattcagatcaaagttgtgtactggaaatgagagtgagcttcctccttttataggcaggtatgacggttacagcctatgcgaaatgtccaaaatgccctagaatcgccatcaggaagtaatcagggccgtccacatggaaaatggtgatcaacagcgccagaacaggtttggccgaactggtgggttcggccgaacccaaaaacactcctcccggcctcttcttcggccgggagattgcttaatgggcccccaataacctgtgctttgttttggcccaatcctaaatggttttcattgacttattgggcctccaatccgtgtaaacgcgtcctgaatgcgcggaggtgcattttgtcgcatgactgatgtggtttctcctcaaattacctgcatacgcatatttcacctacactagtggaaatgattagtaataatatctaccactaagtgagataccatgttttatttatatgtaagtattgacggtcaaatattatgatttaaggaccatcaacaagcacccatgctaagtttgggatttgaatctaagaggacaggtcccaccacaagataccttaccagctaatacgctacggtcagttctccagtgggatggatttgtggttttatctactgctatgcgaaggcaccaagcaatgtatgtgtgtgctgttaatgcagaaggttaatggtcctaaaacaccagggcctgacatgacatttctatagtgcagagttaattttctcattgattctattgtaacagggctgatggtctgatcagaattgagcagtccaagtagctagttaagtcttctccaactacttgttgagctagatagtcagattgccaggatcatatgtttttagattctgagttggaactagttgttttagcttcgtagagtacatattaatagttctagattttagtttacgtacacaaccagtcactactctttggctgtcgtagatatgaagtttctttccaaaaagaaacagagccatgcatggcatttttcatagccacaaaaagataagtgcaaaaaaaaaaccgcagaaaaaataatggatggacttgagaatgcgaacgtagcaacatatgcacgtgcatttttttttggctgtgtatatggacatagagcctagacatatatccattatctgaaaaaacgcacgtgcatttttctcaacagcaaaaaccatgtagtttccagtttcctcgtactctctcccggcaataattggtgactgcttccacttttagctatttcctgttcacggtaccccacatcttttgctagcatgcccctacccattcatattgaagctcatagagcagcccattgccatagatgaggaccagatgacgaaccaacaattaccatttaaaactccataaaatacaaaagggaagggatgatacgtactttgctgaagagatggcagctcctttgttgttatcaacaatcatttcggctctagtggtggtagcatcctctactcgtggtaccatggctaatggtgtattccaggtgcgccgcaaattccatatcgtggacggtgtgtacaaggggagcgacataggtgcattacaaatccatgatgggaaccgccatcgtcgccataaccttatggcttcggagctcccacttggtggcttcagcatcccatacggcactgggtatgctttaatcatctctgcctttggtcatgtctgtgtttgcttggttggttggtgtggttattagggataacaaatggatcttggcatagattatactacacagatatagggatcgggacacccgccgtgaagtactatgtacaggtggacaccggtagtgaggcattttgggttaacagcatctcctgcaagcaatgccctctcacgagagcgacatattggtaggtttccttctagtgtttctttagtttcagtccattaatctgcttgcaaaatctgctttgcaaaattgctttgtaatatgtttttgtttttgtcatgggtatgtgtatctgcttgtgtgcagagaaagctgacattttatgaccccaggagctcagtaagttcaaaagaggtgaaatgtgatgatacaatatgcacttcgcgaccaccatgcaacatgaccttacgttgtccgtacatcgcggcgtactctgatggtggcttaacaatgggcatccttttcactgatcttctgcactatcatcaactgtatgggaatgggcagactcagccaaccagcaccagtgtcacatttgggtgagttattaaagaaatagcactgctacacgtactaagtttttcttactaaatttttactgacaatcatcacaaccgtttgatttagctaaatggaagttataaaaaatctagatgcactcatagcatgacacatcaatgtattacaaccattttcgtacatgaaatttattgatttacaacagaagtgctcgattgtaaaatgccattgataagcaatagttcaacaatatgttttccatacgtgcaatactctttcatttttaccatcacatcatggttaacatcaaattatgtctctagtttttataaaatgaccaaaatatcattgagaacatagttatacccttgacagacttcttttgttttttacacagtgaccaaaacacctttgataactctgttacaccctcgacagactttcgtgagtgcctgttgctgtttatggtgaaatgaactttccattagaggacaacataggccccttaatggttagttcacagcgatggagaaaaggtagaaaaataacatgtatggtggcataacatataactcatatttataagatcgaaacacaataaccaaacctaccagagagtggtgaatggtacatacaccaaaaaccaaaatggaataaaaataatcctctaaccttacagagtccacgatgaagtctagttgactaacttgtgtgcaccggtctgaccactctagtcctgtcggtctgaccggtgtagagtcaccggtccaatcgccttgcttctcccttcgcctgacactgccggtccaaccatctaaaagttgcctgtgtcaccgctgtggcgccgccagtcagaccgcaaggatgctactagtctaactaccgaaacaaagaaaaacacaaatcaaacaattttttagaagtaaatcaactttattgcttctaattgtgctcacaaagtgtaacagtaacactcatctatcaactttcgactatactcaaaatttaggctaaacccttttttttttcaaaactgttatctcacaaaatggtaccaagaggcctcaacccctcttttttttataccttgaagtggctgcacaaagccacgaattcaacatggataagtaattctaatctcatagaaaacctacccgaacaagtatacaacttatccctttacaaatcaaactccaatcttttcaaatttggactccttccaaatttgactcatatttgttgatggcatttcatagagtcgagtggttgcatgttgatggcattttatagagtcgagcactttcatattgatggcacttacaatattccttttcatacaaaagacatttcattgcactagtacacagtaggcaaacactgccggtctaacggttactatagactagcagtgattaactatatataatgccggttcatgctggcttggatattttttccctaccaacccatgtgtatgggctatgatagacctagcatcactgtcggttcatcaaccggtagtggtaggtgaggccaccactgctggatgacctcttctagttcaaaaactgatagtgatgcatcaactacgaaccgatggtgattggagtttctgtagttgtattgtcttattaaatctgaagcattattttacagcatcacatggcaataattaaaccatacatatattttctgttcactattgtctgtaaggtgggtatgctgtattgattgtcttttattgtagatattcttttcaagaagtcgtactatataagtttgcccacttaggccctgcttgaaattgattattgactgtatttttttatggattatctactttgattatagggatagactaaatattttgagaaatatattcaacagatagcttagaacaagtggaccaataagtatacatgcaatagaggaatgttcaattttagaggcgttgagcaaatccatggctataatccagagaaggagcagaagagacatggcataagttaatgctcctgtggggggctaccattggatgttgcaccacacaacacactagttctttttcatatgaatggtcctgtggggggctaccattggatgttgcatcacacaacacactagttctttttcaaatgaatggtattttattgcactagcacacatgagctaatcactatcacccatcactacgggttgccatgcatagttccaacaattattgactattaatgccatttcatgccagccgggttgggcatttaccaaatctatatgaattcactatgatagcctgagcatcgctgtcggttcagccaccggtattgatagccgagatcactagtgtcggctggcctctgctggtttagaaattggcgttgatgccggttatgggttttgtgtaaatatatttattttcttttcatgtaaatctctgatgaactcatcacatgacaataattggttatggcggtcataggtatattttgatattttttatgccttgttctccataaggtgggtaggctgtattaattgtgttttatcgtagctgtgctatctaagaatgtgtactatataagttggcccactaaggccatgtttgaaacaaattattactagattatttttgtggattgtctacttgagaaacaatcttaacaaatggcttggaaagtaatctatcctatgcagtagaagaatattttttagcaaacatatttttagggacgtggggcaaatccgtgataataattcgacgaaatggctcccctgtgcttctaggtgtggtttaacaacaaactggaagcttaaacaattcagaactagcgattgatggaattattggttttggcaattcaaatcagacattgctatcacaattggctgcagcagggaagacaaagaaaatattttctcattgccttgattccacaaatggtggtggaatttttgctataggagaagtggtggagccaaaagtaaaaacaacacctatagtaaagaataagtgagttaaccatgtacttctctgctattaattattatgtttcttttatggtcacaatttaatttggatctactttaaatacatataattttaccctggttatagcttcttctggtatacttgtttaagaagcatttatcaaccccctaaaatatgatgcatttatccacttaaacatgaactgtgtcaagtggtacatctctggtacaaacattgtgaaaaaaaattatgtgttattgttcttgagtgttctttttaggcgcaatgtttcaaagttttgaatgcacagagctatgtgaaaatttatgttggctgtcttcaacatggactgaagggtgctgttaggctggaatcgctagaaccttaaactataattttaaaaaaaacctatttatatactttagtacatgatcttggctctccaccagtccctgttggatgttgggtttatgacaagtagggatatatgcatataatatcaatttgtattgtagtgcacgtatgccttcttacatgttgtaaccttttgagaatacatgtctttctgcgtgtaacccaggctcgtgattccaacacaaagatcataaccaaccttgtttggttctattgttgtttccaccaaactaatgctatagtatccattttgaatctgtataataatcactagacccaaagcatggatttacaaatttgtgggaatatgtatagtttttatagaagtacttatcatgtttatctgtatcttctgaaaattaaaagcagcaaggcatctggaacttttgagcccactcacacaccacacacactaactcacatcaattcactattctatcacatagtgaggtatattaccttgtgaacctcaagtcgatcgatgttgctggcacaacatttcagcttccagccaatatttttgaaacgaccaaaacaaagggtacattcattgatagcggtacaaccttggtgtaccttccggagattgtatattcagaactaatacttcttgagattataggcatataatgatttaatttattccataaataaatcatgacattacagatgaaaactagcatgaacgcatcattagatctacacatgtaaactacacagtataacatgaacagattaaatatgcgcaacatattgaacacgtaccgaggtgacgaaaagaccggctgcttggtcgaaacttttcgcaggtgtctacgaaggcacgaaacacgcgagcgaagaggaaggcgagccgttgcgaacgaacagggagcagtcgcgcgaagcgcttcccaaaaaccttattgccgccttctcccggtgcaggacgtcaaaggcagaggttccggagacctgctctcccgatcgctggtgcacgccggcgagcgggatggagtagtctacgagcgacggcgcagtacagagtaggagggcaaaccctagattgatttcgcgtatattgcgtgaagacagcgggtcgggttatatagagaaaggtcgcttgatcagggcgcccgcacgatctctactgcgcgtaaccgaaccggataagtcgcgcgtaacttatccggactccacgctgtttgcatgcaccggatttttcggaacgtttccaaaacaaaaccgaatccgaatttgcagcaaaacaaaactgcaaaaggaggctgcatctgcacaagggtgaggagccaacttttttcggaccattcgacgcgtacgtcgtgcacgcgcgccgcctgccctgccctgccaggccaggccaggcgaggcgagcgagcgcgcgcgtgtgtttcccctcttctctccaccacacatgcttcaagtggctaggagggcatcctcccttttaaggaggtccccctctcctagaataagcaaggtggtactaaactccacatgcatgccatcccatgaggtgggcttttgtgattttccaaagaattaatcttcgagtgggctaaggcccattcattaattccaacaatcccccaccaaatctcaaaatcccactgagatttgccttttccaatgtactgtttatataccagcggttcgatggagaccaattaaggttgaacatccacctagaactccaagctacacttactcacaacttgaacaatggactacgccttgaattgcaagtcttgtgcaagcaagtttcactcaaagtcttatctggtactagaccgtctgtagactacccctcgggtagagcatataagtcatactcctaggtctttagtaagcttcctagaagattcacccaaaatcttcatagactgcgaccaacagtcaagctcacaaaggtgagttctttcaagaatgctctgcaggacaacatcttcgctaattaaagccaacagaactcattaaggcatagccaacctgccttgcagctcacgagagtacatgcatcttcacttggagagggtatatatattggtactctcctctagtttactaatggtttgttcttcccaggatctaattcacgggatctccgatcacatagactgggttaccaccatagtataactcacatgggtctcaaacccatctccttcgatgcattgtctatcacatttcgtgatagtcccttcgtgaagggatctgccaggtttctcgctgtttggatgtaatccaacgttataactccggagtttcttaatttcctgacagacttcaatcgtcttttcacatgtctagacgatttcatattatccttagaactattcactttgacaattaccgtttgattgtcacagttcataaggatagccggcaccggtttttcaacaacaggcagatccattaatagatcacgcagccattctgcctcaacagtagcagtatccagtgccgttagctctgcttccatggttgacctcgtcaaaatggtctgtttgcaagacctccatgaaacagcaccaccacccagtgtgaaaacatatccactagtggctttgatctcatccacatcagagatccagttagaatcactataaccctccagtaccgcaggatacccagtatagtgaagccccaattccacagtacctttcagatagcgcattattcgctcaagcgcacgccagtgatcatctcccggattagaggtaaatcggctcaacttgctcacagcaaaggagatatcaggcctagttgcactagccaggtacatcaacgagccaataatttgggagtattccagttgattcctagcaattctattgttcttgcgaagcaacaagctaggatcataaggtgttggagaaggcttactatcaatgtagccaaagcgattcaagatcttctccacataatgggactgcaagagtgtaatcccattctcacctctaattagcttaatgtttatgataacatcagctactcccaaatccttcatatcaaaattttgagacaagaatgatttaacctcatttatcacctcaaggtttgtcccaaatatcagtatgtcgtcaacatacaagcacaaaataactcccttacccccaccatggcgatagtacacacatttatctgcctcattgactgcaaagcctgcagatgtcaatgttttgtcaaatttctcatgccattgcttaggagcttgtttcagaccatacaaagacttcaacaatttgcacactttgccttcttgaccttcaactacaaacccatcaggttgatccatatagatctcctcatccagctctccattaagaaaagctgtcttaacgtccatttgatgaacgagaagaccatgtgaggctgctagggaaagtagcacacgaattgtggtcaatctagcaataggtgagtaagtgtcaaagaaatcttcgccttctttctgagtatagcccttagcaacaagccgagccttgtacttttcaatagtaccgtcaggcctaagcttcttcttgaacacccacttgcaccccacaggtttacacccatagggtcgctctgtcacctcccaaatcccgttagcgataatggaatccatttcactacggacagcctccttccagtagtctgcatcaggagatgcatatgcttctgaaattgacttaggagtgtcatccacgaggtacacagtgaaatcatcaccaaaagatttagccgtcctttgtctcttactccttcgaggagcttcactgacatcctcctcagagacaagttcatgtgtatgttcagtttgttctggtggtgtgattgaactgggaattatttcagagggttggttcgaaccactatgtgtatccttcattgggaaaaagctctcaaagaaggtagcatcacgagactccataattgtaccaacatgcatgtccagtacttcggatttaactattaaaaatctataggcaatgctatgatgagcatatcccagaaagacacagtccacagtcttaggtccaagtttgcgcttcttcgttattggtacattgactttcgccaagcacccccatgtgcgcaaataagaaagtgatggttttctaccaatccatatctcatatggtgttttgtccttatttctgttaggaactctgtttaacacatgatttgaggtcaacaatgcctccccccaccatgccttaggcagtcccgcggtgtctaacatggcattcaccaagtcagtcagtgtgcggttcttcctttcagcaatcccattagactcgggagaatagggaggcgtcctctcatgtatgatgccatgttcctcacagaataagtcaaactcgttcgagaaaaactctccaccacgatcagacctaagcctttttatctttctgtcaagttgattttcaacttctgccttataaattttaaaatagtctagagcctcgtctttcattttcaacaagtacacatagcaaaatgtagtagcatcatcaatcaatgtcatgaaatatcgttttccacccttcgtcaacaccccattcatttcataaagatctgaatgtaggagttctagtggtgccaagtttctcttctcggcagccttgtgaggcttgcgaggttgcttcgattgcacacaactatggcacttagaacctttgacaatggaaaacttaggaattaaacacatgctggaaagccgagacatcaagccaaaattaatatgacataaacgtgaataccaaacattagcctcatcatccacactgccacaaatatggttcacagacttattgcagaaatcagaaagggaaaagcggaacaggcctccgcactcataacctttaccaataaaatatccatgtttagacacgactactttattagactcaaaaaccaacttaaatccgtctctagtcagacgggagccactaacaagattcctatcgatagaagggacatgctgcacgttcttcagctgcacgatctttcccgaagtaaacttcagatctaccgtgccaagaccatgaacagaagcatgtgacccattccccattaggacggtggaaccccgtgcgacctgataagaagaaaacaatgagatgtcagcacaaacatgtacattggccccagtatcaacccaccaattagtagattgattaactgaaaaaacagtaggtaaattaccatacccgcttccatctccagtgttgccaatggtcacattagcagacttagaagtctgccctgcaggtgccttcatccccttgcgctgtggacacttcctagccagatgaccaacttggccacacacaaagcaagtcctctcatcctgattaggattgttgttgttcttcttctgcttcttgaagttggtggtctgctgagctttgtatttccccttgctcttgttctgggccttgtgcacaacattggcgctggactgcccaccatcgctcttagacgcggcatctttttcccgagctttctcctcaacatcaagagacgctatcaacccctcaacggagtattcctgtctcttgtgtttgagtgcagtaccgaaacttctccaagatggaggtagtttcgcaataatgcacccagccacaaatttgtcgggtaagacacacttaaggagttcgagttccttagccatggtttgtatctcatgagcctgttcgactacagaacggttgtcagccatcttgtagtcatgaaactgctccatgatatacagatcattgctagcatcagtagcaccgaatttagtattcagtgcatcccacaactccttagcgtcggtcatatgcatatacacctcgaccagacgatcgccaagaacgctaagaatgcatcccacaaagagagtagtggcttcctcgaattgcttctgctgttcagcagtaagaactccttcaggtttgccagtactcacccggaagcatttcatagctgtcagccacagagtgacccggatctgccatctcttaaaatgcacaccggtgaatttatccggcctcagtgcatcggcaaaaccagccatagtaaaatcacagtgcctataataaggtttttggactgttgagattataggcatataatgatttaatttattccataaataaatcatgacattacagatgaaaactagcatgaacgcatcattagatctacacatgtaaactacacagtataacatgaacagatcaaatatgcgcaacatattgaacacgtaccgaggtgacgaaaagaccggctgcttggtcgaaacttttcgcaggtgtctacgaaggcacgaaacacgcgagcgaagaggaaggcgagccgtcgcgaacgaacagggagcagtcgcgcgaagcgcttcccaaaaaccttattgccgccttctcccggtgcaggacgtcaaaggcagaggttccggagacctgctctcccgatcgctggtgcacgccggcgagcgggatggagtagtctacgagcgacggcgcagtacagagtaggaggcaaaccctagattgatttcgcgtatattgcgtgaagacggcgggtcggtttatatagagaagggtcgcttgatcagggcgcccgcacgatctctactgcgcgtaaccgaaccggataagtcgcgcgtaacttatccggactccacgccgtttgcacgcaccggatttttcggaacgtttccaaaacaaaaacgaatccgaatttgcagcaaaacaaaactgcaaaaggaggctgcatctgcgcaagggtgaggagccaacttttttcggaccattcgacgcgtacgtcgtgcacgcgcgccgcctgccctgccaggcgaggcgaggcgagcgagtgcgcgcgtgtgtttcccctcttctctccaccacacatgcttcaagtggctaggagggcatcctcccttttaaggaggtccccctctcctagaataagcaaggtggtactaaactccacatgcatgccatcccatgaggtgggcttttgtgattttccaaagaattaatcttcgagtgggctaaggcccattcattaattccaacaatacttgcggtatggcaaaagacctgctattcttttctagtggtagaattgtttgcaattacgtttacatataactctcaaccaattgcaggtatttgccaagcatccggatataaccttgggtgctatgtacaattttgaatgttttcattttcttggaaggtatactctataacacaaaatctatagtgcagagacattatattcaccaatggactatataccagaagattcattggattcatattgagttaattcaatcttttcaatgcctctgaattccactttatccatcaaataactccaatttgttagtagtccgctaacattaccactgttttgatacccaagtatcctatccatttgttgaacgtgaggaaaaccagtaattctctaaaaattcccattgggtcataacctaataaagaacgctgcctactcaaaccgaagctttgttatgtacaattttaagtcttgaataatactctaaatgggtgaagttgcccaaattaccaaaaccttagagtaaaaataaaagtaaaagaaactttcgcttttctatatgagtttcagacaaaatataaggtacgatggagaagcagtagtggaaattgttttcattatacgatttactcggtaaaagacacataaactgctatttcatctgctacagcagcaaaacctatgtcaaaagtgcagtaggggtttatttagagggtttcctatttatgttgggattacttagactgttccatagttctgagggatggggtatattatatgcaacttagtcttcagatggtagaatataattattccattttactttgtgattattctaactatgttgttgttttcttgtgcagtgttgatgataaatttccaaagataactttcaatttcgagaatgatcttagcctggacgtgtatccatatgattaccttcttgaatatgaggtaatgacatttcacccctatgctctaccaaagttggtataacaatttgttcacaaattggtattgccttgtcttattaattctgacaacttaacacttcaaacttgtcatggccagaaaataccttttccgaacgctagtgcattaatccccgtcgtaggaaaatccgtggtcaccacaacagacttgatacaaaagccacatctttattaattatcacgatgatatctatattattatataggcacattaggtctgtcaacaaaagaaaaacaacagcggactagaggatgtatgactccatcttcacaggcgctcaacagtgctataagctaggactccacttatgacttcttcaaagcttgtctgactacaggatgaaagattgagtaagaatgagtgcaaccaccatactcagcaagccacaccaagaaatgcacacataatgcaaatgggtacaaggaataatgatacatgttgacttttgcataaaacccatttttaaatagtttagttttaaaacacatttcaaagcatgatcccaatctagtcaaattttttagtcaagctgcacacttgcacgaacatgcgttaacccaagccatcaaattgcagttccaatcattccagtttaattaaataaaatctctaacttgggacattgctaagcttgcccataaccgagggcttggctattcgaatagattatactctgatcatccatgtctttttatttctgaccatattaagctatgagttaagccttacccactagacatgtggttgtaaggaatatgctttgtaacataggtccgaagaacgatccttatatatgatggccaaggtgcgactaacagaaccaagcacattgagcccaacctaaaacaagtttgagaattatgaaaagaagtccaacatgtgcaggctaacaacaagcctctaatccaccattaatcaagattatatggttattcccaaagtctagatcattaggaaacaactatatgtttctcttagagcattgctaagcataatcctaaaatctctaataagcaccgcacatagagtagtcactagatagttatggttttctagggttgtcaaaggtaattactcaatatttaataaataaggcaataacaaaaaatataggaaaggctaagtaaaacagttataacacaataaacttaataaagttgacggagcttagggctcctcaccgggagaccgcgcaggcccccctttgtcggttcggccgggggcgctgagtgaggttcttcgccctcgatctgaggaacgtcagcgagaagaatcgcacaagacacgggcgacgtagacaggttcgggccgctgagaagcgtaataccctactcctgtgttctggtggatctgtgtgtgaaggattacagtgagctcgagagcgagcgagagtgcaggctcctcccaaaatccctctccctcctccttaggcctgggcctccttttttatctggttaggggtcaccacatgggcctctagctgcctaagaaaggaaacattctttttataatgagggctagtctacagccggaagtgacctttgacaagcagagcgcacgtctcttgccccgctcgtccgcttttccgggggacgcccatttcaaccttcatttaatggccagcgatttccttgccatgcttgtgctgaagcctagaatggatctgaccgggactgacataccaactccaggagtcagcacgccagctccggctagagacgagagccaggaagctctcatcattctgacgggacagggcgaggcgcgcgacaggccgcctgttgccacccatcccgcgatctgaccgatctgtgaccggtcacataccgcgactggtcacggaccgggtaagcatgcgctgcgccgcattgaatgcggcgtagcgcgctcgcctaacctgctataaatgcggttaggtgagcgctgctgctcacctaacctacacacgtggcgccaacaccgcagggggtcggggcgccccagccctcggggccgaaacgggagcagcccgacccctcggggagacagagagaggggggggtggccacgtcaccctcgggcccgaccccccgagggggtcaggccacgtaggcgaccgcggctacccaagcctctagtcacgatacccccggccccatgtcaccgacaaaagtgaatgcaaaaatttaaattaaaatactttccgtaaattgggatttgataaggagagtgtgacttcccttgctcaacgaaacaaacttctgagacttcagcaacgaacatgaactgcatgactggaacctccgaaatgacaacaaccataggagcaacaaaacaaggccacaactctaagaaataaatgataacaagacataaaagcaacatacatgggtaatttaagttataacaaaagttaaactggtcaagttggagctcatatggccaagatacggccatccaaaatttaactgtagtttaaattaagatttccgaattgtttaattattattgttcccataaattatgtgtaacacaacatcgctcgaggagagaaagaattgagtgactgacaaccaggacccacgggtcagacggctagttcatcgtggatcaggttcaccgagacgatccacgggaaaagtgcacctacgtgtaagcctcagagaaaagactgaagactggatcccacatgacaccaaacaagcagtcacgtgcgtgaaaacgcagctacatgtggatggagacgataaccagcgactgcggcacatgaccggtagtcacctaaggcaaggaaaataggagggaaagagcggaaaccagattctcgccacaaacatgtcgacaaccgaaatagcgaggagggaattgttggcgaggaagacaatggcgagcttgagcagccacgacagcaactggtcaacgacgaggggacaacggagggattggcgctgcggacttgagggagatggtggtgagggtgacgacgggaagcacttggacgaggaggggacagtggctagaggaagatagtggtgatgtcattcgggtcgatggcgcgggtgcgttccgatggtcttcacttgacaagaacgcacggttgaggaagaggatgacaagggaatcgaaggctgacatcgaagggagacaagttaatgcagcggggcggtgctctggcaaggcgggagggactgccaaaggaggaagaagacggcgttcttctctgatcactagcaaggaggaacttccggcgatctccaggcaaaatggtggggttgctgggttataggaggttaatccgcggccaggggtggcagcgctgtggtcttccgtacgtggcttgggtcggtctactggaaagggcgccggagctcgccggcgcagtcgagatgccaggagagcaagagagctcgaggtggctgcgaaaatggatggaagggaggaagacgacgccattttataggctgggagaggaaggaggggaatggtcgtgggaggagccataggccattaacggcggctatgaattgggaggtttcaaatccgcgatataaagccaaattaatagtggggaaaatatggcagaattggacagatgcaagtagggaaatgatttttgaaatcaatttggaggagagacgtctggcaaggcagatcaacctcggtggtggtgctagtgctagctaggagagggaaactgaactagcagattggaggcggaagacgatgatgcaacgacttcctgggctagctgggccgtgcccacctaggccgagcaagggaggcccaggagaaggaggggactttgctcatgagccgagggaggaggacaggaagcagatggatagaattggcccaaagagaggacatgcttgtttttaggttttttattttcataaactctgaaatttttttgttgcattaaaatagtttaggatgctctgaaaaaatcaaggaaaaactgaggtgacattttagagcatggaggatttaagaaaggtactctaagccacattcaaacttttcttgaacatgttttagtgtatgatatttcttttaagcttttaattatttctattattcattttagaatgtgactctttaatttgggatgaatttatcaacacatcacaaaaatgaaacatgaaacaattatatgatgctaaaatagttcagagtccaaccatggattatatcccatacatattgcgggccacatcttgtgctacatagatatatgtgctagtcatataatgggtacccattaacaaacattcgctaaattgaatatatatgcacttcgtgtcatatttttttcttaattgtactgacagagtaacttaggctcatcgccattggcagtataatgtagagaattgtttaattagttacaagagagataataaataatctatatacattaaatagacgatgatatctccaaaagtaactgtacggtttagagtttcaccttcagctgtcaaattttagttcttgtttcatacgtgaagagtcccattttggtccaagtaactagatgcaccacataaccaattgataatctccatgaaaatgtgtagaggacaagagttctgacttctgcaattctcaatcaactgacagttagttatttcagtcatgcatgctactctgtttggtatacatgcttttgcttaatattttatagtgcaagtctagagatatatgttcatcacacttagacttgtttggagcagggtaaccagtattgctttggattccaagatgctggaaaacagggacacaaggataagatccttttgggaggtttgcatatatcactgtccaaaagaaaattcctttttcatatttttttttgtgctagagccattgttctgttttttttcagacatgatcatctcaaataaggtggtcgtctatgacatggaaaagcaagccattagctggacagagcacaactgtaagtttcaactcgttcaaattttatcaataaagtgtggtagcgagggcctcagcccactaggaaggatgcatggaggcttgtagatggaggcaacgaataaagacattggcaaggagtaaggagtatgcattggatgctgaactagctatacccctgcatcttggttgtgctagccatggcaatgatagtgttacggctacaatttaggaggtgaacgaggttgtgaaggttgtacaattgccaaactagtggccaaggccctaccaccctaggaagctgaggcaccaggccagagtgagaagggaatggaaagagaaaaacctttgtttatccctttgattatcctccacaatccattcctttttaggggtggagttactcttaatagtaaaaaaataccaattagggacaccaaattaaaatgaacttaagcttgatcctggatgtgacggctatgccgttggtggctggtgcatcttggatcgcagcttgcaatggtggcaagtaattctaacaatggaagcacttcagcacactgcgatgtcagctaacagataaaggtggtaggccaccttgttgatgaaatgcccgagacttcataagggctgaagtaacatggacgttgttaatggactatacccgcctacgatattttgtagagtatgcagatcgttgatgctagtgtatacgcgagattgaggtaaaagagatgggagacaaggaattttatataggttcaggcaccttaacagacaggtaatagccatactcctattgatctgtctagatgtgccgcctctccttttaggaggtcttgtatttatatccctgggtgccccttgtccaagtagaactaggaagacaagtttggatgcaatccgactagtccttatagtgtccatgtaggactttgcttctctttccttattcggaataccttccgtatatcaggcttgactccgtataatacttggtatatggtgggccccgtcaagcctaacactaaaatatcatgtatgtcttatcctcccctggttgttcatttggacttggacactcatgccaaccttcttggtttgaaacgttgatggacatgctcctaaccaaaatccgtgcacaggaagagacgagccttggcctccgtgaacaggaagcaatgcgcctaaccaaaatccaccaaggattgtagtgtggcattcgaatctcgagcaacatgcttttcccatgcgaagctacaccaaaatttggttggggggggggtcaccacttgcttctttactctgctttggactgagtttaggcttatgtaggtgcctgggttttgaaggaggagagtgtacatatggtgaaaatagacgaactatagctaaaaatgtggatttagttcggagggaggtgggagggggttacaaatggtgaaaatataccaaaatagacgaacccgcttgtgcagtcgtagatgtcagtcacgacagtggtcgctgccaccatgctgctgattccccggtcacagcttggctgtccaccgctattgcactgacagccgacaacgttagtttggtcaacgatcatgatgctgatgaagtcgctaacgtgcccttagtcatgacgtgtgcagttggtggttgtctcccccagattgtctagtttttgaagatggatgtcaatactcataacttaggggatcaccaagaccaatgatgaagatctgtggctgttagtccgaagtgaaaatgtggcgcaccccttctgagaagtgtggccagcatggttcgccctcctctttgtcgaagtgtatgttctaacattgagcattgccaatcgtatggtaagaacccagccatagcatgtcctcctccatgaccttgcacccgtggaggaactgctcacatatcgaagtccaggaactctaactcgttgttccgcagaacaccactgccactggtgctctgatcttggtttggaacaaaagactcctctcctgtgccgctaccagagccatgcttcttgatgtgtggaaggtggagatcgtggctctctagtattcggttaatggtggatagatgcccccagacttcatccatcttttgtgaaagtggagatcatggctgtccagtatgtagattatggtggacaactaactcaagacttcatccatctcggcgaagaggggtactatgccttcaattgtcaacatcgagatggtggcggcgaaagagtgctctaataccaatatattatggatagaatttaggtggtgaatgaggttgcaaatgttgtacgagcgtccaataggaggcttagtccctagtgccctaggatgctgaggcaccagcatgatgacaagggatcatcatgctgtgaacacccgtccaaggaaggagatagtttcttcttattccttatttattggccaatagtacatcaaattataacctaattaacaggaaattaccaactagggatatgacaaactaaaaggaaacttgctggtgcacccggtgtgcccttggattgctgcttgcgacggcggcaagtaattatatgtaggtcagttcaagggatcagcgaatgacctttttttaaaccaactctgaaaattcacaccggagttgaacccatgagctagtaggtgctaccaggcatataagtgcaaatactaggctgcatacccactcgcaacaacggttgcccatattttcttggacgcatgctttaatggggatctaacatgtgatcaaccgtgcacagacgtgctcccccatcccaacgcacggctttgccccccccccccccccctcttatcatatggttttcaagaaagaatttaatatatttttagaaaggaaaaaaatactaacaaaagaagaaaaatctgctcagacatattcatgtgtataaactttatacacataaaatctatgtgtataaacattcaatgcagcaaaattctgtatgaaatatttgaatccaattgtcagacatttaaaatttggtctataaactttatgtgtataaactttgggtgtatgaactttgattgtataaacttggtctataaactttgattgtataaactttagctgtacaaacattccaaattaggaaagcatgtagagaaaaaaaagtggtgcccagaaagaaagggcaacctcctcgcgctgatacatgagcatgggctcgctgaattcgggctttcctgcctctggtagccaccaaataacaaagagaaaaccaatgtatgtctagagtttattaaaagggattgtttagattccttgggtggcaatcctatagttctaataactccactcttaattagtcaaaatatagtctctttcatatggataaaagttcaaacaacaaattccagacctaaatatgacaaacattttcaattcctaaaactttacaaaattatatgtagaagtattcaataacttgcaaaatcaaaaaaaaaatagcaagtataattcagtattttgaaacatacgcacaatgacctacaaataaacaactgacaaataaaaagattcttatttcctttataacaacagacaattgaatttcctttatgtgaaacatttttccttcagtggaaaaagacggaagttaatgatatagtagtttccatcctagacaaacatgaattagaagaaaatattttctatatgaatcaaacataaactgaaatagtagtttctattgtggacaatcttgatttgtattttagcatttaccgttgaagtcaagtaaacattcccagtgcctagcaacatgaacataaataaagaaccgaagatacacttccatgactataagtggcacttaatttatttaaggagaataacatcatgaacttgaaaagatggacatataagaggattaatagcatgcaacaataataaacaataataatgatacacatatggattataaaatagttaggtcggttaaaaacataaaatagatattgtgaattgaatagagtaaaactgctgaatgatcacacataaaacaagttcatgtcacaattaacttaaagatggtaatatcccaaagtcttatcagctgtaccagaacccttcaaacttaaagaacaaatctacttcttgtcaggctcgtgaaaaatattacatctaaaatggtcaatataaattttgaaagcccaaaaacctgagttctgagaaactagcaaaactatatatgttcacttattgttcttgtcataacttttaaaccactcaaattatatatattaatttacattgcactatgttggcgagtggcctcacaagtccatgtaggaggcatgctgtcatggaggagaggggaggtggaagcagtggctcgcagtagtgtcagggtacactcactgaggcacattcctttggagaataaaacgatgctaaacaccacagaggaaacggcacggggagagctcagtgggggcaagcatctccaggtgtttatctcattgttggatcagtaccacagccaccctgctgctcacgttgacaccatatctgcaccattgttgggccagttgttggatctgcattgatataaggcttatcggccgatctctttgccagatctgtgccacagccgtcaagcgtgacacaccactgccaagcttatcgcctgatctgtgccatcaacatcgtccttcagccgagcagccctcggcaccacagagctcatcagcccgatgcacaaactccatggagtgctgctcacgatccgtcatccatgttaccacaagaccttcaatcatgggaggggacggttagtgtggggaggtggtggtgattggtgaagagtgatgactcaaagctttgaagtaaacgaggatggcagcattcacagtgaatcgaagtagttggaggcaatggcagtggtgatttgggagtagaggaggacaacgacggtcctgacgtgagagtagatgggtatgcagggttatgggtaggctatgatagtttaaaagaaaatttcttaccatataaaccaggaaccacgagatgccgagcagcggaacaagatttggagcacagcaaaccggttcaacaaactgtcggacaacatatttgatgtagtcaatcccaacaacttgatcatatcctcctcgcattaacattttctcctcgcacctcacactccataggagtgactactgctatccacacatctaggcgtggaacgttgtgtgcaaacacgtctacctgcagctagtgtttggctcatgagtgcaagggcggctagggtttatcatgatggttcatgtacttgcatgtctcatttaccccctcaactgttgcccttgaatgcatagaacttctaattggacctccaaggaccattaggacgcttacctagatccctatccatatggagccactattggatctctatccaatcaagtcatttcaatacattaagtgtgtgaccctataggttcgtgtacacacactacatatatcataacagacctagagacttcctttatagccatctagttacgtgcagtagcatttaacaacctaaagttagccaatatgcttgttgagaatcatgataccatgtttgatatacaatcaaggatgatttagaaatagtagcatattagatgaagagtatcacaaataagtcacatactcattgatcaatagtaagttatctatctcaaggaacacttcattataattctagacaaagtatgtttcacaatcatctctgtgattgcctctagggcatatcaccaataagggacaacaacgatgctggtgctttggaggaaatggggatggcgatggtgttagtgtgtaggcagatttgggatcagtgtccaatgtgcggtgagtggagtaattgtgtgagggagatagatgagggtaaggaaaatgtgatgctttcgagaatggccagtgggacaagggtaaggaaatggtacatgtatgatagtacttagtgccataaggtttgtagtgtaaaatttgaacatttttagtaaataaagggactaaaagggtgaaatagttaagggttggaatgcaaaattttatagaggaagtgacttgtgcaatagtctcatctacggttctacgagtcatgttctctcctacagaaaccatatttacaaacggtcaaaacataaatttgtaaacaactatgaggcccacctgccctgaggtgtctatgaaaattggtattttcccaaacaggtggctgaaccgtgtgcgaaaacagattttttgcataatgccgtccatctacaaaaaaataaaaaaaaatccagaaacctgagctcccattcgtactgtcgtcgtcgccggcacagtccaatgtcatcgtcgctgccccagaagccgttgccgcctctcctcagcactcctttaccaccctctatagatccacccatcgcagggcggggcggtggatcctgcacctccactgccatcccttgcctttccttcaccagcatcgctcctgagactgggacgagtggatcctctccccttgaagcctttactattgtcgtagtcaccgtagccacgcagttgttgttgtcgcccatcgtgttgtcggcagaggcggatcccgtagcggggctgcccggtgatgatggatccgcctctcccggggccaagggcggtgccacctaatccgctgccttgaggccgccacctccatcactatcgccctagtcatcgtcaccccttcctgccgctcctaaggacggtgccaccacccgttggtgcttgcttgcacgctcccatcatcagtagagctgagaggagccaaacgtggtagggagaggaaggggggagtacggagaggagatgcgggaggagaggtgatggacgggggagtaaatcataaaggaagtatgaaccggctgggtgtgaaaacttgcaggcgggcctcttaattggaccatcagcgaaaatagacctattttttaaggagtgtctcttaataggtctgtttgtgaaaatggatttttgcatagggatttatactggctgcttttgatgtagaattacgctgcgacaccttgagcacgttatatgcaacctgcagcaacaccctgagatgtgcctacgtagagattgggtagatgccgctgaacaaacacttgggagggaccctgtcagggtgcatgtgcaccgttttgtcctaggctcagcaggctagccaggacgtcctataacaccatagagacaagagacgatgaataattgggggtttaggagaatagactttggtataggtagcaaggagggagatgaagaatatatatggtttgggtaataaattgattttgacgattgattggttgttgtttcaatcggctttagcccaaatgaagaatatatagggtttgggtaataaattgattttgacgattgattggttgttgtttcaatcggctttagcccatatatttataggaggattggacttgctccacagggtccttttcacgtcaaattagatatataatatcaagcccaagtaagaaaacccgtgaaccactaaatcagactcggaatcagggtcggtctaactggcactgtggcagcagtcagacgggcctgtttttatgtcctctttaaaaaaagttatgttcagaaaaatcggtttttatagtgtctctcccagaggccactcctctgttgtaaatgtgctaagaggatatccaatataaaatagaggcaattcattttgttaactctattttatatcaatcgtgtaaagagttaacaacaagaattgctaccaggttttggatcctgtgagtttcaattataacttttaaaacacttaccgaatagaaagaagccagttttcgctagaaatatatcatcaataaaaggactaactcccgtaaaaaaaaaggactaacttctttttagaatacaaatcataattctctgtgaataaataccatatttcaaaacagtactttatatggaaaaatgaatttgattaactatttagcaaccaatagccattcctatttcaaatttatgcatctagcagcaggaggtttacgaaaatgctcgcacctggacgaccgacgggtggagaaaaatcggacgccgtctgccactgcagcatgcaaagaatcttttctttgcttatttcttcaaaagattttttatcgtaaactatttatctaatctacaatctgattacaccactaaattcattacaattaaatctttacaacaaaaccacacatgattatatttcgacaaaaaagtattttattttttttattgatttttttaatgttgcatgtggtctcttttgatgtttcaactagtagttttacaatgtttcagctagtgtactcatgatgtttcactgtgtacggatcaaatgttgcagtggaacgtgccgttgcaataaatcacccacatagtttggaaaccctttattatgggaatttggtttattttttgtttcacaaaaaatgtttcacctagtgcactcacaatgttccattatggatagatctaatgttgcagtgaactgaaatatttcattgcaacaaaaaaacccacatattttggaaacctccaattaaagaaattcgtttcattttttgtttcaccgaaaaatgttccacctagtgtacttataatgtttcactatgtatagatctaatattgtagtgaactgaaacattattccgctatttgctgaaacattgtttttacataaggtgaaacaacaccagatttaaacgagggaaacatttttgatctacttagtgaaacaattccgatatacctgatggaacatcgtgcaacatttaaaaataattcaataataagctaaatttttttttcatcggaatatatccatatgtggtcttgttttgaagatttaattgcaacgaatttaatggtgtaatcggatcatgatttggataagtaatttaagagaaaaatcagtttaaaagtagttttgcacataaatcagtttaaaagtagcgtccgatttttccctagagcatcggacgtccaacgcatagccctctccccggaggtttacccattgattcgtgatcgaactggagaaccgaaagaaatctcaaaatttgttcttcgtcttgtccttctctgctcgatatttcctttcatcctactccttgcctagccttcctatgtccttggctgatagtagcaaaaacaacaacagaagcacacaacagtgggcagcgcaacgggtttggtgttgccggcgttgaaataaggcatgggcgacatgacttcagctcaagctagcttgtcgtccccacgaccagccatctcgcgagtcgcgatccctccctccaaagaaaatcgccggcctcatcttccaaaaaaaaccggcggtcagccctcctccagaaaaagcggtcggtcctccctccctccaaagaaaatcgccggcctcatcttccaaaaaataccggcggtcagccctcctccagaaaaagtggtcggtcctccctcttctagtggaaaaataaaaaaactggcggtcagccctcctccagaaaaagcggtcggtcctccctctcctagtggagaggtcggtcctccctcttctagtggaaaaataaaaaaactggcggtcagccctcctccagaaaaagcggtcggtcctccctctcctagtggaaaaataaaatagaaacagagaagttatggttcgaactcaggacctcctatttcatagtatgcaactctaaccacttgatccagtagagatttctattaaaaagttaacgcttatttgttttcaagcttcattaaaattaactattaaatcctgctgctgatatcacctatcgtttatattattcaagacaaaaatatgatagattaattctagcacctggtagtaacatcactatagaattgtagtaacacgcttagttactggaaaacacataagccgttactactctctagcactagtgttactacacaattttaactaggtgagcgttgtgtccgcataggggtttgaccaagaataacctatggtagattcattctagcaccatcaaagatgcaaatcaatcatgttacattttcgtagtaaagtcatcacgaaataattacagtaacatgcttggttactgcaaaacacatatgttgttacgtcatgtaagaactattgttactacacaattttcacaagattaatgttacatctgcttaacgattccatagagatttacttgatggtttacctctctcccctcaccctcccgacgcaccctctattcaaattttcatttactgtgaaagtatatgttactaccaaacatataggacgttactgtagttttggtaataacatcatggtgaaattgtagtaaacaaggaatcgaaacaaaaatgtatgggttaaaagtatacatgctaaccatatacttgttactgcacaaaagtgtaagtgttactacatggcaggtacacgttaccacaaagtttgtgtagtaacactattcaagaattgcagtaataagttttgttactgcaaaacttatagtatttaccacactttcacagtaacatcatgatgggattataataacgtacaacaggaagtagtaacacttatgatatagtattattacttgtggagagttaaatttcaaaagaccaatatttgaaggttcgctctacccttgccccacgagtaaagcgagccaattcccctctctacattactgcactttttttcttactatatatatccttgcagtaacgttatcaagtaattacagtaacacactatgttattgtgcaacttatactcgttactacatcttgtagtaacgatatgatgtggttgcagtaacacatagtagacaatagtaataattatgttatagtattactgcttgtggagagttaaattttaaaaaaccaatctttgaagggtaatatctctcacatcatgcactatttttaaaacccgtttgcaccatgatgttagaaaaaaaaatgtttatcaaaagtagatccgtcatgactatattatgatgatatttcagtatcgttacttcaagtaagacatggtgttactgcacgatgaacatcacgttactacgttgttctgagacgagagctgagaagagtggaggtggcggggaaagcaccaggctggtttgaccgaggtaggggacctttgaccgaggtggggggtgggttttgcccccttggagagaggggaggtgggttggagtatcgttacttcaagtaagacatggtgttactgcacgatgaacatcacgttactacgttgttctgagacgagagctgataagagtggaggtggcggggaaagcaccaggctggtttgaccgaggtaggggacctttgaccgaggtggggggtgggttttgcccccttggagag

SEQ ID NO: 5954 - DNA, 13728 bp, Oryza sativa
  unsure (1)..(13728): unsure at all n locations
gtcgcaccaccccgcgctgccatgagctcagagtggtgtatccacccctcagaagttagaatccaggatggtcacgctgtctctcgtcacggtggcgctctcccttctatcggttcggtgcagaatgcgaagaacggcgtgccggcacggtggctcactggcaggggggttatcgacgagtggcttcttgtccgtggagtcatgtttctatgggcttttcatggaccgggcncagctaaataaaaaatgaaggaataagttcactatgggttcctcaaattatcgttgagtctgaaatttgtccctggaccgcaaaaccgcatacaatgtatcccccaactttacaaaaccaatgcaaacgaggtccctcaacaatattgtctccagatttgattgacatgacacatacgtggctcttttgattaggtttttgtctcacgtgacattgacatgacgcatacacgacagtttggtccaatctgaacatgttctttgggcatccacaatgtgcatgtaaaaatgaccttaggattaaagtaatatttatgttctcactttatgcattgggagaaaataaaaggagaaaaagttgctatggacaaccttaagcttaaggctacgccataaggaataaaaaaaaatcattttatacctttgtaacatccatattggtttttgaatcctgcatattaaaggttaaaaatatttttttatgtgggtcctaccttaaggttgagaaaagatcataaacattgtagcatatgttataagtgaaagaccatatgattgtgggtcccaccttatggtctatatctctactattataaaaattgaagatgtttttttatactttggtacgttattcgtgtatgagtcggtttctaagttcgttcgtttttggaaatacatatccgtatttgagtcggtttttaaattcattctcttttggaattacaaaaggagttgtataagaaatctcttaaaaaaactcgcatgctaacctgatatgatcagacttctaactgcagctcataattttctaaaagcatatatatgcgaattcccacagagaatttcactttaactaaaacgtataatgataatagattaaaatagcttgcaacgcacgggtatttgttctactgcacttaaacattgaggatgtccttaaggcaccaagatagtgctttttttttcattaatggaccgtgtaactgcggtaaataagtaattctgtcccgcgcggaggtggtgtggcgggagatgctggtggcgagttgagcccgtggcatagcagcctcacgacggaggctacgaggttggccttcatggccctcaccggcgctcgtgccgcagtgcacgggaacacaactttggcgatcaagcacctttgcggtggttcttcctggcaccggcgtggcgggatcttgttgcccattgactccatggaaaggttgcagttccgttactggttcaagtatatactgcctctttatttttattttaatgtatgatgccattgatttttttttcaactttgaccattcgtaattttcaaaagaatatgtaattatcatttattttattgtgacttgattcatcatcaaatgttatttaagcgtggtataaatattttcatatttacacaaaatttttaaataaaacgtatggtcaaacgataataaaaaagtcaacggtgtcatacattaaaatcggagggagtaacatgcatgtagggggagaaatcgtaaggtagaacccacatagcaaatcgagttaattagatcatgttattataaatttatctattttgaaaaatatcatcatcattcatttatttgaaaagatgccaccacaaacctcccaaaatcatatccatgccatgccatatgtctgagtgttttgaagcgttttttgtccatctttatttcatattttgaccaaattgcccccatgttcctccatccatttgcattcatgtcgaaacatgaattcggcaataataaaagggatagcgcacgagatctaaaagtggatggatgcggagacaaaggatttagacaggttcaggccctctcaatgagaggtaataccctactcctgattggggatttgaatccgccgggtgtattagatctgacgatcatatgtgctcatgccccctagagggcctcctgcccaccttatataggatgtggggcaagattacaagatacaaaccttaaccaatacggtatcggtttcctaaatctagtttacaatattatcaaaccaggactttaggccgttccataatatacaaggaaacgtaatacccaagtcatgatctgttacatattctatagatataagttatcccctatatctagtcggataaccatgccgtgtgggtatggggtacccataatctccacagtagcccctgagaccttcacagtcaaaaagataatcttctcttgaactagattattccaaagccaagtgctttaaccatctttgccataatctcccgaatacttttaccaaatccaaagattgtgaagggctgaaaaataattgaatgtaaatttatgtgcatcgagtagatgcacctaataggtgtagcccccgaccatgtggttagttgaacaaaccaagcatatagtcaaggaataaataatccaaccaaccgagtggtttttaataattatagtcaaccaagtgacttgatatcaatatatagcatatgcggtgcgaatccccaaataacatagcccagatgatataccgactgctttgtaaaaattgatgcgagcaacctaaagttgactacatcattgaaaattcacatagcaaaacagctataaaaaagcttgaatgctgtgaataaagaaatttccaaagtattgggcataagccatgcgcacactgcttcaacagatgtgcttaagtccctaaaagacacatggttttaccacgcctggaaatatacggcatatgtggtgtaaaatccgagtaaataaactcataaaggatttaccaaccgcctagaaaatgaccataatatataatcagcctaagccataatattggtcaataaaaatgcacacttacgtggcaaaaagcaatgatattgtatccaatcaattgcttaaaaacccaaacatcaccttgacttatataaaaaagtcagcggggcaactatataaagctttgctgtttgataccttttaagatgcattgtaccaactcctaaaaagttgagtaactgcggtataaaaggattttaaggtattgggcacttgatcacgcgcactttggcctaagcaaaaagtgcctaagtccttaaaagaacgtgataggccacacctgaaaatatgggctgcagacatattaggcctagaccaaaaaatatgccttcgacaccctttaaaggatgacgcatgtaacatgctcccgagtaataaatcttccgggtgatatagaccaagtgtagctcatatgaatagcttctgatctaagtgattatcccttatgggatactccaaaatagatataacaattgaatcccgactggcgcaagtattcggttgataacccttacagggaataataaatagtccagtctttgagcatagaaaatagacccatgattatgaattcatgttgcatgtatccggaacaagtccaaattggaggtatgatacttgtgtttgagctagtaagcccctgagcatatagcttgtccttctgtcgtagtcacaattgtccattgatggtagctggcgcagttggcatagagacaagacgaccaatatagagataatattgtctaccagaggtggcaaaaatattgatggtagtgaagatagtgataccaatctaaagtgatgaagttgcacagccgtggaggcgaagaaaccagtcggcagcagtcaggtcagccagcaatgaatatgaaggtgcccagtgataaagttgtgtagccatggcaacgaaataatcagtcggtgacagacgagacagctggtgaagaagataaagatgcccattagtggcgacataataagccatccgtgaaggcgaggataccagtcggtggtgacgaaagcaagccgacagtgaagatgtagacacgcatcaaaggcgatgacgaaatccaccaatcatgaagatgaagaaaatagtcggcgacgacaaacacaaccgacagtaatgatgataagcagcaacagagatgatcgactatgaggacgaagttgcccatcaaacagcagtagaataggctatgttgaagaggcttggcaggatattgataaagatgacgatgtcggtgatccagtcaatagcagtgtagcaaccaatgataatgacgaatacgctcaccagcgtttgcatagtaggtcaaccgtgaaggtgaaataacaagccggcaataacggaagcaaccggaggcgaagacgtagtcatccattagcaacggcagagatgtcagagccgatgaagtagaggtgttggtgatgaagtcagtgacaataatccatcaaactgttgagaagatatcaaagctcaagtaattttcttgatgtgtgtataacgaagattgatgtaacaccccttgatttgtaaagatggtagtagaacttggagttgtagctgttgcagatgcttcacttgaaggaaagtaaatgttgttgtccaactcatcgaaactgagctgattggttgataactctaaactcccggacatgtagatagaatctcaaacttgatacttgaaaattttggagtagattgtggcggcgtagagaagccaaaattaccagtgaaatcattggagttgctgaagtagaacacttgctctgaagcgaagacaaaacttataactctcgaagtagattccatagaactcgttggctgatttgagagtcttgtatttgtatagcccccgactctttggttagttgggaaataactgaacatagagtcgagaactgcagcttcttgtcatcgagtagtcattgcaatcaaaagtgaagatgcatgttgaagatgtccgagtaaaaatattgaagatttgaacaccacttgttgtagtaaaataatacggcatcatatttggtgacgtatgccgaggtgtcgaagctcttgtagacgtcgtggctggtgaagtagcaaaacttgcgaagtagcggcaattgagttggccggtgccgaagataataaagatgaagtccctccaccatggtgacaaagttgcaaaggcgtgatgaagtgaacacgagtcaacagcaacataagcaaaccggtagcgaagacgcgtggttgtgaagataaaaacaccagttggcggcggcataaccagtcggcaacggaagaagtagaatgatgatgaaaacgaagacgttctttaacagcggcaaaataggccagccatgaaagtgaagacaccatgggtggcgccgaaggcaaaccggcgatgatgatgacgccagtcaatgatgacgaagacgcgcagccgtggaggtgaacaagccagtaggcgtcaaacaaggcggccagcaatgaaaacgatgacgtccatcagtagtggtagcaatataaaccagcagtggaggcgacgacactaatcagcagcagatgagacgaccggcggtgaagacgataaggccaatcaacactggaagaatcatgcagccatggaagtgaagaaaccggtcggcagcagacgcagacaacttgtgttgaagatgatgacacctattagcggtggcagcgacatggctggccgtgaagatatatcaccagttgtcgtcatacgaaggcaagccggtctgtgaagatgtagacacccaacaacggcggcataataggccagccgtgcaggcggtgacaccagtcggcagcggcgaaggcaagccggcggtgaagatgtagacgtctaacgacggtggtgtgaccaaccaaccgtatagacgaagacaccagtcggcggtgacgactgcaagcctgtggtgatgttctgactaatccattcctggagtgtaagagataagcttaaagccatgaatcctttttatgcatatctggatctggatcctgcagaacaaatatataggatgagtagtatctgatgcaaatataatactcgaggaaaatttaagtattttaaaatgtttataaatatatatttctcctattgtcaattttgatttccccgagcagatgactccttacgtttaaacactctgcccgactagtcatagcccccaaacattgggagtcggcctaggcacttcccaaacatgcatatgagtgacatgagttcgtcattagtggaacaaagtttcatggatcagagtttactacttaggtacttttgcaattattaagagtagaaaataaattatcttatctctatgcttttgatttcttccgagtaatacttagcaccttgcgttactcggtccattcaacgagcccccgggtgctaggaatcggcccaaaggcaactatccatcgacaaaccaaacggaaagtataggaagatagaactccataactcgataggcacttttgtactcagattatgtcgcaagcaatcaagataaatattatgaaaattgtttaaaaaatatgatataacatctatagccctcgactcactagtcaacggcgaaccagttgatatagtgaggcagaggaaaagaaaaatatcatataaagaaaattaatgatgacttagctttgtaatattccccttgatgatggcagaggtggccaatgtgggaacaaagtcgtccgtcaataacaatgaagacaccagtcggcggcgaaagaaggcggtcgacggtgaaagcgaagatgcccaccaacggcgtcataatagaccagccatgtaggcagagacaccagtcggtggcggcaaaggcaaaccggttggtgaagacgtagatgcccatgaacggtggtgtgaccaaccaaccgtataggcgaggacaccagtcggtggcgacagagacaggccggtgaagtcgtagacgcccaacaatggcggcataataggccagccgtgtaggcagaaacaccagtcggtggcgatggaggtaggctggcggtgaggtcatggacgcccaataacgacggcataataggccagccatgtaggcggagacaccaatcagcggcggcgaaggcaagccggttggtgaatatgtggacgcccaccaacagcggcataataggccagccgtgtaggcggagacaccaatcggcggcggcgaaggcaagccggttggtgaggatgtggacgcccaacaacagcggcataataggccagccgtgtaggcggaaacaccagtcggcagcggacgagacggccgggcggtgaagacgtagacgcccatcaacagcggcataatagaccagccgtgtaggtcgaggcaccagtcggcggcggcgaaggcaagccggctgtgaagatgaagatgcctagcaatggttggaaaatgctaggatatgtcctcacacatgtttgctcccaatctgctcgcacgcgtgtatatatgtgcatacggcagagtgcaaattatgagtgtgagcagctcgctccagccagatcagggcgacgtcagccggatggataggccaacgatgatctcacatgcaaaaaatacccaatatattaatcagactgattaggaatagcaattagcaataacgtatagatattatatgctatatatattgatgtatgcatgcagcatatacgcatactaatttgcatgtccatgcatctgaaagtattgcactccactgtgcttgcatctgcccctgtaaccaacagtccttcagcatgatgccgtcgtcggaggtaatcatggagccgtcaaacgccagtatatgcacgcgagagaaaacgaagaatcaaagggcagatcaatctatgattaaaaaaatcataattataataatagattggaacgataaattagccgatgccggatagcagtttttatccatgcatgcatgtgtttatgcgtgtagatgcagagccgatccttgcgtgtccaagtgcatgtgcggacggatgattgctatcccggcgagtagctgtcttcacacggctgatagatggctgcggtggatgacgcactgctacacgcctccgccgaggcgccgagtccgcgtcgaactcgaagcgtccagtttgatctcagcaatcaatctcaccgagcataacagaaaacggcgatgacgacgacgactggatcggaggctcgattgctatccggtgcgtgtgaacatccatcgctccagcatgcctgtccagatagcagtggtgactcccgtggccgacctccatgcagagcagtacgatcaagcagggttgtgcaggctggtagctggagacgtggccgatgatctcttggatacagatgattttttttggctacggactgtatagcagctccagccggcatcttggcgagctgcatcttgaggattcaccaccattggtgacgtcggagattggagtgatccaacttgctgaggttgattttccttgctagattgaatctgattcggcgccttctaattggttccatctcacttctcgtagataactcgacgcacccctacctagcgcgccaactgtcgaaacatgaattcaacaataataaaagggggtagcgcacgagatctaaaagtggatggatgcggagacaaaggatttagacaggttcagtccctctcaatgagaggtaataccctactcatgtttggggatttgaatccaccgggtgtattagatctgacgatcatatgtgctcatgccccctagagggccagaactttaggccgttccataatatacaagaaaacgtaatacccaagtcatgatctgttacatattctatagatataagttatcccctatatccagtcggataaccatgccgtgtgggtatggggtacccataatctccacaattcatgaaaaataatacggaaaggtaaaattccaaacttttgcatacacgggcaaaaacatccgtacaattcgacaaactaatttgtttcaaattgcaaacaatacgcaccaaatctgggtaaaaattacacataggacaaaaaaaaaagaaaagaggaaaagaaaggagctggcatggaggtctgccatcgacgaccaccgcccgacctcgctgccgcaggacacaccatccccgacctggcaacctcgatattgctgaatctgttcacaccgttgccgaaccagcggcttgtcgtcgtccccactaccaggcgcacctcgcctgccggacttgcagaccatatgcaaacccagccttcgttgccgccgtcgtcgcacttgtagaaggaaacatgggtgttttggtctttacagaaatacggtagataaaaacgcatcaaaatgtcaaaatgtgttgcagccgtatggcatggcagggataggattttggaaggtttaggtcttgttcggtttagagcggattgaagagaattggaggggattgagaggaaataattccacaccgcaatagatgtggaataaattcccttcaatcctccctcacagggatcaaccgaacaaggcccaaataatttataatattattatcaaaacagacaaatttgcagtggcattagagcaagtttaatagtatagcccactactaactccaaatcatttatagccaatgtaatagccaattcatacaatagttgttcactatactattaatacctggtccacctgtcatacacacgttacgtctttgagtccatactgcagttggctacagatctgtagctcgctgctcttttctcactctttctttatctctttaaaatatgtttatagctggtttatagcatgctattgtatctgctcttagtgcaattaacccaagaagagatgggagagattagggatgaaaacggagcggatagtttccgtccattctggagagaaacgaatacggataccttcagatcggatagttcggatacaaatacggatatttcctcccggatacggatatgaatatgatatcggggttttcgtcggatacgaatagtaatttggatatccagtgaacagtgctattcggatatctatagaagtcatgagacatacctcatttgtttacaactctagaccttcaatatacctttttagattttaatagtagttcatctcttaacactagcccacaatattaatattatttaaattttaaaaatatttataaattatactatattttatataaaatgaggtaattatatattttgatatttgtttctattagaagttgagttggtcttcgtgttccgagaaaaaaattgtttccatattcgtgtccgatcatattcgattcttattcttattcgagataatccatatttgtttccgtattcgagctatccgtattcgtttttgtatccggtaaaaaaaatatgaaaacgaatacagtatgagcattatccgttcgtatccgctccgttttcatccctaggagagatgggggtgccagtgcccggccaaagaggagaaagcagagaagaccgtgacgtgattttcttgttatcgcattgcatcgtgggctggattagagcgagcgactgatgtgtaacactgaaattttcgaatataaaactttagaataactaaaaacctttttcaaaatttgaataatgctgatattcactggattttcctttttctcttcctattgtgctagtgccaaaaattaaaataaataaattcaaaagaaattaaatccaaattttaagttcaaatattaaattcaaacgtcatttattaaagcacccgttatttaaattaaaatcctttagggaaatattatacagataaaaacaaaactagtttcaaagtctaaaccacaccttgtccaaacccttagcctatctctagtctagccgagcacccttatcttcttcctccatttaggccggcccatctagcagcccaacctaccggtgggcctgctctgtctcggcccagcctaccaagccagcctggcgagctgcgagatgagccaacccggccagccaccgtcgtccttccgccgctgtcgcgctgccggagtccggggtgccgctgccgacggaatctacccaacccgttgtacctcgccaccgccgccacgcgcccttgcgaacggtagatgaccgtccctccaccttttcccctggccgactcgccatgccgcgtctcgacggcgtccatcttgctgcaccaggagcacatacggcagcgcaggaaccgtgccgcatcacctgccacacgaaacatcaatttggcataaaaagatcaaccacacgaaagtacgaaactgctgctaatgataagattagtgtcactgtagcatacgcacattattctgcagcctatcttctccttacacaatacagtttcaggtgcaggttggttatctgaagacaaagtcggtgctgataaggtaggttgcagtgagcaaggcctcatccgaaaagcgaacgagaagagttagccaagtctctacaatgttgcaatgtgcatgtgggaacacaaacgatgtgcaatgccaagtttcagaatgaatttttgcaaccttcaagtcaacatcaaaccaatcagtctgattgagcagattttattatttggatatcgttgaacatatgattgaaactgaatgaacaaatgctccagtcttcaagagaacgatatacccatgtgaatctgttaaaatcatcaataacaatatgtttgcccctttctgttttattgtccactgaagtaaacagtcagtcaattacgcctgtgtcccggtagcacaacagtgtcttgtttgaaaatactgtaagcaactcatcagagatccaggaattagcatcagagaaggtatgctgcagatgtgtacggagaaaatgctcttaacatctactactaaatactaatacctcaaggcatgctgcagtcagccttgacatcttgacaaagttactagcagccttgcaaaacttcagtgagtgaacagattctgaaaaaaaaaaatcagcaaaaggtggagttattgggacaagttcaaggaatggatgatcttcattctgtacatttgcaatttgaagatcaattcctttcttttccacaagtttctgcattttcacctccctgtttcatttcttcagtcccaattcaaattgatgcagcagctggcattcggtcagagactgcaattcaagacattggcacttattgataaatagattactctatttatcttagtaacatccaaattcagaaaacaaaaaagacactgctccttcagtttgattgccttccaaaattaacaatactttgcccatcattttcttcttcttacaaaaaaattccttcaaaaataagaatgagtaggacaagcaacagtttaaatttctgatcgaattataaaactgatcaaaacaagttccaaatcaagctcgaaacactagttatctgaaaaaactatcacaaaaaagaagccccgctgctcgcgcgggagcacgcgtgagacatacgctgtctcacgctgacgtcggcgcgtccaataaattcaaatcccaccttactggaaatatcccacgcgcgcatcctccactcatctcctctcgaccaagatttcccccaaaaccctagaaatccccaggcggcggcgcggcgcgcgatcgggggatcgagccggcgatggcgggcgcggatgggctccttcccggcctcaggttcgaccctagcgacgacgagctcgtctcccgctaccttctccggcgcatccagcagaagcccctcccgctcgacggcgtcatcgtggatgccgatcccctgagcgtgccgccatggacgcttctcgcggatcacacccgaggcgacgaggccttcttcttcgcggaggcacgcgccaagaatggcaagggcaagcgacagaagcgaaccgtggagggcggagggttctggcaggggcagaggatggccgtggatggcgagcggctggtcgtcccaggcgacgatggaggcggcggcggcgacgaaggcctggagatcacgtggcgcaagtatgtgttgagcttcttcgccgagggtgaacggggcagctcgggctgggttatgcacgagtacgccgtgacgtcgccggctgacctcgcctcgtcgcagctccggctgtaccgcgtcaggttcagcggccacggcaagaagcgcaagagggagccgcagtgtctggactcccacgacgacgacgacggcggggatcaagaaagcgcgactcaccggcgcgccgtggctgagaccactctgttcgacggatacgtgcctcgtcctgcagccgacggcaccgaccagggcacctatggcgtgatcgacggcgaatcttcgctggcgtcacattgtcttcccgatcagatcgttcccccagcagaagaagctgatgccactgctggtgtagagaatcctctgctcgatgaggagcgctggtcaccaccacagcccgctctggtgaagcagaactcctacgacctaatggccatttcgtcactgctgttttctgatcttcccgacagaatcgatgacgatgacctgtctgtgtcgcaaacagagggcaccgatctgttcgagcagggctcctccggcgtgatcgacgacgattattgtcgggtgttccatggactgtccgacctgatcgcgct

SEQ ID NO: 5955 - DNA, 18368 bp, Oryza sativa
  unsure (1)..(18368): unsure at all n locations
agcgaggcgcctcgcggagaagacggtgaggtgaagaagaacaagaagatggggggcccaatcaatgcgtctcctcctagcgaagaaatccatgggaagggcgcggacatgtcgagaagatgggggaatcccatggaaatgtcggccgacgtggacgatgcgaagaccaagacgacggcgacggcggcggcggcggaactgacggcgatggcgatctctccgattccgggattcacaggcagagggggcgcggaggcgtcgctgaggcggtctctcgcggcggcgtgcgcgagcatggactcgtcgagcctggcgcgcatcctgtgctcgtccggcagcagcagcagcagccacgccaccctcgccgcacgtcacttccgcccggcgcttctcgccgccgccgaacccgcggcgctcgtcgtccgcgccgtcagggacctgctggccgggacggcgcccatcagggacagcgcgtgggagagctgcgtggagctgctcagctgcgtgcccaagctcgccgtggcgccgtcgccgggcacgatggagcaggccaatcgcttggccgaggactggaaggagatgatcgggaggaccgaaagttgcagcatgaacctcggccggttggctgtatggggccttctcaactttcttgtctcctacaacattgtcctggagttcgacgcggaagaaatcatccatttctttggcactctcccggacgacaagaagcagtgttgcatctccctctgcaagtatcttggactgattgacaagatggctggtacagtttcaatgcctcttactcatactcattgctcaactataatttcatatgtttgtaggcaacttatgctacacatctagcgcaattgtcgcggatatggaaattcattgatttgtgcttgtgttcacattctttaatgataagcttgtttaactccatgtcccaagccttcttatgttatatttagtggccataaatttgtttatcatctaactgaatcagtagaaattatgttttacacttttagtcacagttaatacagagcattaatttgcatcctaaaatggtgacctcaacattatatttgcatttgctagtaaaaaagtaatctcatgaacattttctatatccaaaaagggttccatgtggacttatgattatctctcattatttcagattcagttggtcatttgattgaacatggacaacaacttgtcgctatcagattggcatgcactttgaatttgacagacaaatacactccactttccatcatggaagactatattcagaatgctaaggagactgctcaagagatactgagcatggaaagtgattcagagtcactggtatgtccctttttatgcagtagctatctcatttatattttctactcgtttttctaaccaaaatttcaaatccgtgtgaatatgaatggaagaatagttcattcatgtgctctagagcatgtagctcttcacgttgcagagttagaaaaaaaaaactatattcctttttctaatgtaaccctcttatgatttaaaggtaaacaactggtgtttccggctttgtaaaaactgtactgcacaacattctgaagcacgtaattaggatgttttcaatgtaatgatttatttaggatgtagtggagtagtgagtaatttcaaattatatattcatattgcttttagaaaatatcatattcaatttgtgaaaaatcactgcagatcatttggcatggtaaatgattgcttccacatactgatatacaaatatgcttattttaaaattggtttaacacacctgatgcatcttgtattgagcagaaactgtccatgtcaaagcaggtcaatgctctaatattgtcatggagggttgttggtgaatgcaatattgactctgtccattgtgatagaattaaggcagaaattacccagctgttgcataaatatgcaaacaagaggcacagcctagaagaacttccttctgatacttctagtccacatcagaaacatcaccaaatgtcgcaagagaagcaccactggcagcaaaagcatcgagaggaacaacagcagcagtttcaaaatcaatccaaggaacaagaacaagagagaaggatgcaaaagttacgagagctgaggaaaaagaaaaacaagagaactcagcgcaggaagcggaagcaaaatgcacaagtgatgaagcagcatcaatttgagaaacagcgaaaactatatcacgctggttcatttaccaattctcaaagctatgtcagatcagaaattcaccaccacctcagccagcatttttcaggaactataggaacacctgttgcaccatatacacctgttgcaccatataccggacctttttggtagctagggtccatatataatggaccgggttcatcctgcctacattcaactattcaagtcagagtagtagtacttgataccattactgtttgactgaactgaagataaagatagtagaagagaacggaaattgcgctggtcgcagaaaaacagaagtcaatgctgattggccagtgtagctttgcactgattcaaatttatcttgttgcactactactttctatatgcaatgtacaattagttactttcatggtgctgaattgttattaatcagcttccgtggaggctcctaatgcctccgctaggtcggttggttcatcttgtggtctaggttcactcccaaagtaagttttatcccttggatgcccttacatttttggctgatagatggttgtgaggtgggctatgccggttaaccagtgtgtgtggccccgaccagtctacctgtaggatgatcggacctccacgtcaggttagttggcctttggtcggccaggctaaggtggtcggtcgggcttggggtggctggttggcctagctagcccttaacctcctacctgaggaggtgttggctagtcagctagcccaccctctgatcggccggccagggcccttggcttggttaacacaattttctttgaatataatgcatttcacctttatttgaatgcaacttgcaaaataactaagacatgacaaaactaggaaaccattactctcaaccaaatcaatgcattgaacattattttacctgtttttgatgccgaatgttggtggccaaaatgagctttaatgatcgccaaccgccacaaaagaatcaacaaaggcctaaaggtcctgtttgtattttagtccctgtcacatcgaatgtttagacaccaattagaactattaaacgtagactaatgataaaacccattccataaccctggactaattcatgagatgaatctattttgggcctaattaatccatgattagcctatgtgatgctatagtaaacatgtgctaattatagattaattaggcttaaaaaatttgtctcacgaattagctatcatttatgcaattagttttattattagtctatgtttaaatatctgatgtgacagggactaaaatttagtccctcgatccaaacaccaccaaagttagatgatcaattgcctatcatgattatagaaaattatggaattgagacaaggaatattgttacagtctatcaaaagccttaccctgattatttttatacaatcccatatcctcctagttttcctgaatttgtgaaatttaatgatgaggataatagaaacgtataggaatatatagaccaatttctagcacaatgcggtgaagcgagcaatgccgatgttttcaagttatgcttgtttttctctttctttatccgacaatgcctttatttggtttatttctttacctgcaaattctatttatacttggacccagttagaacaaattaaatttctatgattatttctatactggggaaattgagcttacattatctgatttaacaatgattaggcaaaggtacaatgaatttgtgattgttttattcaagggatttagagatactaaaaaccgatgttttaacttgtctattactaaaagagatttggccgatcttgcattcaatggtttaattgctccggtcaaaacttcttgatggccacaacttcttgatgttggtcaagttttgcaaatggctctatcttaagaaagttgcgctagagaaataagaaatttattatatctattgacaaataacctagtgtgaatatatttgaacattttgatgatgaattcggatgaagaagaacctgacgtgtataaggccaaatggtcctggactaacaagaacaaaccatttgtttgctcaaattaaaatcggacacactacaaggatcaacaaactaaaatcaagtgtacttttgatgtgtccatgtgaaataaaatctttgattatatcttgcaagaaatattattttgcctaaaggccacataccattgcctaggagttaattaaaacactgtgcacactgtaaatggtatggttcttattcacatgctattaatgattgcaatgtttttcatcaataatttcaatcatccattgataaaggacaattgtagttcatagatggtccaaagatgaagtttgatcatgaattatgatcccttcttggtaaacaccatagagtttgttaatgcgaaagtgttgatttggtctagttatgttgaattcacaaatgggaagagtatgattgttggtgaaccttagccaaagatgatcaaaccaaaaggccgtgagattggagtttggaaagttaatacaaatgaagcctttagctctaatatggtgataaaggcaagatgaccttcaatatgtttataatatgagagatgaaaagtcggacaatgatcgagtggtcggcctaccgatgcaaagagactaagatcacctcctagggggtgatttgtccaagcacctaaacaattggagcaacggtttccatatgggcctcaaatcatggcatggaatccatgtccaacacttctgcctagttgtcactttccatacttcatgctatggggatgccagcaccggtgcatattccttatctaccatccctgccaatacaatttcatcaaggagtggaaaccaacgaattcagttcatgattgcttctccgctacaaccaaaagccagtttcaaacaaaagaatcggttgacgagttggaaggagagaagaagggcgaaaaacgctcaaaggtggagaccaagacaatggaggtgatcatcatcaaagtagggttcaatgatgtcccaatacccattggaggtatgatgaaggcaacctaaaccaaggagatcaaagcaggttttagagactctcttgactatacccgcaagtcactaggtgtatcccatgttggccgaaaaacacgtcaacaacataaatgaagaaaatgtcgtatttgcatgctaccagttgtactactttatttcttgatgactagagcaaattaattcagctaacctggcattacatatatatcacggaagcagtggtgtggagccacccataaggctgtatggtctgctgaccccacaacttttccacaaacgcccttatgattctgcatctttatatgtaaatccattaaaatatattaaaataatcccactaaaatgtgaagcaattatatttgaccgcataataaaattcctggctctaccacttaatagaagcacttattacgtaccaaccttgaggaggctaaaagtggtatttacccgttagcaaaagtgtattaaaactcaccagttttcaccggaccaatgacagttagagttttaagcagatatttaacaattagcatcattggtaagactaaagctataataatagcccacaaaccaattccttacaaaccagtttgaaactttgagttgttaaaattgtttatataagaagtgataatttgttattagaaaccatccagatatatgcatcatggttttgagtttttgcagtattttaattaagttgctatcataattttcacttttgtagtcactttaaagctgattttattggccttagcacaagatttgagatgtgcccgcgacttacgttgattcaatggttataaagtctgttctacttaccaaatcaagatgtgaacatcactacagcttgatgagtacatgagaaaattcatgaggttcatggtttatctgtcattttttttattaaactccaaataaaaaaaaacggaattgctgtatatctgtcgacagattttttgttaaaaatctgtcgatttcttcaccgtatgatttactttgagatttgtgcgtgtgccttcgagtgaaaaaaaaatgacgctagagcagggaatcgaccacatgatgtcgggatgccatgacgtgcatcgtaccaactgagcaagaagcgactgattattttgctgctatacctaacgtttttaaaactttcaccgcagtttcatagttaattacagtgtaatttttaatagatgcaggtgtaatttttgttttacatggatggtaatttttttactcatggttgttttgttatactgtagttaacctaattgtttgaggtgtgatttgatattttcggactatatatgccgtcatatttttcataaaaaaataatcggcacgtatttacatcgtaaatcttcaaatttacatatgtaattttaatatatttacgctataagttttaaaattacatatgtaattttaatatatttatagcgtaagtttcaaaattacatatgtaacccctaaaattacatgcgtaagttgatgtaagttgcttgtttttccttttctttttagcagcatcactgacgtgattaatgtccagtgactgacgtacattgatacgttttcatttgagcagcacatggtggtggcttgaaaattcgactgattttctaaagaaaatctgtcgaatgattgttagacagtcccaaaaaaaaatcctacctagcacataatgtctgacatcgctacatcactacagcttgatgatctaagcaaattcggcaaggccttttacatcttttttttggggtcaaagtagcaaattattatggtccatttagtactttccaacttgcaaattgcagaagtttcttgtcatgattgaaatagcctctcaaaaaaaaaaaacaatggtctatatctactactcctttgtgtacatccttaaatttaaatggtgatactgtatttacttggctaactttctagattgccctcttttaaagttgcatagatgtggttcttcctagctcagtcttccctattaatcataattcagcatacaaaattgcacattgattgtctccaattttggtgagttttcggcaaaccaaacccaaggaggtgtgaaatggttcttaacaaatcgtcctatcttaacaaaacattttaaattttcagaacatacgtcgtactactaacttcccaaaactggaaggagtactatgtttatcttgtccttttacacaaaccaccctagacagcttcgcgttccccatttggtcctccgctccgcagcccacgcgagccacgctgacgcgtaggccccaccgctagcgagagagcaagcgggccccacaccctcgtacttcgcttgctgtaaactgagctaattaagcttccaactctgcctcgccctcgctctcctcgtttcacacttctccgctctcgccctcgccctcgccatggctgacaaccaagcgccgccgccgccgccgccgcccgccccggagagccccaccgcgccgcagaccgccgttcaccggccggatcttatcccggacttgaaccgcccgtcgttggagtcgatcctgatggcgaacgtggaggaggccgtcgcggcgttccccggcagggtggactctctgcggcaatcgtacgaccgcctcgtcgcctcctcccccttcctgatacccttcttctgggggaacatggagggctacgtcggctcggcgcagggctacctctcgcgcgggctcgcctcgctccacgggcagggccaggtccggcacggcgacggcgacggcgccggcccctccggtcatgctggtatcgccgtcgccgccgtcgaggcgggcggcgagggcatggaaggaggagcatcttctgttgccgatgaacagggcggcggagatggcgccgccatggaggaggaggcggttgcgccggttgaggaggagagggagatcaaggcggtggccgtgggagaggttgctgctgatgacaaggacagcggcgaggtcgctgtcaagaaggagaggaaagaagccatggatttgtttcctcaccaaggtgatgatgacgcatcggtggagccgaaggtggacgccctccacctgctcgccaccgccaccgccgccaacgccgacgccgacgnnnncnnnnnnnnnnnnnnnnnnnnntnnnnnnnngtcgggatggaaagcaagggtaagggcaagtctcctgacctggacatcaaggtcgaggccatggatccgtcgcccgagcagggtgctgacatgcaggccgtggtgaccatggcggagacagaggatgcggcgaagaaggcgttcgacgccatcgacaaggtggggatccctttgatggacaggactgaggaggaagaagaagaaggagaagcatacctggaggtgcctcttgaccaagccatggagatggaggtgcatcctgaccaagccaatgaagaagcagtaatggaggaggtgtctgttcaagaagatgatgctcaagaagcggacatggagatctgtaatgacgaagaaaaaatgcaggtcaagaagatggaggaggaggcagatgacggcgccaagcgagcctctccagaacgtagcagcggtgagatcgtcgccgcggggaagaagaaagcagccatgtacgtgcctcgcaaccaagacggcggcgctatcaccgacgcgttggtcggagagatcaaggcggaggccaagggcaagacgaagagagcatctcgcgaggaggaagaagacggtaaggtggtccgcgaccgtggtggtgcggcgaatgcaggggcggagcggcggcggcgccgggagcgtgagccggcgccgcggcgtcagctcgtggcggcgtgcgagcggatggactcgttcgacatggcggagctcgtcctcaggtccggccgcggcatcgcgggcgagttcctcccggcgctccgccgcgcgccggacgcgcccgcgctcgcgctccacgccgccgggtacgtcctctccgcggggccgcgcgacgtcgactccacaagctgggacaacctcgcggcgctcctccgcggcgtgcgcaggctcgccaccagcggcagagccgcgccaccgctggaggccagggcgaaggaggccacggcgatggccaagaagtggatcgccatggtcgccggcgaggcggagcgcgagcaccagcgggtggcctgggcccgttcggccacctgggcgctcctccagttcgtcgccgcctacgccatcgccggcaacctggaggtgaaggagatgatggtgttcaaaaccgtcggcgacagggacggcggcgccgagctgatcaagagccttggcctgcctgacagggctactggtaaaaataatctatagctttaattacagttcattccattttctcaattaatttatccgcgtaaccattgtctatcgaatcgcaaatgtttgtgaatttttacttaatttccacagaaaaaaaactgttacgtactgtgatcattacatgctagtactgcagtgcatggtgatgtttttggttatgttttcctttgtttgttagagttagtatctccttttggagtcttccattttttccttcggcagttgttgctctaagattagagattctgatagtatcccagtaaagcgtagagttgatacacaagctgagtatattcttagttcaatcttttgtccttttgaagctttctggcaaaaaaaaaaaatcccatttgaatccttctggaaataaggtcctttgagctctgccaatttggacactttagtgaagtttaatttgggaatttgctgaaattatcatgggaatttaacacattttttagatatattagttttataatttctatcaataatttatttctttcattcattcaaataatagtcataacttggcttccaaggggcaaatggagttagtgacacgcaagtaaactgaaaatatattttctatttatctgcaattggtgcatgtattagttgcatcttactcttttaagtctcaattaggtttgcactcattgttcttgtcatatatgcataattctattttttttcctatcaaatgttatgttttcaatgatcaaactgagtcttggtcaactcatgggcttgtctattacattgggttttcttttgtggtatgcaacccaatatctgctactagatttatttttgctaattaagtatgtactcccttgggtttataatgtatgacgctattgactttcggatatacgtttgatcatttgtattattaaaaaaattatgcaaatataaaaaatgcaagtcatgcttaaaatacatctaatagtaaaacaaatcacaagaaattaaaaaaataattatgcaatttttttaataagatatgtcaaacttatgtgcaaaaagtgaacggcatcatatgttaaagaaccgagatatattgagatgcatcattgttcctagccattgtttgccaactctcccatgttagcattatcttttccattttttcccttggatgaaggcagttatgttgtgctgctgggtatgcattagtgccatgatgatttgggtatgatcaagattaaactgatgcaaaatcatgttatgattatcttctagtggatgaacacatttgctatattgtttaattcataaaaaaaggtgactaggcatcagttggctgacattgcgttaagtgtcagtcaattgcaatcaactcccacatattcaatccaattgacgaagaatacatttcttctgtctctagcactttctgccacagtttctatcttctacctgattcatcttatcgaagagctcccttgtcccagatccactggcaccagtcaccactcaccacctgctaagaccagcaccataggtcttcaactcctcatcacccacagctctggtggtgccaccattgcttcaccgtactactctcaccaccaacctgccacctcccaaggcctccctctatagcccagcctcgatgaagcaaatgcttcctgattcccattcatgccttctcctggccaagttttggtccttctttaatcatgttgttctagttggtaaaacaaatcattgaaggaatctttagctacaaaaaaaaaacctaatgcatatgtccatttgctcttctaggagtaagaccatgaaagttccctacataggagaaatggtagcattagcattgcactctatggaggtgcaatacaatttgtaactgaaatgtcaatttatcgatgtgaatgtcccgtcaaatccactgtatgttaggtgattatccaagatgggttaatggcaaggaatatcccctacagtatgaatggtgtccatgaagattggatcacctagatgctttgttcgcatacaaggtttcatttgcaactacaaaaagaaaatccattgacttagccaatgacatggtgtaaggggtgtgatttgttagggccacctagttctcatactaagggggtacccaggactgagccaaggcctgagccatcccaccctagtataggaggaataagtcctcaaatataggtccaatctaatttgtatcccttgaccgcaataccagatatcttttaccccctcccccaactatcaatactgatgcaatttgacccctttagtggttttgagactagttttcactgacatggcacgttgacttggtccagctgtgctgacgtggcagctcaatcacaaattagtagtgaggcccacatgtaagtgactagggggaaaaaataaaaaaaatgtagagcccacttgtcagcccccttcttccctctctatcttttccccaagctcaagtttggccccaacagcctcgccctggcatcgccgcagctagaggagtggaagggtctgcaacgggacggatgatggggttggctggtgaaaacggatggagacaacgatgacacatagaaggagagtggaggcacgcgagtgcagacgggttcaagaagagggcactgagctctggtcgaagtgggagtaggaagaagggggtagcttccatgggtcatggcggccaccaccagacaacatcgcggcaacgaggctactgaacattgtgctggcaactgccgcaatagtgccgccagacaaaactgtggccgagaggatgtccaaggagctgtcagccacgagcccaatgtgtgtgtcaccgccatcaagactaaggtgcaggagcaagatctcactaccacactatcgggaagctactgcgggggcatcatgcgaggacccctaatgtcgcctagctccctcgagctcgtctgccccgttgccttgccttggtattgtagattcttcgctactatcgccttgctgctactagccactacccaccgagaagaagacacgggatcccatcggcctctctacgctgccatagtaaggagaggagagaaagaaagagagaagagaagagggagaggaaggtggctggcaagtgggccccaattttttttactttttccctagtcacttacatgtgagccccacttctaatttgcgacaaggctgccatgtcagcacaaatgaaccaagtcaacctgccacgtcagtggaaaccactcttataaccgctgagagtcaaattgcaccattttaaatagttggggaggagggggggggggtcaaaatatccgatattgcggttgagggatacgaatcatattagaactatattgagggagtcaaagtggacttattctagtttacaatgcatttgtgcaattgtgcaagcgtgctaaaaatatatccaatggatcttaagtcctaggtgctgggatatggcccaggtttcttagggcctagtccacccttggtccttatgacataagtcataatttcttccaccatcttttggaggcgaagtggattccagttgcgaagtctctgacgagccgcaaaagacaatgagctgaaagaactaattgtttgagtatgcattctgtcagaatttctattttaaatcattttgagctttaggacataagcagcaaacatgattcataaatggtttgctatgcctgtttttttttcgttttttgaattcacatctctactctgttgagcattattctctatttttcaggaagtgactggtggcattgctgatactttacgatgttcactgtcttatttgcagagtcaattaatcgtctgatgaagagaagggaacacatcgatgctgtcaaagtggctcgtgctttcaatttgattgataagttccctccagtttctgttatcaaagcatatgttgaaaaagtaaaagaggctgctcaagacatggttagcaaggacgcagtttcactgcaggcattggtatacctttcatctggttaactgggacaatgggggatttgtttcctaatttacttctttaactaattatgccatctagatttaattatgctagatatatgcacacatgtttgctatagacaaaaaagaattccacatgctctaatgttctttgaatcaaatgatttttcttttttttttcattcaacacatcttcagtattttgttaatttttgttacaggtagcacttggtgacttttacattactctaattatagatttagcatttatatatgtgacaatttcatcataagacctttatgtgataaacatatatttgagaacaaataagattcactacaaccaacacaactgttgcattcttttacaaggagtatagatatgaattgtgttactcttttgcagccaggaaatccttttacattgcaaaggagtaatataatcatgatacatacagctgtattgtcatgaacagaaaatgattaattcatcatgtttcatgaaagaaaattaatctcttttccagatatttggtaatttctaaattggtataatgtactgtatgccatcaggatcgcgctatgcaagaggatgttgctgctctgagatctgctaaggaagcaattgaagcgcatgacagtggatctgactaccgctacactataatgcaagaagtccacaagttgatgagatcttatgagaagaagaaacggagtttatcttttggttccacctcaagttcacatgagcacaagaacaagaggcacaggagcaatcaggctatgcctcgttgggaaaaccaaaccataccaggtcctcctgtatattttccagtccctcctccatattttggtcactacaatccttatcacccctttggtccacaacctcgtcgtaattaagttgtggtgatgctgctgctgtggtggattgactagagtgatgaatggattggatgaacagaaaaaagaaagaaagtgcactttcataattttgcagtaatttgttacttctccagcttggctgcaataactcttttggttgtagcatgcagatgcaccgttgttgtacatgattcaagctggcaacttgaattcaaaccttaaataagtttcttagttgtttatctttaattttatctgtttgtctgtaaattactttgtgggagaatgtttagaatgatagcaattttacggtacttgagaaagtaccaagaaatactaaatctgtagcgtttgatttctgatacctagaaggtatgaataggtaaatgctagagaatgtgatatatctcttagaatgaatgatgatctgtcaccggttcttctttgactgccacatgctgtgggaaaaattaggccctgattagttcgcgagacgaaaagttttggcgtgtcacatcagatatacagagacacatttgaagtattaaacgtagactaataacaaaacaaattacagattccgcctataaactacgtgacgaatttattaagcctaattaatccgtcattagcaaatgtttactgtagcaccatattatgaaatcatggagcaattaggcttaaaagatttgtctctcaatttacacataatctgtaattagtttttttctatatttaatactccatacatatgtccaaccattcgatgtgacagggtgaaaagtttttgtgtgggaactaaacagggtcttaatggaactgaagactacggtgtctgaactgtacatcagtacatatgttagctagttgcggatgcagggtccagatagttgtgggacttcaagacaatcaatctcaccgacaacaagaggtcagacctgcgaaatgaccagccagtccctgagcattgtagaaacaaacccccaagctgccgttacttttgtcggatgaactacagtacgataaattgtgctagccaggcttgctctatcgcatcaagcgatcaagtcacggccaatttttaataagcgtgcatactatgtagaggcagtataaaagttctcctactgcgtactcaataagctcatttttttctcctctcttttgtcctaaactaagtttattttctagctatcattagagcggagtttgtgaaagtaggagtaaatgcattgggagtataaagtgaagaataattatattgggatttgataaagtgggggtattctaatcttagttcgacaatgcaagctgaagccttggcatgtttggaaggtatccagctagctactgaatgggtgaatatgccacttatcttagaatcagataatgcaagtgtcgtcgctgagttaaacgcgaccaatgtctcaagagcagattggagtggcataattttagatgttaaagcggcaatgttatgtttagttcaggtgcaagtgcacaagataaagagagattctaataagatagctcatgccttagcccaactggtaatagaatcaggaactaatgcggtctggagattatgctcccctgcagaaattcttgacctcctgaaccaagaatgtaaccctctgttttctcattaatgaaatctctctttactttcaaaaaaaaaataataatctttttggtttttttatatgtgtgggatgagtgaaaaataaacttatttttaggacggaggagaagtaaataaagacctaaggatggatagcatgcggacacaatatgccacgtatgaagtgtgctagtgtgttccctactgcatggaaatgtataagaaagtatcatatcctttgcctatgccttctctcccgaatgggagggagccactcacaccgccaatgaggaaattgcatggcaaaatttgctaaaggacacccaaaaaatatgtaattagctgtgggacatcgcaaagatgtgaatttgcctgaagacactcaaaaaaagtggtaatttgctgcaagacactggtcgcattaaaatataatatctccatgtaaaatgacagttttgcccttatcttctccgttgtcccttttccccatcttcttcaacgtcgagcgcgcacccagcggccacggcagggatgacggacgtgtttgaccaacacggcgacctcctcctccctgatgcagcggaagaagagcacgcaaatgcggcactcctagctctagtactcaccgtagggcgcgaacgcgacgtcacagccgtagagcagctgctcggccatagcgctcttgggccggctcgtcgcggcgaacgacgacaaccaccaccggcatgcgttcgagctagagtagtagcaccaggccatgtgccgtggtaagggatggaatgcctggtgcagcggcgcgctgagtaggtggaggtatctgagcagcgggagcctccgcggctatggcggcagcctctgccaaccatcgttgtcctcccacctctcaggcctattactcctattcacatctggaagcagtacgaggtacatgagtgctacaatgatgtcaaggactaacaagacaacaacatctctgcagaatgaaggatccactgaagcaatctgtttataattggttacaaactttataggatcattttcattttattttgtttcttcttgtaaatatttactgtaattattctttcaataaatgaaaatcacactgctgggcaaagacctggcactactttcagtcaaaaaaaaacaagacaacagcaatgtaagagggccattatacgcacagcaaagcatttgtttgcttggttgtagccgcatgcggtagcagggtggatggatggatgggggcaacaccttacacatgtattacattatggcctggcaactccagcaaatgggagcgacaactgaggagcgtttgaagaacattggaacaaagaagaagataagggtaaaagtgtcattatatatggtttctctctcatcaattgagtagaaattatattttaatgcgttcagtgtcctacagcaaattaccacacttttagagtgtcctcgggaaaattcacgtttttacagtgtcccacagctaattacatattttttgagtgtcctgtagcaaattttgccaaattgcattgatgatgagatatgaaaggaggaatgggaagggatgactgaaatgtagggaagctcatagacccatgggagggtatatcagaatgtataggtagccaatggagatgatgtagaattaggctgagttctggagtgggttaggaacctttactcccagcatgaaaaacggaacggtccattagtacgtgatttatttatttattttataaaaatagatcaatattattatttttaaagcaacttttctatcgaaaaattttgctaaaaacacaacggttagcaatttgaaaagcgtgcgtgcggaaaacgatggagatgagttggaaaagatggctgtcaaacacagcctaaaggtagcttggagggtgatgtaggataatggaaaaatggggggatgcagatcctctgcagtacagctgatgcaaggagagacgcgcggggagaacgtgaaagagaagcaatgactggagtgagttgaggttcctcggctcgagctgaactccagggcaccagcaacggggctggtcttcgaaggggatgtgcaccacgagtccacgatgactccgtcccctggtctctcgatgacattccatcggctccgtgctagtcaatgttgtcgtcgccctccatggttgctccttccatgggatgactcatctttgatgtcaccgtcgctagggcaccatcttccacggttccttccccgttgtcatccacctctgcctcttcacggatcccgttgccctccatcggtcctcattac

SEQ ID NO: 5956 - DNA, 18119 bp, Oryza sativa
tatggcgcatgagacctctgtacccgcagcttcttggcggcgagcgcctcgatggccgcctccagctcccccatcgtcgtccccgccgccgccgggaccggaagtgggggtggcgccggcggcgagggggttggttggggtttcggggaatcggacaccaccattgcgggtggcgggtgcggagatcagcgtgcgacctgggatgggccttggggtccaaatgagaggggaatggaatagccgggttggttcggttgggtcgggtgggtgagactgcttcatatatagtcgtagtagcctcgtaggaggttaatgctgctgccgccgctggtaggtggggccgccgtctaaatggccaaaactgggtttttctcatgaatccagcgtgactcacgctaatgatcatcctaaaatattacataattcttaacgtttaagataatattaaaatcaaacttttatagctttgattataaataactttaaaattattcaatttaaagacactagaataacatatatagatttatcttataaaatactataataaaagtaaacatacattttgtgtatatatcttaactaattaaaatattcgtatttttcctttcgtcacatgcgtccgtcattacgttttcgtccgtccctccaaaacttttggttcgttcgtttgagttcgagtctgtctaaaaaaatccccgagctagatccccaattccccaaatcgatcaatcaaccagaaccaaaaataacacgaaaataccaataccaaatttaatctcgacctcatgaatttgatccccacaagaaacctaattccatgtattacctccctcccaatccgattcatctgagcgacaatacagaaacgatagaacattgaatcacaaatccactaaatcacgaaatcacaaatccatcaacaaatcatcctagaaaattaaatcacaaatccaacaacaaatcatcgcaggccgaggacattgctgccccgaggccgtggtacaaaggcagcaagaggcacgtcgggttgcaggcgacgtgcggcggtggaagtgcttggcgcagtcgtcgggcttgtggatgagctcgacgtgggccggcggcagggacggcatccgtccttgcggaggggagacggcttccttcttgggcgtcagttgaaggccagcagtcttgaggccagcgtcggcggtgcactcatcgtaggtcctgaggggagacggcgcttcaagagatctcgtgggcggcggcggcatcgaggagaccagcgcattaggtggcgcgcggaggacggtgaggcggcgcacactgtgttggaggaagcaccaatctaaggacgtttgtcactcgaagcgtccggcgcacgagcgcatgaacatacatatattacagaccgcgcgagaaatcaaacgaccgaggagaaatcgatgaaaactatcagttgggaattttgagtggaatcacgagttgctcttatctataccaaattttattggaaatacgattgacatagggtttattaggataggattttcccctctctggtatgattatattgtttttgttcgcaggcgacaagttccaaagagtaaggctttcggttatgattcatatagaataatatatcgagtcagaaattcagatgaatgaacgaattgatcgaacatgcaatacatttacatccaattctgatatctgaccgatggatttgatttcgtcgtcatcacgatgcagttgagactaaggatgaactcttctatgatcggttatggaggaacgcgttgtgctcgtgcaggatcggatcttgaaggcgccgagcaacgaggccagcggcgatgacgacggctccggcagcgccaccattggcaggccttgccggaggcagcggtcgtagctctccagcacggacacgatctgtttgaactcgggacgcctcgctggttcggtggaccagcacctcttgatgaggctgttgatggccggcgggcacgacggcgagagcggcggcctggcgtccctgtcgcagacggagtaggcgacctgcacggggctcaagttctggaacggcacgaggcaggtggtgagctcccacagcacgaggccgaagctgtacacgtccaccttgcggttgcagcgcttgtcgtggatcatctccggcgccatccaccggaacgtgcccgccttggaggagcacttgtcgccgcggcaggtggcctcgaggcaggacgtgcccaggtcggcgaccttgacgcgcccgccgccgtcgagcatcaggttctccggcttgaggtcgcggtggacgacgccacgcgcgtggaggtactccatgccacgggcgacgtcaagcgcgaggcggacgatggtctccggcggcagcgagtagggctcccgcccgtgcaggtacgcgctgagcgtgccgcgtcgcatgagctcggtgatgatccagtacacctccggctcccggcacacgccgacgagccgcacgacgttggggtggcgcagccgcgacaggagggacacctcggcgtcgaactgcgcctccatctcacgccggacctgcacgtcgtcgtcgtcgtcgcccactggcgcgtgcatgatcttcacggccactggttgctccccgtacatgccgcggtggatgcggctgttggaccccgacgcgatcttgggcccgaggagcagcttcgaccggtccgccgcccacgtctcgacgatcgccgccgacctcgccggcttcttgggcccgaggagcagcttaagccacgcgctgtgcttcttcattatctcctggtccatctctcacggctgcgtcgacgtcgacggcgacggccggccgccggcccggaagggcgaaaccacgcaagaggaggaccaggaacaagaagtggttgatgcgggcgaacaagggatcaggcggtcacagtttatatcccgggaatcttggtacaaatcggactccagcaacaaaagaatcctgctacaaatcggactccagcaacaaatcggactcagcaacaaaacaaatcggcgaccatatgctcagagttgttgtttgcatgccgagtgctcttttattttcttccgaacatccactaatcagcagaatccgaaattgaaccaagcagctgaatccgagtctagaccttctgttgtacgcctggtatatataagattgatccgatttagtcatgtatataagatcgtaaaatctaaatcgagagcatctcgttttagtcgtaaccagtgacggaacatcacagactggaagtatgaaagtatctacttaactagagtactactagttataatagaaaaacataatcaaagatatattttagagatcgtgtcatcgtccaaaacgtcaagaattataaaaccgaaaggagtaacaacttaaaactgaatgggacatatcctagtccaatgaatttgaaccacttatacagatttattggactaagatgtgtcccatctagttccaaattattatattttgtgatggagggagtacgcgatttccaataaaaaaaattataagtagaattcagcaaaagaattagggataacaatgtgatgattatttacgttgttatccctaattcaattctttgtgtatacctccatcccacaaaagttgatgttctagtaattatgagataaattagctcacagttataagtaccaatgtgccctccagtcgttagtgtgtttaagtgcttgagaaataaaaaagaattaatatgtatgcactcagttcaaatgaatggaccagaatcacccgggagaagtagtaatggcatcacagaactgcagcgacaatctttacaggatatttagcaattggtaaaacgactacttttatgggacggaggaggtactatataattttgaagcccatactagcgtatgcaacctaaggccatctctaatgcatgagataatcaaaccatgccacatccaaccaaaccaattcacatagtgaccgatcgccaaatcatcacacgaggcaaaaatcgaaccatcgtattatttcctctagtactaccactgcaggaagcaaaccaaaattatcacaaaggcaaaggaataaggttgatcctttctttctgttggtggatctcgtaattgaattacactctgaaactagattagtagaatcactacttaaaaaaaggtttatccatacagttaggatagaattttgggcgatcctggctttagctccattgtcggcctagcagcggcaagtcacgcatagaggtgatcggtccggtgcaagccttcgcccggatatgtgttctggtgttgtcggtgcgtggggcggtggctttttttcttcgtttttctggttacaacctcccagggttttaatcttgtaattttttttatgctctatcaatatgaacttcacgttgtctggtgcaagtcgttcaacaaaaaaaagatctttgtaggcggatagatggcccgtccacacgcaggtatttgcgaaaatcagtattttcgcatgcgggcggcccaaccacatgcgataatcgattttcgcaagcggacctcttaatgtggcccatgcgataatctatttttgcaagcggatgagttgtgcagtccgcctaaaaagatattttttccatacgctgcattaagacgcacgcacgcgataacacatttcagcaaaaaatgtaaaataaaagaattatgaaaccctaagatatgcatccacatgacacaacattcatagatccatccacatctacacgccacaaacaaattgtacaaagaacattaagcaaagattcatccacaaacatagactacaaacaaacaagaacaaacatgaacaactagaatttcatccaaaacatagtacatgcagcaatagatccgagtccagcggaggagatgaggcgagcgaaggagactaagaggcttaggagaggagacacggggaaggagacgaagaggaggaggaaagaaggccggcgattcatacccggggcacacgacaacgattaagaagtagaggagaataagcaccggatcccgtcctcctgaggtcgcccgtgccgatgccgtccatcccatgcccactggcacaatgaagcaagagagggaagccttcccccatgccggcttatgggggctggtctggcctcccgaccacccaattcgtcttcccaaccgatcgatgacttacccaaggtcgtaggtgctagattcgcccgccattcggtcaacggcattggatccaccgcctcaccgtcgtcagtgatgaatctgcctgcccagtggtcgccgacgatggatccaccagtcccgctgtcatcgatgctagatccaccctcgcacgatcgatcgtcgatgatggatccgacggctactcctgtcgtcgctgccgctcccggtcaatttgagcagggatgttacgttagagagagggaggggagcagtggagaaggtgggggggactaggagagtaggggagggagatgtaagtgaggagagagtggggagaggataaggatgggtggctgtagtggggttgaggatcatttgctctccatgttaatcacatgcatgtggcctttaagaggccgcatggaaaaataaatcttcacatgttgcccttgaaccactcgccccgaaatgatttctgtgtgcaggagttatggttcgtctacaacatactagggtcttgtacagaaaaattaaatatgcaatgcagtagtgaatcaaaccatgcatcgtggaccccatgtcttggtgaactattcaattgtcggttcaattagcttatagtgcaaggatgtgtaataaataatgatgatggcagttattcacactaatgttattattaggggtgctatcgtatcacaactgctaatcaagaaataacctaaaaaaagtacgaagttgagtaaatactaagtcatactataccgttgctttctaaagtgttgtcataaataggtagatggacatatgaaacttcagttaatctacctacatggagcataaccatagtaaaaaagacgagactgacggttgtatcgtaaaaaacagaaccacaatccttcttactaggtcggtttgctacaaagaccggatatgcattctgtgtgaatcggacggttttacgtggaaaaccgatgacccgccttctgttggtgaaaatgggccatcctataaaggctcatgatgcttactaaccaacccaatacgctttagagcaggtacaatagcaggctataagccagctgaaaatatattttaagataaataaggagagagaatagtagcgggctacagatttacagccagctgtagcacgggctccaagatatagtgtgtgtatgactggtgggactaggtattaatagtgtagtatgtaactattgtatgaatgagctattagattagctgtagataaattggagctagtagttggctatactattgaacttgctcttattgcagaacggccgtaggaagggattaaacgctgtctacctagttcaaaacttggcgtcactaccaaacagctagcttagaggagatatgcatggtaaataaactttccagttcagcacctagctagaccggacgaatcttgtggaaaatcctgtggaattcctacttccgaaaggatacccaagttttcaattgaatacacagttattggacccaaaaaaaaaagaaatgaagggcgtattccaaacagaaataaaaaaaaccatcttttctaaggaaaatccttaaagtcgggcgaccggtgcgggggagccggatcagacgctccccccgcgcgcccctcctccacgtgcgcacctgttgggcctacccacctctctctcctctttttctacaaaagatgtttcacctagtgtacttacagtattttactatttataaatctaatgttgtagtgaattaaaatactcttttgcaacaaaaaacccacatattttggaaactctctattaagggaatttggtttattttttgttccacaagaaatgtttcactatgtatacatctaatgttacggtgaacgaaacattccattgcaaaaaaaaaacccacatattttggaaaccccctattaagagaatttggtttattttttgttctaccgaaaaatgttttacctagtgtactcacaatgtttcactatatatatagatctaatgctgcagtgaacagaaacattctgtcggtatttgctgaaacattatttttatataaggtgaaacaacacccgagttaaacgagtgaaacattttcgatctacttagtgaaacaattccaatatacctggtggaatattgtgcaacatttaaaaataattcaataataagcttttttttttcgttggaatatatccatgtgtagtcttcttttgaatatttaattgcaacgaatttaatggtgcaatcggatcatgatttggataagtaatttaagagaaaaatcagtttaaagtagttttgcacgtaaatcgggtgctgacgtcatgcttatgtcagcgcccgattttaatctcctcccatcggccgcccgagcgggagtcacgtcctctttctaagcccaattcacgcaagtttagtggctcatttcaataattagcgcatggtagatattaggcttttggctgttacattttcgatacacaacttcaaaaccctgggtctgcacctgaaaggatgtcattactcattatatttccgcagccaacttgcttgatttggtgcttgttccgctctatggccagtcaaattctcctataacacatttagcatgatagcatatttgtctcttcttgctacatttgttcatgcgtacgcgttgccggcgtgcacgccggcccactaaggcccatgcacgcacgcgcttgttagggatggcaacggggcggggcggggccgggttggacaggaacggccctggccccgacccccgactttatcctccgcccccggccccggtaccatcttcgggtgaaaagcttcccccgcccccgacctctacgggtccccgaccccgaccgaggccccacaagctatagagaaaagaggacaaaaccaggattgtagcagctaagatgaagtggctcatcgagaaggctagcatcgcggagatttggcggaggtgcagaagccggcgacgcgcgacgaagacaaaggcgaagcagccggcgacacgcggcggagttgcagcagtcggagacgcagcgaaagtgcaacggccggcgacccgcggccgagacggaggcgcagcagccggcctgggcagaggcgcagcctcgcagggagctgacgaggcgcagcagcttgcaacgactgcggtagcgccgatgcagtcgctactcgttgactgtatctttctttttttattcttttgatttgaaaggtcattgactcgatctggatggatggctccgtaactgtatgtatggctggggtagataagatgggataggaaaagttatttcacaacatgggcttgtttgggccacatttttaatttgcaatctacgcatgtaccatatttccgggtccccatgggtcacccgcgggtggaaacctagacccgcccccgtccccgcatattttcggggccccgccccgctgcacccgcggggccaaatatagccccgaccccggccccgtagggtcgggtccccggcgggtacccgtccccgtcggggaaattgacatccctagcgcttgtgtttctctcttttttttccttttttttccctgtttgttattcccgccgtacggatagattagtttcctatttttactaatgattagtttactagtaatttttaaatcttaactttaaaattttcaaatctcgagttgaaagttttcaaatctcaagttgaaagttttcaaaactttcaaatctggacttgaaagtttttgaatcgagtcgaaagttttcaaatcttgagttgaaaattttcaaatctcaagttgaaagttttcaaaattttcaaatctggacctgaaagttttcaaatctcgagttgaaagttttcaaatctgagttaaaagttttcaaatctcaagttgaaagttttaaactttcaaatctggacttgaaagtttttgaatctgagttgaacgttttcaaatctcgagttgaaagttttcaaaactgagtggaaagttttcaaaatttgactttaaaatttaaatcttaaatcaaaagttttcaaatctgacttaaaaattttcaatctgttagtaaaaaaatctcccgaaaaaagaaaaaaaatcttgagaatcttccataattactcgttattagtgttaagtgggtgttaactaatactatagagtagttagggaggtaatactataaagtagttagggaggtgctcgctgctggcgcgcacgcgctagctagcagctaacaaggccggtggggattaaacagataaggggctactaagtaagtttagtggaagcggaaatccttgccacgaagcaatttaggagctatatgaaccccttattaagttgcatgaaccgactaaacaaaataaaaaaaacttaagctaataattgaggaagatgctcaatcaactattttaacactttaccctcacgtgagcctattaatgttagacgtggaatatttattagtataataaatatcaaattgaatgcacaagctagtttaacgcaaaagcattcgagaatgctgcgcgttgggcgcccgatggcatggaaaaaatcggacgcctcgtggcgcccgcgcctcctaccgctccttttaaaacgatttttctcttaaactaattatccaatctacgatccaatcacattgttgtattcgttgtaattaaatctttacaacaagatcacacatgattatatttcgataaaaaaatattttagcttttctattgatatttttttttgaatattgcatatgatctctttcgatgtttcaactattagttttatgatgtttcagctagtgtacttacgatgtttcactatgtacggatcaaatgttgtagtggattttgatattatggaacgcgccgttgtaacaaatcacccatatattttggaaaccccctattaagggaatttggtttatttttttgttccaccaaaaatatttcacctagtgtactcacaatgttttactatgtatagatctaatgttgcagtgaactgaaatatttcattgaaaaaaaacccacatattttagaaaccccctattaaggaaattcgttttatttattgttccccaaaaaaatatttcacgtagtgtacttataatgtttcactatgtatggattaaatgttgcagtgaactgaaacattatttcgctatttgctgaaacattatttttatataaggtgaaacaacacccgatttaaacaagtgaaacattttcgatctatttagtcaaacaattccgatatacctggtggaacatcgtgcaacatttagaaataattcaataataagctaaaaaaattttgttaaaatatatccatgtgtggtcttgttttgaagatttaattgcaacgaatttaatggtgcaatcaaatcatgatttggataagtaatttaagagaaaaatcagtttaaaatagtttttcacgtaaatcaggcgttgacgtcatgtcatgctgacgtcagcacccgatttttccccaaacattcggacgtccgaaacggagttgcctccaaaagcattaaactgaaattcatttgtgcttcgagacatgttgaacagaaaccgcaccatcatacctccacgcctttgcatataatcctcaaacgtccacacttaaaataacaaacgaaacaaggagcatgtcaactgtcagttaaatcgacaagctgcaccttcaaagggcagaactattgaaaagctattacaacaaagagaatggccaaaattgtatatacatgttaatgtaaataaatgtccaacacaacatgaggcaattgagccaacacaattcaagaggaaaactcctgtaagcatctatatctttctctagtttactcaacaacccattgcagcaagtgctacctgggatagaacggtggatgacggtagaagggataattaggctgttggggattaaacatacccataaattgagaaactccaacattttgtgcaaatgcagcgctctgatttccaggccaacctagttgggcagcataagtgtgagatataggcattgcagcatatggtgaatgcccaacagaatcaacctgcacaatatgcggaaccataggtgatatggaagcagggatagatggtgttggcagcttggtggtgcatggccttgggcgtttctcttgtggcttactttgctgttgttgttgttgctgctgctgttttttctgtggcttcttatgctgttgttcttgaggcctatttgtcttttgttgctgctgctgctcttctggcttagtttgctccttccccatcttctcttgcggcttaatttgttgcttctgctgctgctgttgttgttgctcttgaggcttatttgtgtttagctgttgttgcttcttctgttctggcttagtttgctgctgccccttcttcccttgtggtttaatctgttgcttctgctgctggatctcttgtcccctgtgctgttgctgctcgagctgctctctcttgcgcttcttgtttgtatgcttttgctgctgctgctgctgctgctctgaatttgaagttgaggcagaacaagcatcccctgaacttcgcttcgttgcatattgatctaataatttcttcatttctgccagcataccactgcgcacgttgaaatcagtgatctgctgttgaactatgttctgtgcaaccattagactatccacctccttcgttataagtggactctgctcacaagtaaatgtgccatcatcaaatatttaaaccatcaaaaaataaatagctcgaggagagaacaaatttttgtaacataaacatctaccagactactactacaagaatgtcttatttccaatttcttaatttttgcaaggtaaaagatcactctaatagtccatgcataacaatatttcaagtttctatttactcttatgatttatgacatcgatcggtgccagatcacgttgcagtataaattagaaaagtactaccccaacatttaatcatttcctatggagtagtcaataccagagacttgcgtggagaattcatattaattatatccagagcattctgttttgccctttcaacatatcccttcagaagagaaagtggagtatatttgtctatcaaattaaaagcttgtgttaacagtaaggcttcgagttgttgaccatttccaatcaaataatcaattaagtctgcaaaaacatgacaacaagaaaaatgtcagcagacattgctccagcaaaataaaaattatcaaagagataaatgtctacaattatgttgaaatgtatatataaaaaggaaataactagttaactacaagtagcacagcatcatagtatcaaaaattgaaatttcatcagctagttactacagagtatacattgcaccaagcaattaccaggtatatctgtgatgtatcaatatcagatgataaactatcctacatgagcttatattaacaggtctatcaaataaacaaaaatgtcatttggtcgcagcgtctacaaacactgaagaaactccattatggaattaacatttttttttactgtgaatcaggaaaaagtacctcgtgcaaaaacagggcctcaaggtgcacaagtggagcaactaagcaagtgaataataattgaaactttgttctcaagactagcatgccaattagaaaggatttttattttatcgttcaaattattggtcagctgtcacttgtatatactgccaatagcccttcaatgcctggagatacatggaatatgcaaaatggttcaagatgttcaaaatgattgactgatttagaccatcagaagaggaacacatccctaaaaagctcaacatatctatatgtattcatcgaacaaataccacaaaaaataacgcttattaggaactcaaatgaaataagcaagttattaatctagatttttttttcttgaacacgcaagagaattgtgtgtcatttctttaagaagagaagaagaaaaaacaggggaggaaacgatccctccccaagagttaaaaaaaaaaaacaacgcatgcttaaaaaggctatcgaccaaaacccacgcttaatctagatttcaagtggattttcaatgtacaacatgatatagtcacaggctcacagcataaggatcacaatgattgagatccactgcctggggaactccaagctgcttctccaaatgaaaattgatgtatcttgaaatcaaataatgtgcagccagtacattttgaataaaacagtccattaagacatgttttcatgttgatcgtttaagtaattaattttaaatcataaacatctatacagttacattacaagagttggagactagaagagttaataatcaatcaggtattgttcagcagccacggttaaattggttatgaaaagcagtgagatatatgccagaacagagaagcaaatacaagagatcgagttgtgccatctagttctctatgttgtgcagtggttttcctataggattcaatgattaattgcccctgaacatctgaggtatgttgaaaatgtggcaaaagatgaagcagaatagtagaatttgaccagttgaccttcagttttagtttttttattgtactcccaaaattctcttttgtagtgtgaaaaaaccacgctttatcataagagaatattctgggttaaacgatggtgaacagatattagattagaagattatttttactacactatgagttcgacatgtttcactccgactactatacaagcacaacctgcttgcatgcaacatttcttgctaccaggaaaaggagtactctacctatgcatctcttattggatgattcactattgatgattatcttaaaggctagcagcattatatgcagtgcacatgttcactgttcagtggtggctatgaaatttggcagtaatgaaatgggtcgaacagacctagatgaaatactgtaaactatagcataatgtgcatggacagagtggctgcaattgaaagagagaattacacatttcgatgagtgtttgcagggtgccagataaaggctagcagcattatatgaagtgcacatgtttactgttcagtggtggcaatgaaaatttatggcattaacatactatcattgagcacaaaagtgcaggaacgcatatgatccttgagtgaagagagagtcatccataccagtgatcctattgacaagcccaagacctttgcagagttcgatgcagttctttttctgttgtttgcgtgaaagagtaccaaagatacagaagatctcatcaacagaaaactccgatacaatgttgtaagaaatgagaaaatacaggaggccccaggaggacaggttcaaaacgtccctgctgcttccagtgctgtcaatcatctccttccaatccttcgccagctgcttggcctgcttcattgtgtctgaggacagcgaggcattcactgcaggtaagcaccgaatcagcccaacacagttaccccaaaccttggtggtcttcatcttcttgctgagaaggaaaccctggacgacttggaggacaagggcagcagcatctggggcatggcgcatcaccacggggtactcatgccagaggcaaatgctctggttcttacacaccaatttcaacagccccctgacgtccatgccagcacacactcccctaagatgatcgctgcaacttggaagagctcgattgccttgttctcgagacgctttctcgtcgccctcctcgatgtcatgctccatagatgtcaccttagcctcattttgctcctccgatttggcctccattgtctcaccgtcagccacctgctgaaccccttgggcatccacatccccattctccccaatgtcgtgttcttgagaggccagcttgtccccatgttgctcctcatctttggcctcaattatctccttctctgcctcatcctcttcctgtttctgcactggaatcgcactcttggaagactcatcagcatcttctttggacttctgcatctcctcgttggctccctgctgctcctcgtcgacctcctccccggcctcctgaacctcttctctgacttcctcttcctcctcctcaatctcctcttcttcctcctcaatctcctcctcgacctcttcctcctcaatctcctcctcttcctcaacttcttcctcctcaacctcttcctcctcctcctctttctcctcctcgtcgctgtcctcttcctgcttcccgcccttctcgccgtcgcttgtggaggcggcggcgggacctgcaagcgcggggcgggccgcctcgaggacccggagctggccgaaccgccggtcgatcgacgactggagcgaggagatgtaggagtcgaggtcgccccaggcgaaggggagcgggaagggcgagcaggcggcgaggacgtcgaaggcctcgcgcagcgcctccttcttcgcggggagggcggcgatggcggcctccatctcccccgtcgtcatctccaccggcaggccgtgcagcgccggtgcggaaggggccgcatcagattttggaccggcgccgccgccggcggcggcagcggcggcggggtccatcgcgacgccgtcacgccgcgccgacggcgagacgagaacggcgtgagggattccttcctctctcgtgttgcggcaaagcggatcgagccaaaccgaaaagactcggaggaggagagattagaacgtggtttagttgggctcggactcggactgcgcagtgatttacttgggcttttctctttggaataagttcactttaggtccctctatttgtcggtcagtccgattttcatcccttaaccgtaaaaccggatacgacccgtccctcaacttacgaaaaccagacaaacgagatccctcggcagtatggagggtggttttggccgatgtggcgcctacatggctcttttgactatgtcttcatcccacgtggcattgacgtggcggtgacgtggcaactcaatatgaaaaatattaaaccccgtgggacccacatgtcagttttagacacaaagtaataaaaaaaatggtgggggtccacgtgggctccacatgtcactcccccctacctcttcttcctcccctctccccatctccccatctcccctctccggccacggtcacggctgtgcccgggcagagacggatttagcgtattagcagtgggggccctggaccccactcaaattttacatatattacacatacccctaatcatattaccaataggcccccactgcacctgacaagaaggcccccactcttctggtttccttcctttgcaatctttgtgcgtgcggtgaggacagtattgaggactcgaaccgtccgctccccttccctggatcccaatctacaaatcgtaattaccggagctattgaggccatcaaaatctggtgcttcccgcagttcgccgtttcccacagcctgcaagtgccggcgccgaaggaggccgtcgcgaccactgcctggaggcttcacgagagccacggatggcgggatgtcggcgtccttccatcgctatctgcccaacaatgcatctcccgtgccaatcgcgtcacgccgcaagtcgtggacagtctctatgggctatggccacggcccatgcggccatgtcggcaagcctcacccggtgcacctgcagcctgaaaccctctctagttgcccttggtaagtagccacggtatgtttttatgtttacattagcaattttgtctttcaaaattttgagccgtactcctctagtttgtggtagcactaatatcgtaatgcaacatctcatcaatgatttggtaggaaaagataatgacatatatttgtaataaaaaacaacagcaataatgaacactaatggaaggaatctagtgtaaatgcatcaaaaccaataactagacaaaattttgcaatgcctcaagcccctcaacctactgaagtactgattcagacaagcttccttggagtaatataatatgtcatagtcatttttatgtaggatctgcaaaataagtgaatttacttgggttttctaacttgctatatataagttataaagttaagttagataatttacataccacagatgcccccagtcaatttttatcctgcgtccggcacccctggtgccggggactaccacctcaagaagactccacccgcacgtccgcccgtcgcggccccagtccgtcgcgtcggcttcgcgctgccgtccaccccccgctccgccccgccccgccccgccggcttcgcaccgctgcgcacctgaaagacgtcgacgacgaggctggcgccctccgcttggctccgccgcccgccgagtcgcagccgcacgcggacgggagctcgacgcagcccgcccccgccgccgcggaggaggaggagaacacggcgctcaagactctacaagttccatctagctttgcaaggcccatcaaccgcagcatcatcggttcttcttcttcgtagtcgtcgtctcagaattctctgcggatggaatattcagacctgtggatcggacaaagtatactcgtttgaatcattgatcatagctggagaaaaaacctaggagctggggataactgatatgatatatatggaaaagggatagacatgctattttatctctaacaatgaaagatgtgatcatctcaactaacaatccatggcagcaacctgcacggctgcgtggacgagggcgccgcggcaggagcaggcggcggagatccccatcgtgctgttcccgtcagtggtcttccccggcgcgacggtgcagctccaggcgttcgagttcaggtaccggaccatggtgcacacgcggctccaggttcggcgtcgtgtactccggcgggcggcggcgccgcggcggagtgggaggcggggtggcggccggcgaggtggggtgcgtcggcggcgaccggttccgc

SEQ ID NO: 5957 - DNA, 70316 bp, Oryza sativa
  unsure (1)..(70316): unsure at all n locations
tcattgattagtagtgattataacaaggtaggacgactagttgggtgtatgtgaaaccgagagccgttttcgacgagattgcaaaagggatctcgagttcgagatcgcgtactaaaaagcagcggtcggtggcagaaagtccaaaccaaacccccgccttttctccatcctcgtttatcgatagccaccaccgccgtgggcatattcccgggccttttcgggttggctgccgcgctcccgcgtgatctgctcgcgggcgacagaggggaaaacggcatatccgggcggtgccgcggccgtgcgcgcggcatatccgcccaccgtggccgtggcgtgcggggccaggtcaggtcaggtcacggcgcgtgatctgggcccgggccccgcggatgggggaactgatccggtggtggcgcccccgcgcgcggctggtgctaattccggggggcgcgtcacgacacggcgccgcgtcagcgtgcgggcgcgcgtgcatggcttgcttggttggttgttcggtttcgcttgctcacgttttcctccttgcgcttttcggattgtgacgggcgacttccccggaccggccgtccggccccatcatccttcttctcgggcctgttgtttaatggacagacgatttgcgtcctactgtacaatcccgtttactaatatataaaaagtgctccatttcaactagtatggtggtgtttgaatcttacgaagataaagacgaagataaaaattaagtgtttcacgtaaaacgaggtggtaataacatataattaattgagttttaattattataaacttgaaaaatggattaatctgatattatagaacaactttcatatagaaaattttcgcacgaaacacactgtttatcagtttgaaaagcgtaccacgaaaatccaaaactttatccactgcttgtagtggaaacgaacttataagagcaggtacaatagcatactattagccatattttaatgagataaaagatgagagagaaggcagtgggctatagatttgtagccagctgcagcacggactccaagacgcagtgtgtgtatgacaggtgggaccatatattaatagtatagtaagtaactattgtattaattggctattacattggctatagatgaattggagctaatagtgggctatactattaaacttactctaaggctgtgttcagaatactcttctactccctcgttttgtgtgcgtgttttcccaattgctaagaggtggaataatatgtttttttaaaaaaggtctatagaaaagatgctttgaaaaatcatattgattcatttttatttttaacttatacgtaactagttaccctctccgtttaaaaaaaaaacaaaccttgaacaggatgtgacacatcctaccactagaatactccctgcattctataatataagacacaactacttttaaaaattgttttcataatataagacatgcatgcatgcatgtcattaactagcacacattttccactaaaatattattatttaaatcctccaccatcaagatctctaattttattaggtgcatgcgttctatttattaggtaatctaaacgatgaggtgataataattatttcttgatctttaggttaagggtggttatgtcttatattttgaaatagaggaagtatgtcacaacatgttctagttttagttttgtttttcatgagacggaggaagtatatgctgattatttttttaaaaaaatacataattttttaaaataagatggatggccaaacgttagataaaaacccaaaaaataaaatctttatgggaagaaaggagtaattaggctgcgttcaggaggaggggctgggaacccctcctctttggcacgcaaaacgatgttcacattaacacgtgattaattaagtattagctatttttttttaaaaaaagatcaatataattttttaagcaactttcgtatagaaacttttttgtaaaataaaatttgaaaagcgtgcatgcagaaaacgatggtggggagttgggagttcccagcaaagaacgcagccaaaagttatcttgttctctatgcgggatgaatgtgttaggttcacatgcatgcaactagcaagacccgtacgatcgaccggcaatccggcatggacaacaacaagcttgatggacagtgaggcatcaaagcttgatggaccgtgatgcgagctgcatgatcgatcaataataggaccaaaaaacacacgctgaataatgtttttccacgaggagatgagacagccttcgtaaccgtgaaggaaagagccaaccgcgaatccgcaatgtgctgcgtgtcagagaggccactgggatcgaattatggacaagaacgctttttctatggccctagctacggatggagcttgcaccacaagttctgcaccgacaaatgagatctccacttctccggccactacacttggcagttggcacctttctcctgtccccacgcccagaaaagcaagtgcaagtccttccctgtattaacaattatagactttggggtaatcaatgtgcacgaataatttgttatgattaataacctatcctaagagcacccgcaatggtaaagtaagttgctatctataaaacatgtacatctcagcaatagactagattaatagtaaaccacttcaatggtatgtctacaacggtatctatagctctctaatccattgtctcgtttttctctatagactatctccaggttagtagatagttttgctctctctcttcatttaatctcttccaagtagaaaaatatgctgacatggatctcttgtagagagcctatagataatcattgcgggtgccctaaacagttaacactttttatggctaaaccaaatgtgttagtaaaataattggttggtttgagggccttttatagggtggtcacttaactcaaaaaggcctagtattaattaattagaacactctgattaagactgatcctgatttgcatatatactagaatattgtaatagtggagatcagtatatcatcactgacataaattacaacaaccatgtataggtgctattacaaaagattgctagttggacatacgaagattagcatttgttctctgccgatgaagcatctatgttccactcaacaaaaggtagaacatttagattaagaatattggaattggacatctttaattggaaaggatatagagcttaattgcaattgtacatagaagtgaattccacctcaacaagggtgaggatgtgcgcatccatatgaactaccaactattcctctctttttttcccctccctgtccacgtacccaagcactcatctatctctccaacatcccatcaggcgttcacaatttcatgagatctcactcaaattttacatatttcgagcatctcaagcaagtttggaatgagatcttgaggttcatttcaaatgtttttgttcagaattttgtggggttctttttcgaaattagcaaaaacaaattaatgtcttgttgaggctccatattctcaagtttcgaataaaaatctggatggtttgaggagatgtagattcttgaagaagctatagctgatagaaactctctcaaacagggctatatacctaactttattcttcttaacagatcttttatacatagtacatttgtggtattcacatctcttaaaggtgcaactgctacaagctcccacagtgttatatactaacttcattctctttaatagaacctcttcaattagcattttatacatggtatgtgagtggtttaagccactgctatgtcccttgaccatctactactcaaatgccaactttacactttattatttttgaatgtctacttttgatatttccattcttcaattctgtttgtaagcatatatttgcaaagttgtttatcaccaccataaaatcctgtaacaatgcgtggggtatcaatctagtttatcttacagtaatgaacccaacgactcatggatacatctatattgaataaatacacgaatcttttaaaaaggggtcttttatccaatatgatttctcattctccttaataaggtggtgtttacatccagggacttaactttagtccctatctttagacactaatttagagtattaaatatagactacttacaaaactaattacataaataaaagctaattcacgagacaaattttttaagcataattaatctataattagagaatgtttactgtagcatcacataggctaatcatggattaattaggctcattagattcgtctcgcaaattagtccaagattatggatgggttttattaatagtctacgtttaatatttataattaattttcaaacatccgatatgatagggacttaaaagttttagtcccatctaaacagggcctaagccttttattggcgcgtgatatgttgtagtgtactacgtgagaagctggcaagatcaacagccccaaacgttccacttatttgggaaataagctaaacaacatatttgtaattatatgtgttcgtaatgtctaaaagcaaaggcttaaaaaataaacttcgataaaaacaacctcaaaatcaactccaaatttaagattaaaaatttaaattttagctgataagcataagaaaaagatgagaggctgcaatactacaggtcgctgctatcagcatcacatcgattaatttgcacattccctgaccggagcagacgttcgacattcttcagtcggccaaccaatgttctccaaccaaatcaattggttttgcagaaataaacattaatttactgaacagggaattgtgcgtcaaaattccaacaacgtagcatcatctttccagctccacccattccaaaatcaatcaaaattcaagaccgcaaataacgcgctatcattttcaagtaaggccacagaaattgcacaaacttaagtcatcttataagttacgcttgatatctttgcagcgagattaactgtttgcttaactgaccaccaatgttctccaaaaataaagtacaataggacatggaaacctcacatgcacaattaaaacaaaattataagtttccttcaaatcctccatctcgagggccaattgaaatcctctcagtcagcattcagtctgctttaatctgcagcatagaagtacagttagcacaatggcatttgacaaagggcgggcaaaattctacagttgagggatattccagtcttttccttccaaaatctacagatgcatgacaaaaaaactttacagtacttgttcttttggaacgagatactgtgaaatgtttcacataccattcaatagacaaacttgcatcctaaatcatgtccaatgcaaatatagtttctcccaaccaaacattgacataatggtatgttgaaatagtgaggcacatttcattcatttatgaccatagttcgacacaacccccaaccaaacattgacataatggtatgttgaaaatagtgaggcacatttcattcatttatgaccatagttcgacacaattgaatcagtgctgattgaataagcgcatgaaaccctgagctttacaaagttctgttatacgcataatgctacattgctactagccctaaaaaagtgcatggtttttattattgtcctggatatttaacattttagagaacatgtacaatatgaaaattcataaatgcttaaaagggcaaaaaacataaagaattactttgtgatatagaagtatatggacgtacccttctgacaggttcctgctttgtggacatatctaatcttgaggcttcatagccgggaatagaagaacttcctgaatttgcatcaaaagagcattttaaatacctcaactgaataaagaccaaataaaaaatgccaggaacaaaagtacaaatgaagaaataattagaccttgatattctgagaatcagtcagcaacattgtaaggcgatcaattcccaatccccaaccaccagtcggtggtaggccatactcaagggctgtgcagaatgtttcatccaatgccatagcttcatcatcaccagattgacgatcctggcacataatatacgtaagaacatgtacagtttttcagcaagccacataggaagctagggaaacaccatgcaacaataaatctgccactggtgtaagggtccatactctgtttgtctgtttgacacttcatatcccacccttccaatgacttaccactacttttaacaatgcaaacacaagtgtgtgtatatatatgatggatccaaaactcccaagcataatgagtacgctggttaaaatgatggaccaaaatataccacatatgggagtaggttggtttccaacaattatatactatgcaaagctatttagatgttccaaaataccaaaaataactcgaagcttgggagcaggctggtaccaaagaaaaatatacaatttgcaaatgttcacaaaatctaacaagtacctttagttgttcctcaaaccgttgcctctgaacaacaggatcatttaactctgtatatgcattgcacacctaaaaaatggatttcataacactgtaaggaaacagaaaggaggacaagtatgaaagtatcaatgaagacttagtatatacctcatgcttgttaacaaagagctcaaacctctcagtcaatccaggtcgagacctatgccactttgccaatggactcattatctctggatggttgataataaacgtgggattcacacatgtctcctccaagaaatggccaactagctgttagagcagagcatataccttattaatttggctaaggaataccaaaagggaaacaaaagcaaaaggtatattaaaatttaagcaaatagcttcaggttggattttgcaatataccccagatcttttatttgtttgtgagctaatgtgaaaatgttcagaaatgtactgtacattatggaagcaacaaaaaggattacaccggacattcttcttcatatcaaagtggctagcttatcatatatgtaaataagatattataagatagcaaaatcacctaacgaaaatcatatcaaaatacagtgtaaaaagaatgtgtagtgggtaaagaaacaaccttatcaagcaaccgtgttgtagtctggggaggtgggcatttgacatcatatttggcacaggcatctatcaaatacttgtttgcttcatcacttgagagatctttaggtatattgagtttagccatagcctctaattcttcaatcatgtctatctttctgcagcaaggtaaaggcaaagtaacattgtagcaactgaacattaccagttaaaagtgcatatagagcaatacatgtaatccaaatacatcccaatgtctctacctgaagggaggtgtgaaatcaatctctattggtggtttctcaactccgttagcatgatatttaatcttgtagccacctgtcaactccttaaccatacctgtcaaccataaaatcagatcattagataaaatgaacaggctgcttcatgttgatttcagtaaaaacaagataggacggcaaaaaaatgatatgacagaacaatagcaaatcatgaattgcctacggaacaaggaaaatgcatttaggtcattttgcagttgcatacaaaattgacatgaagatactattacttcctaaaataaaaagaaaaaaaagatgtttcagagacatcaagagataatcaccagataacatggtttcagtaagctctatcaagtcattgtaatctgcatatgccatataaaattcacatgttgtgaattcaggattgtgcgtcaggtcaattccttcattcctgaactgcttcccaatttcataaacacgatccagccccccaacaaccaattccttcagatagagctcaggagcaatacgcatataaagcctcatgtttaactcattatgatgtgtgacaaaaggccttgcagctgctccacctgcaatcatgttcatcattggagtctccacctagaaaagacatagaatattcagatttgaaggactggaagaatatacaaaagaagaataacagaatagattgcacaggcccacctctaaaaagtcaagaccatcaagaaatttccgaataaaagagacaacttttgatcttgtcttgaaaatatgcctcacttcatggtttaccatgagatcaagatatcgttgacgatatcgggtttcctgatatcacaagacaaacaattgataatcaaatcgctactaagcaccaaaggcaacaagacagatatataattgataatcactgagtgatcaagctacttaaagcaacctgcaccaaatttatgatttgctcatgtaaattagaaatgcagatttttaaatagaatgaatgcatgagatagtcaataaaattggacagatttctattagcatgccaaatatggcattcatgtcagcaaatgagttcactaattttaagaacattgcaaatctctcttaatggactagacatgcgccacctatccacttgttcagatagaatctgatcccatgattagttcatccacctgaatctaactttgcactaaattgcatagctgcctcaatctaaatttaaatgattttgttgtgcatacaacaaagcggatcacatatgcacatccagaaccttaaaatccgcctagatatttgttaattatgattaatcacactaccgacaatgtatttacttgctgacaaagaactcacagtaattagcatttacatagacaagagaggtcaatcaataattatacggagaatgaacaaacctggtccctcaaaacatacttttcgatgttcctacccattcctggagcccatggagtgggaacagcacttccctcactcttctgtaaagatgtatacaatacatgtaaatgatcatgtagactacatttcaacaaatataattagcataagaacttggaaggaaagcaaagggtcaatggttgggtgtacacgaaatattttgatatctcagaagcttggcatgctggactcagcagttgggtgttttgcagttcaatcgtgcatgcaaaatgccaacgttcaatcctagcatcaagtcaagcaagcatggctcactatatactacacacatgcaagtgcaggacacgcccatactccatgaggtgatggacaaattatgcatttatctatgcctctactagtcctagaatgcgtagcacgtaacaaatgcataaacaggtgtgagtgagtgtctgtattgcattgcacttgagaaaagaagctaggcaaatatgaggtgcatttgtgggtttaatcaaatgacctgtctggggtctgcaaaccagaataatggctgttgtgctttcttgtgctgctaatgtgtatgtgacacccagaaaaagagaaggcatcgctacgcaaaatgtctttagtttcagtcataattatttgggtcaagtccgatttaccccctcaactatcacagaagtacgacttaccccccttaactacgaaaccagatattggacacccctaaactattcaatccggatacttaacccccctggggctcttttttaggtggtttcgatctaaagctatcacacatgacagtccaatatgagggaggaggtgcatcatcagcaacatgcttctccctctccatgggacccagcaatcagtggcatgcacttcttcctctatcctttctgttccaatctctacccaagcctgtgtaagcactagctcacctgcagccctcaagatccacaagacggttgttgtcatacgtacatgtaatcaagctagatagttctgaaaaatcactctttgaaaaaaaaaaactccaagaaatcaaagctgctctctcattcgcacatgtaatgaagcggaggtggtctgtgacgaccatgagacagccggggaggacaagctgccgtccccggcgtccccgctccacggccttcggagccagagtgtctccgtccttgctggtgcttcagctccctggcagtggcggctagctgcacctgctgctgtgcagctgccatggtggcatactccggcaggggcaaacatatgctccccacaaccaccacgaactgttgcacgggcacactgatggaggcgaggcggtgccagcgctgctatgtcccgtcgagcactcaagctcggccgtctcaagcaggccggagcactgctttgaggcgcttgtccatggacttcctccgaagcaaggagcactgagactaacgaggcaaaggatctggcagtttgcagcccatgcctaatgtgagaaatgggagaatgggcggaagaagacaactaggtggatgacaatgtgggctaacatattttttcctaaaaacaattgattgtttttctgactgggttgccacatggtcagattattgccacctgtctgccacataggacaaaaccacctagattatgtttaggaaggtaattcgtacggttccaaaattttaggggtgtcaaatgtccggttctatagttagagagagagaggggggatgggggtaaatcagacttaactctagttattttatggtctctatgttagtatgtacagatttaaatataaaagttcagattaatatgaagtaaattgctctgagatattaggtatatcatctggaaacatctcttcctaaaaaaatctgattctcacctgtcgaggcatcatatgaaggcatggggagagcacaacaattttctttgggaatatactgagctcccctctcttgctctttcctggtattcatcaaaattgagaagtcgtcattatcagacacagtaaaacaatataagaatttccagtaaccatcaaactatttatactcctaattgttttaaaacaaacaaactgtacaatcaagtatgggcataagctacaaataaagtttaagttatttattaaataaaattacaaactcaatcagataaggatccatgtactcaaaatgtcctattggcattccaactgaaagaatataagtacctacttaattttgatgttggaacatctgactatgtaataatttcaaaatgaacttgaatagatgcttacaaacctggataaccacatacaccaacaatatcacctcgtttcagagtagagtgaaacttaatgaattcattatcttccaactctgaggtcctatatcaggtaaaatcagttaaatcattagtttactttttatgagaccgacaacagtaggcagtaaccggcgtagtacttaaacatgagcgaaatgatagccactagataacaacgatagccacagaaccgttagtcaaaataacaaaaaagaatgcacctttttgtttgtttaaacattataactaatagaaaattgcaagtcagcaagcccccagactttatgagatatggattgtatgcaacctcgtgtattttacacttttactatgtacaagcatacatactgttatgtgcataatcatgaagcatattacccaagttgggaaagcatgcaaaaataacaagaagaaaaattctaagcattaacatgtacaaaacaagaagaaaacccaactatgtaaaagaaggggggttttgtgcataatgtgattattgccaatacggaccacacataagtagccagctatgccaagcatgagtagcacccggcgtactattgacacatttgcaggaagataataagctacagaaaccttgctctaaatctatgacattcatcacaatccatggcctagcatatgtttataaagttgcagtgagaattctttggcaataaactttatgaaattcaccaatgttgaaaaatatatttaactgatacaaactttatgaaattcaccaacattaaaaaatagatttaactgatatgaaaattaaccaaaggatgcattttagtcaggcatatctgcacatagtgagattttagtgaaatgctgaaagtgtctgggaacaaaccagctaaatggcataaaaggtaagcaatacagttgaacagacaaagttttacctggcatcagcaaaaacttgaactttctcaccaccaccataaagatcataaaataagagcttggaagattgcgctctcttggtcatgatcctccctttaataaaaaataataataaatacaaatcccacccaaatgtatctctaatcaactacactatcatatctagtcaaagagaacgaaaaatacctgctaggcactcggtgacgtcaacaagcttatccccaacattcatgctcttgtatttctcaatataatcggctacggtaatattagccaggaacttatggggataggggtttacacccgtggccttgagtgaatcaagtgccttgaggcgattctcataatattgctgcagcaagaaacacatgtctgaattttcctaaacaaaagaattcaatacaacaaatagcacagcagcaccaaaggggcatcaatatcacatacagtgggatccatttcctcatcgtcggcggcagattccttcgggggctctccactagcagctgctgttgcagcggcctacaaaattttttttaaaaaagggtgtatatatatttagagcttagcaatcatgatatggaaaactctttctcacaccctagctgcagaggtatatccgtatctaacaagagcaaagagtgttgcttgtcacattggcatcatctacaaatgaacgcatccaaaactcgctccataaaaacaacactggaaaaaaatcggcaaaggttaagaagttcaaactgcttcaccttcttcttcttctcttcctccttcaaccggcgctcctcctcctgcttcttccttttctcctccctcttcttggcactgcacccgccacaaaactcatattaaacaaaagccacactacggaggaaaaaaaaacaataagaagaaatgccggctgcgtgcgcgatgagaaagcgcacttcttcgagagctgctgcggctcctcgccgcagcccgcggagagacccgccagcttctcctccaggcccgacgagcccgactccgccatgccgcgccggtctcctaggttttccactgaatcgaaagagatcgaggagatgaggctcgcgaagcggaggcgcaagggagaaggggggtttagctagggttaggcgacgctgccgccgccgccgccgcgacgtcacggaataaaaagccctggattctcactttctcacatggactaggcccacgaaacctgctttaaatgggcctggattagactacgcgggcctggcccatgaaatgcgctttgcttgggcgaatcgcaaggcgattacgccgtggacgagacgagtgagaggaggagagcggccatggcggggcggagtggcggcggcggcggcgggagctccgggaagagcgggacggggaggatggtgtcgctgcaggagttcgtctcgtccatggcgcctctcatagacctggagaaggttccgtactccgatcccccatcgcttttctttcgctgtttggttcggaaggtggaacggatggtagtggtggtgggtggtgacgcgtctgtggtgtggttgcgcaggcggcggagatatcggcggagtcggcgacgagctcgaagaccctcgagaggaggggttgcgtcatggccaacctcaagtgcaccgacgcccaggttgatttgcttccattttgctgcttgcttgcttgcccatcggtgccaatgtgtcatcgaggcgtggtgctaatcttgttctggccttgttggacctgcttggtgcgtagagtagacggggctgatggggaagacgctcctggagttccaacccaacaagggcgacgtgcttccacctcacaaggtgaggttacctttgccctcctgtcgtattgttgttattgctcgctgtgataaaattctggttaggaatttatttgtggtatgtgagagcggtttgtttcagaacaattgtcgcttcaggtattgccgtcgaaactcacacttgcagtatttctgccatttgtttagtaattgtgaacaagtaatgttgttgttaactgatagtttcagtgaaatattagattcgtttgtaaagttcattatgaattgcatcacgtgtattattgattttgttgagattggcaggagttgatacatgaaaagctcatgcatgtttcttaatttaccggacactgattcaaagaaatttgtattttacttcaccattgctaatgcccacttatgtttttcttctctagtttggaacacacgatgtggttgctctgaagccaaataaggcagatgctggatctgctgctcttgggcaaggtgtagtttatcgcttgaaggtacctaactatcatctaagggctgttgactatttaaagtctttgcttctgaattaggagaaatgactgtaatttgaacaaacaggattcttccattactgttgcctttgatgacattcctgaagatggattaaatagccctctccgccttgaaaagcttgcaaatgaggtatattttccatgctgttttcattactatttgcaaatgacattccattactgttttcttctctactatattttccatgctctctcttacaactttctgattagaaattttatagcctccaagtaaccataatagtataattgtatcataattcctctttgctttttttttatctccatgtatgtatttctatatatcttcattattgccccttgtcctccagcattgccttacaattcattggaccctaaattttgcatcttaatgctcttctaggtgacataccgcaggatgaaggatgcactagttcaacttagtaagggcattcaaacaggcccttcagcaaaccttattcctgttttgtttggagaaaacccacctatgagttccaaggatgttgcgaagttcagtccatttaacaagaatttggatgagtcacaggttacaatttgatttatttttttcaactgcttttttttggcttgttgcataattatgtttcagttaagttcttatctaaataaggagaagagaagccataagtacttggggcctggagaaatttatcagaacagtatgatctacaatagaattttccagtgcaatcactttgttctgctgatactatttcaagtatcagtagaatttgtatttttaacttattaagtaccagaggaagatctgaaatttattgaatggcagacactcatgattttaagaaaataaaagaacatatggaactaggcaaataacgctaacaccagcacctgcagtttcagactgtggacattccatcacttttggcattacaacttacaaccaaatgtgtcaacaccgtcatcgattacatataattcttgcacctgctaatactggctttggaagacctcatcctgagtagtagcatatatttgcaatacttctgttaatggtgttgcttttgcttcggtgaactccacagctaattatgctggcactggtgtttggcctccacattttttattttctttgctagaaattgattgtttaataaaaataaaaaaattacaattgatgccttttgtctttaccatgtatatctacttgttatgttcttttttgtatcgccttcaaataccagtttcaatatgtattcaaatgaaataaatttcctttttgtggggcccatatctttgttctgcagaaagatgctatctcgaaggccctcaggtcaagggatgttttcttgcttcatggacctcctggcactgggaagacaacaactatcattgagataatattgcaggaggtgaaacgtggatcaaagattcttgcttgtgctgcttctaacatcgccgtggataacattgttgagcgactctcccgatataggttgctaacaaaattttgaaatacctttttaactcgaactttctattcccccatctatcttggtaatgttgaccatttacctcattcaaccaataataactgagaaaattctccctatcctgtcaaaataaaagatgtgatattggttaatgtgacatgttgttattgacatttttctagaaccaaattggtgaggttaggccatcctgctcgattactaccccaagtgttggacagtgctcttgacgcacaggtatagcttactctgagtgcttccttttctcctctactgaggattattaggataaatattcatgaaggttatgttccataattatttcatcagagttgctttgtctctttcaattttcaactgttatatttattcaaataccttgttaaagtgtacccgcctacgccttatgtgacatctgtaacatctgcatgacattctctttatgcccaagttaaaatgggatagattttcttatgaattacagttccacctgtattatctatgatccattcatgcattcacataacttaactgtacttaatctgcttactatttctaatgaaccaggtattgcgagcagataacagcagcttagcaggagatattcgcaaagaaatgaaggtaatcatttactacataattcttaggttcctattattaaatggcaagaccctgctttacatggcatattattttggcatttcaggaaccatctaattagaagctgtcatgtttagatgatagtaatgaaactgcaatttcaataatgttttccattgtagttaaatgtttcttgatttgttctcttttcatcttttaggtgcttaatagcaaattgctgaaagctaaggataagaatacaaaaagggacatcaggaaagagctcagaacccttgccaaagaagagagaaaacgacaacagcttgctgttgctgatgtgataaaaaatgcagatgttgtactgtcgactttgactggtgcatcttccaaaaagctagatggtattacatttgatttggtcattattgatgaagctgctcaggcacttgagatggcatgttggatagccttattgaaggttaatactaacttatgactagttttttttttcatgttgctgcacgttttgagaatgatgattgctgtaaacagtcatcaaaggttctcgtattatttatgcttttttgagtagcacaataaagatagcatgtactgtttcacaaactcccacctttaactttaagcttaaaatatgtcttaaccaagccagcagttgagcatgatcacacgggttcaattttaaaagtgcatggtataatgagaacgagatgctgcattaggtgtccattttagagcaaaaggaaggattatgagagaagttgggaaaactaaatgatttccttggaagatagctaaacttaatttcaataggtggttacacgtacttgaattcattctatcaatcttgtatggatgtatgtaaactctaacaagttctcatgacccctgtggggctccttcacactccacaagttggcttctctgattatgccagtgaacaatttcatcacctatttgattgcttgtgtttgtcatgattcagcatgcacagcgcgtaggttaaatggtcatcatactgtacttattgagatctgtcatagggctcctcagttcttttgtttttgtatgcagggtccaagatgtgtgcttgctggagaccatcttcaacttcctccgactatccaaagtgctgaggctgagaagaaggggatgggaaagacactctttgaacgccttactgaagcttatggagatcaaattacatccatgctcactatccagtacagaatgcatgagctcataatgaattggtcatctaaagaactttataataacaaggtgcacttcccattggtgtttttacactagccacctattagtaacttgttttcactagccacctattagtaacttgttttcagcctctctctttagtccataactttcctcatgttgttatttctttgtttcttgtacttagatcaaagctcataacttttctcatgttgttatttctttgtttcttgtacttagatcaaagctcattctagtgttgctgatcatatgctctatgacattgaagaagtgaaaagatcttcttccacagagccgactatcatactaattgacactactgggttagtattctccaatgcttggcctattcaatgtgttcattcttttagtcatttatgggttgaacttgaaccttggcaattttgcttccctcgttgctttctttccctcactcaatagtgttggcttcctctataaaagagtgtcggcttcctctatatttccctcactcaatagtgttggcttcctctataaaagagtgttggcttcctctataaaagataggactaccgaattcacttcaaagggttatctcatacttgaagacaataattgggcagaagtaatacttcaaatttgtagccatcatttgactgatgaataaaagatatctgtttttttaaaagaaatgatgtgatgaccaacatcaatgtttgttagatacacttctaacagtctcaagtaatcatttaggtgtgacatggaagaagtaaaagatgaggaggagagcactatgaatgagggtgaggctgcagtatccattgctcatgccaagctgcttgttgagagtggtgtccgtgcatctgatattggaataattacaccttatgctgcacaggtttgctcctatatgctctgaatattatcaaatcaatatacagtgatgagcttaataaaacaaaacaaaataaacgtttataggacttatgggttggctccttcatgatgttgaagtttataggactgactcattgaatggtgtaatcccgtaggtaacctgtctgaagatgatgagaaacaaagatactaaactgaaggacttggagatatcgacagttgatgggttccagggtagggagaaagaagccatcatcatttcaatggtcagatccaactcaaagaaagaggtaagctcccttccatgatcctccttggtgagtggatatcctatgtaaaatattcagctttacaaacatgaatattatacatggatgaggatttgattgctgctgcacagttgatccatcaaattagcatctggggagacttcaacttattttagaaaaatgtttaatagaatagagcgaatcagtatcgatatgatgtgaacgatctgtagatatatgtgcatgccatgcaaaatatctcattattgacataaggacgaaatatcatttttaaaataaaaggactgtctgattgaactactgaaataagaattcacaattatattacctggatactaaggaaaccttatctatttgcaaatttcaggtcggattcttaagtgatcatagacgaatgaatgttgctgtaacacgagccagaaggcagtgctgcctagtgtgcgatgtagagaccgtaagcaacgacaaattcttgaaacgcttggttgagtactttgaggagaacggggagtacttgagtgcatcagaataccagagctgatgacttggggtgttaacccttaaccgtgatagcccgtgcttatcgcaaagatagtgaagagatatatccaaacgatgcttgtgataggaacatcgtgcacttcaaactggtgcaatatggccaatggagatactgtcattcgacttttatagattggaaacagatcgctgtgagactgaacagataattagctcaggagtggatcaatttcgtcttgactggccctgttctggtctcttcttctgtggcttatggaaatgaaacctcagttatgtgtttttatatgtccgttctttcagctgatgtacaatgatagaagactaattttattcatccatgtgcaaatctaccatagttttttgcatggagttttgaaacttgggtccacaaaaatagtaataataggataggaggttgactgtactgaacttcgcatgataattaatctgtatctcatccatcttgcttattttcacaatgtcgcccaaaataccaaatggcatctcttcagcatagatttagtttgtgccatatccataccattgtggatgtcttgagaaaagcgatgatttatcgatggagcaagtagaagagaaccgcatgcgatgcccattctaaagttaaactggtaaagtaacatcatggaatggagggagtactgaaggaacaagagaatatgcctagtgtcaggtgtgtagaaggattcctgctttgagggaagattcgcaagaagatacctatgcaaagcacaatccgtgaaataaagcgcagcgccaaaccttttctccttttcttttttctttctttttggcagttttagtttccagaaatgttttagatggtgaactccaggaattaccggtttggtaccaaaataaaaactttttttggtgtaccaaaaatctctaacttaagataaaatttaagataaacgatgatggtgagtctcgagcctacacatgactaaaattacccatatatgctatcgtagtctacacatcactaatgttgtgttcgtttcgtatagttgggaacacatgtcctccgcacggaaaacggagcagtccattaacgcgtaattaatataagtattagctttttttaaaaaaaaatggatcaatatgattttctttaagcaactttcatatagaaattttttttcaaaaaaaacgcatcatttagcagtttgaaaagcatgcgtgcggaaaatgagggagatgggttgggaacactgataaacgaactcagcataaattgaccactcttattctcgacattgtcatcatcaccagctctatcaccgatatttcgaatgtaaaagaatttatgtttttaactcgagacaccacatagttcacatcaatcatgggcgtataacttgtttttatcatgcgactgctattttctattatttaatgaaaatccagaaaggaatagaggccattatatccttcatcgtctgttgccactgcctgcagtagagctttcttaattgcgactctttcaaccttggcttcatgccctatatgggcaagcaatgagactacgctaaaccgacgatgcagcaagaatggattagtgcacacatcaatacaatcaaggaacttctaagttatcggtgtaggcacggaatagagactcattgaaaaaggtgtgggccaccattggttggcatatgctgttgcatatcagcacaaccaggctgatgcttatcagcataagcttttctatcatctcatgctacagtccaaggagccaaccgatgaggtcagtcgtgacaatgggaaggtggcgagagagagaggaagcggggaacaatatttataattttgatgaaattcggtctggattacactggattgaaaacataaaccgtttggtttataaaccgtttggtttatcggtcaaataaaaaaatcaaactaaaattttagataagattttgttcaaattttatcggtttttgttggaactatgatgagggcataatcgtctattcctttccagattttgattccaagagaactgaaaaataggctggaaagagctttctcttccagaaataccccaagctcaattttcttctctacacaaccgaaaggtggagcgttggcgaaggaccaaccaatttcctctctctaatcgccgcggcgggggatagattgggagtgagcgcgtatggcggaggagcagttcctcgccgtcgcggtggacgccgccaagaacgccggcgaggtatgccctctcctgaaccactcgattcctcccttgccccctcctccctgtgcacgattcctcgtgtttttctttttccttgtccgttcttgatttcctggtgcttctccgcagatcatccgcaagggcttctaccagaccaagaacgtggagcacaagggccaggtctctcttccttcttccacggttccaccgatctcatcgcattccttttccccatagctgatggagtttggtttgccctggattggaatttggggtttcttggtgaccgtggctgcattgcaactgcaggtggatttggtgacggagacggacaaggcctgcgaggacctcatcttcaaccacctccggaagcactacccggaccacaagttcatcggcgaggagacgtccgcggcgctcggcgccaccgcggacctcaccgacgacccgacctggatcgtcgaccccctcgatggcaccaccaatttcgtccatgggtaattattagcttctgtttctatccccattataccaccttctttcttttttttaatgaacattgggtatgtcaatcacattgcagcttcccttttgtttgcgtctcgatcggtctcaccgtcgggaaaattcctactgttggagttgtgtacaaccccatcatgaatgaggtaaaagtgacatgtgaagcatttacatcgcaattggattgaaggacataggctatttccttctatgtaccaatatgtaaaaatcacagcttatttgtctctataggatttatattcttattgttcatatgccgacttagttttgtagtctaatttcatgttaccttttcatttagcttttcacagctgttcgtggaaaaggtgccttcctcaatggttctccaatcaaaagtaagtgctatattttggttaattgggtcctgatgtgttgacattcaatagaagcaacatattgaacttagacagtttccttctctgctgagcagcttcatctcaaaacgagctggtgaaggctcttctggtaacagaggtaagtgataccatcaagagtcaattttattacatgtaaagaaatttaatttgtattgatgatgcatatgcgtagaaaaatcaataggatttcatctcaaccatgttgttctaaattattttgttgcttcatttcactaatcagtataagccgtcttctgaatagcttaagatttggccgctactgtctttcctagaaaacatcatcgaacaatgtttgatcgtgttaacgtgcactttgcttgttgaatggtgatatttcacaactacttttctagcagatgtatagcttatgctttactgatgcaaatactgacagcatgtacatgaccatgcatacactcttttgaactagcatggagatttcatctagatatttggaacccccacacctgcatacagacccgaaagaaattcttgaaaatattattattttctgaactttaaagagtttggacacaatctaaccaaaagttaactccatgtgactcaatgtttttgggatttgtgatccattccaacttgatttaattcaatattccacactcaagtaattatgttggttgagatgaccataaccttatcgattaaatactaatctaatcatgtcaactggattttgtggaataccacattatctcttaaaacaatagttgaaatatttatggtaacatattaattgattcttaaacattggctaagttgcccatttcgggcttcctgttggagtgtgatattcttttttttcctggggctgtccaattcatattgatatatcaatatgaatgtataacacatgctacactggatgcaattagtttcttgtgagcctctttcgtacttgatcaatcatcagtgacaaacttcattgattctgaaacttgatttacttacaatggaaatgagagttctagtttctatttcttgaatcattttcatataaaagttttacatcataatattagtgaaaatatttgatcaataaccttgtgccaattgagcaggttggaaccaaaagagataaggccactctggatgatacaacaaacagaatcaacaagttactattcaaggtaagccttataagttatacaccaatattttcatgacatacaattatagttcaacagatcggtgcactaaaatggtatatttcattatttcagattagatctatacggatgtgtggctcgttggccttgaacatgtgtggagttgcctgtggtaggcttgatttgtgttatgagattggatttggtggcccctggtatgattaatttaattactacaaatgcagtgtcttatgaaaaatataaactatctaaacatattttattgtcaattcttcactctagggatgtggccgctggagctctgattcttcgggaagctggtggttttgtttttgatccgtaagttacactgtttagtcaatgtcatagtagaatcaggcagcgtgagtatctattattaattgtttgttccattctggcttgtaggagtggtggggagtttgatctgatggcacgaagaatggcaggatcaaacagctatctgaaggatcaattcatcaaagaattgggagatacaagttgaacaacatattcctcaacatgaagtagaataagaatataagatcgccctgccaattttattggggcaaattttctttctagtggttctgcataaacagcatgcctgttgcggaaaagttttggacgcagtatggcattgtattgtttgaaacttttttttttttggcactactatccggtgttacttcggaaactagtgcatcgaagattcgaagtagcttaatcagaattttgaaccgaatgttcagatggattgtgcaatgtgcatttcccccatgatttcgtctcctatgcacattatgtggaagatgttccaaaataatattatcagttataaccaggggcatgtgtataaacaaatgtgtttcaaaaaaatcctggctataacaaggtagcatgtccaaattcgtagtattaaattcgtagtattaggaaatgttttattttgttcagttttttatattttgggatgtaggaagtagcacagtagtatgatcctaccgatcctagtcttgatgggaattgggaaataatggaatttggttgcaacttgtaagaacgaaggatgctaactaagtactcttgatgggaaatattggaattcggttgcaactaggaagaatgaaggatcgtatacctctgtggcagtggatccagttgacggttgcaagaggaagatgcttagctgtgtggcaaactggcaatggatgctagtagctctgtagcattggttacaattgctcacttttcactagatgttggcagtaccaacagccaagcaaagggaggcaaagttgccagcgttggggatcaggcgtacggtttcttcaaggggccatggcggctgcggcgccgagttcggtggtagccggactcgtgtccgggctagggctggcgcgctcctcgttaacgcccagcgacggccgctctccttccctctcgcccctgcatccgccatggcccgcggccccgcggctcgtctgtaggagcagcggagcccggccccccagggagagagccgtggccgccgccgccgccgccgcaaattctccgcggcagcagcagcagctaggagagcatgagcatgaggaggctgtggcagcggcggccatggagccggagaggagcagtccccatgaggtcaccgtcctttctttctccttggtttggcgattgattgattggttggtcccgtgcaggtgagggaggagatagcgaggtgcttcgatctcgtgcgccgcctcggccgtggcgccgtctacctcggctcctccagggtgccgcccacccatccccattacctccatgccgccgagctctcaagggaggcaagcactttgctagctgttcctcttcctttactgtctcttgcaagttacaccaccctaatcttttcagctcacacattaagcttgtgttacatcttatcttattcatgcatattttcacggccttttcgccagaaacacactaatgtaaattggtcaacaaactggtagataaacatcacgctgcactagatttcgtgcgattgctatgaccatctgtatgtctaagtgatgctgaactttcatcacattacaacagatagctaggctgctggactgcaccacatggtccggagctggtccaggtttcatggatgctgccacccaaggcgctcttgaggcgggcaaaccggtcggtggcttcaagattggcaaggaggcgggtgaatggacaacctccaattttcatccttacctgccatcagagtcatatctcacctgcaggtagctggatcgcggtcgcttaacttcagattgatttgagtgtgtgtcatcgatgcatcatgcatgggaatcaatttgggctattctcctggatttcaggttcttctctgcaaggaagcatgggttagttgatgccgcggtgcggaactgccctaccgatagaactgccatcattgcattacctggtgggatagggacgctggatgagcttttcgagatgatggcgctaattcaactggagcggatcggttccacgcttccagtcccattcttgctcctcaattatgattcttactactccaaactattggactttctgaatgactgcgaggagtggggaaccgttgctccgggagaagtagcatctctttggaaggtttgcaatgggaatcatgaagctttggagtacctggcacagttctacaatgtacctcttgctgaaagaaattactgcatatcaccacagttgaagcagcaggcaacttcataggccacaagttgacgattcaggtttttctcaagaaatcttggagcaaacttattccgtttagttgatcattgtagtaccccctaccattttaaattgaattagcaaacgtcaaatacaaaaaacagagggagtacaaccttttcaccccagttcttgaaataaacttgtacagttgaatttcagtctgaatatctgatgaacatcaaggatgatgcaatcaaagtttcagttactcagtgaattcaaatctcatattggttctcaagaagttttatttcttctcttgctcagcactttctacaatataatccttaacctgctacacaagtgtttgttatctcacagggcacaacacacaacgtatgcaaccataagagaatcaacaagtatgcaaactcaatgagatacaaatgacaaaaaaagtacaattctcatacaacagttattggttcaaatattacccaaccagaagggcatttgaataacaatcatatattcgtattggtgtacctgaacaaacataagaaatagaccaaagaaaagcgcgtttcctaattgtcaaccaggctcaattgacagatcctcgagcgaagcaatcattcagactcattcatatgcagatgtaaacgcagcacgccaagattgatcatcgtcgcatgtagaagtggcatggttgttgtactccggtacatcctcgctctcctgccggtagaatccccccagtgctgactccggcagccggctgtccgcaaggaagtgcttcatcgtctccatctccatctcgtgcttcttcttcatcttctccagctgcttcttgagcttgtcgttctcctgctgcatcgctgcactcctctcctgcaaatccaaagcgagcaaatcaaattgttatctgtgtacttgtagtgttcagcagaacatagtttaagcaagcaaattgaattgttatctgtgtctttgaacaaaccttttcttgtgtggatgcctcctctgcctctctcaatcttacaagaagttctccagcagcatggacagcttcagctgtgtcgcgaagctgaatgcggagccttctgttctgctctttcagctgcgctctttccttttcacggtcaatcctcactgtggacagctctgctgcaagggcagcagcgaaagccgtcccgcagcccttcctgcctgccttggcagctgccctcttcacctctgagataccttccatcacacggcggtgcctctcaagaagatcattgtacatctcctggagctcggcgtaatgttcaattatcctggcgtggccgtagatggctcgttggagggcatcatccagttctgcagtgcacttcttttcattgctaagctccatctctgttttctctgcaagcatccgatttgattcaagatcaactctcagctcttcagttaggcatatccatttgctttcagactccatccatttctccctttctctgtctagctcatattcttggtctgtgctgccattcctcaaatgttccagaaggctgacatttgtggattcacctgcttgttgtttcagttgatccttcaacctctgaatttcactaagaagttcttccctgtcattcacattcagctcaccatgttgttcaccaaccttggcttcatccactagttcttttgtaggttccgtaccatctgaattttgagcatcttctgaacacttcttatattggtcaacctgcaatgtaacattgaaaatgtcaggaaatggtatcatgcctgaagcatactattccttagttcaccatgcttcgtaccaaattgctcagctccttgatcttatcggcctgttcttcacataaagcttcaagttcagtctgtctctttgaagcaattgttgatgcggtgatgtcgtcctggatgaagaaaatgttttagtacatggaaaaacaagaatatgggtagaagtttgccatcacgtaatataccttaacttctggtaccacactggtggctattacaatctgcttttctgcatttatattatctttttggttcccatcagtgtcgatcgcttttttgcaggatgaacaaagagcagaagatgttgctcctttcctctctggtgatgccagaactcctgaactgacttttgcaactgattgacgggggttcagtgcaaaatgatcaaatgaaaggccaacaaatgattttcttgggccttggttctgttcatggtactccataatgtgcaagccccgttggagacttgcagccagtgaatcagttgggctaagcttgcttgactgtaaagaagaacgaactgcactttttctggacacttcatcaccgggacaatcagatacactaagtttgcttggtgacagccctggtgaggtaatgctttttctagccttgttgtgaatctttggagaagaacataacgtagggtcttgcattggtgacaggtgcggggaggcactaactgatagaaaagatttcctgtcagacacaaggtcttgatcaacttttgtactggacaacacttcatgctcttcctgaatcgggtcttcacaatcatctattacaggctgatcatcttcctcacttgtttttggattccccttagagcaaggagtgtcatcaccactctctgcatccatgaagtcatcgaaagtgtcttcagatgaggaatgaagctttcttatttggtcacgcagttcttgtacatcctcttcatccacatccatctcttcctctgaatcaacttctatgtgaggcaagattagagagcgattgagactgactcgcaaattatgcaggctttcacgggcattctgtgcactgaaatacccattcttgcagggttcagtgtctccagattttgttcgtatgagctcgtcctgcaagtgatagaacaattagcaagtgtctgtaaattgttgccacttttatctgctgctgaggaaataccttcaactgacgtatttgatcgctcaaaccattaacatcatcttctgatatctcatttactacagccttgtttgacatgagcttcgctctctcaccgaaccgtagcgtgcttaaagttgtagttctgcacctgcatttgccagtcacaggactctatgtcaacttaagagaatgtaaatggcatagtgaagtacataaggtaatgaacagaaaatacctgtgttctgaagaaatggaacacaagaatgtaacccttgaatttccacctagtgtatccttcagcacatgcgtcaaacaggattgcttgtggggagagtcatctttctgggtctctggtgcttctgatagaatattgacgagtttcctgaagtaacaatgtaagtcagtcttctgctttactacatgtttttattcttatcactatatgtttataatatatttctccaaagaaagcaattatcactatatgcaaacagattatgagggagaaatcggtgaacatgaaaaagaaacattgaagaaattttactgatgaattttcatgagacatcaaaattcctgccaaacaagccatcttataaatttacatacccaagctttgacaaggacttcttaacatatctttcttctcttgtacagtgcttgttgccaccatcaagttcatcattatcaggaccagcaagatcaacgaaggtaattctgctggtccgtgagctgctgaagccatttgagaaaccctgtaatttggttgaacaaagtaaattcccaatataatgacaacatgtatatttgctgatcaattagtgaacttaaaaaacagaatagaatagaccaaagagcagactgattttctaaatgctataatactgacattattattgcaataatagaagttaaatatagctggctatgaggtctccaaataacagaagaaataagagaggtttaatttaccttgctccatgcttcaatgacacaactgaatatcacatgagaacgtgaactcttcaagttcatactcgtagtaccaacttttctgtttgaaaggccctgtaaagaaaagcaagctcagacaagcaatcaataattctggaggagaaggtagtggggttcagttgttagaagtacaacatgaaacaaatagttttgagtgagcatgatacaagtactaatatatgcgatctaaacaagctcaagcagaagtcctggttgtgatactcatctatgcagaggtgaaatgaaaagcaaagaaaccctaattttaaaagcaaaatagaatggacaatttctttctgctgctgatgtgaagcaacatagatcaaaattgtcccactgatttgaagtatagtagaagcaatttcttgggttggttttattggataactccgtgccataaaagaataaagatgattttcggaacaacttgaccagtgcccataagttagcaccagctaagcaaaatgttttggatcttaacgaaacaatcatgtaaatagctgtaaataacttccaacattttttcacataatgctgacttcaagctacaaatccctagctatgttttctgacagaaatctgcaaattagtgcagcaacttcctgaacaaatctgtaaagcatcacagtctacaagtagacagataatgcagtgaggtggaagtcattttgatcataccttcatcaagatctgattgacgtcctcaaccgttgacacatactcatcggtcaagttctcaacatggataccattgccagcattctctcttatctaaaataacggagttggataagtttactgcaatccataagcatacgccaaatgcagagttagtttcttgctcaagattagaatatacctgaaggttacgctgagatggatccaacaggtcattaatctgctcattatgtacctggaaagcatagagcaaaatttgcaccatgtcagatctggaaacatagtttaaaagctgaacttcagggaaaacaaaaacacgcatctatagatgcatttttcagttcaattgagaacgagcagatgagtcactactcacctcaagaaatgagcaccggcattggtagcttgtctgcttctccggtgagctctcttgcctctgcaccaggaaagaacagcattgagaccacaaggaaatcacaggtttaatcaaatttctacaaaaccagacggcagaaaatgccttacgccttggatttgagcgaagaggttctggaagacgcgaggaacgacgcccctgtcggcgtggtctgagctgctgtcaaccatggccgcgagggcaccgaacatggtgtacgtcttccctgtgccgctctaaccacaattccaacacacaaaagcaaagtttcagaagcagtaacgcagaaagaagaaaaaaaaaacataactccaaactgaacaggaaggatgaatcagaggaggtacctggccgtagcacacgagggaggagttgaatccagcgagggcgctctcgatcatgggcacgccaatcagatcgaaagcatccgcctgccagggaacaccaagattcatcacaggattcgttcaagagcacctggaattggaggaatgggaataatgcaaacctgagaggctctgtcgtcgaggaagccatcgacggcgaacgaccgatcgccgacggcgacggagcagggggaggtcttgcggacgaagaacagatccttgccgtccaccggccggctcaccgtcggccgcacccggaccaccacctgcacacgacctctcgcgcatcaggagaggctcacaacttggtaggaaagggatttccggcgagccggcgaactttaccttcacggcgggtgcctcgttggcgggcgcagaagcctgctccccctcggcggcggccttcgagggaggagcagcgctggtcgggacgggcttcgacgaccgcggcgacgcgcccggcgccgccgaggagttcttggcggcgggggacatcggcggcgaggcggcggccaggtttgggtggaggttctcctggtcggcgtcggcggcggcgacagcgcctgcccgcggcgaggacacggcgaaggcggagagtgaccgcgacgcctgccgcttcaggttccgcctcagcatctccattgctcctctgctgcttcacggcgagatcgaaatcaaaatggttgaggggagagagagagatcgaagaagaggaaggagacaagtgagaggagaggagaccacggcgaggaggcggccgcgcggtggcttgtagtaggatgcagatgcgatgattggtttgcccgttgggattcaaaataatttgaaaccggatgcccggggggggggggggggggggatgcgctcgatcacgggatggacggttagatgattgccgcgtcagtgggggctgcctcttctagcgtggacactggacagcgcgtccaaactagccgttggggagcgggggtaaaaaaaaaaaaaggccaaaccggctatgcgtccgaggtaaggaaagataggcgcccaatcataggcgattatttggtttagaaattacggttaattgtgtcatcataatcataaatttacaggtttgaaaaaaatcaatactatttacaaaattatacaatgccattataatttaacaggtcttcgagatataccatcgatttccccttcaccgtaatttctaaatttttcaaatcaaattgacatcgtcttcttcctcccctcttttcttcctcctacccatttctcttttcatctcacccctcctctctcttccactggaatggttgcactatcctctccaccgacgagcaccattgggggacggagatggaaacatttctctcgctcgagttccccatcgatgagccccatagattcggtgtaacatccttaaattttaaactaaaatttgacagcatcatgctggcttttgactagattagtaaaatttaaaagtttatttgaatttcttttgatctttattttggttcaagtattacttctttagaaccctattaacttaccctaattaattccccttatcctagaccttggtgaatttgagcaaattttctcaaatttcaaactttagattatttctttagtttacccttgtattagtgagagtttgctatactctaaaaccctagtgaaacccttccaaacttatgattaaattcattctcttctaggagaaatattcaaaatttcttaaaaacactgttcacaaatcctttgcaaagtctagatttggtccttggggaccacaacccactcaaaaaccatggttcactttgccttctcctctcctttgattgcgctaccctggcatccgacttcgccgcatgccgagccgccgcgcgtcggcttcggggccgttcgcgcgtgcctgaccgccttggcgcgccgctagccgttcgacgccctcagaccaccgccgccgcaccaatcgtgatgaagacgaagttaggacgacctccgccgcaagttaccgccgctcgacgccgtgcacgcccgtccaaagccgccgccgagtccgagtttgcttctacccggggtgaatcgcgccaagtcttgccgcacggttagattgaagataaacgacggcttcccctatcacaattcaaaccaaccatcgccgtgccgaccattttaaccctcgccgccgccgcgcgtcgagctcggattggcgccaacacgtcgccagccgttttcacccgcggtcaagtcaatccttcgccagtaagaattcgaacatggcctcccgccactcaaattaatcttgccctccctctcacagccctctgccacccctgccatgcctaatttctgagctcattaatggcgttgatggcgcccgagctcatccgcttcccctggccctataaataggaccccaatccctttcttgtccatcatcgatcatcatcaaccataaccccacaaccccgaagctctactttgccaatccataccatcaaccacttccgctcgtcggtgaacaccttgtgcgcgatcgacttcatgcccctccatccaccctccaccctaactaattcatagaacacctatattcaatcatgttctagcatactaaaccctaaccgaagctttgcatcgagtttcacctcgtcgcactgagccgagcaccgccgcccctgctctgctctattcttcgccgccaagaagttttttcgaccgtaatccgttgtttcaaccgatctcggtgagttcttccgttttaaccatctacatactccctagagtccatttttgcaatcggtttgcactgccatacttccctcttggctgccaacgtgagctcgaccgccgccaatggaggcgctcgtcggcagatgccttccacaccttgccgaaggtcggcaagctacctaaacccttctaagtacctcttagatgctctaggaaccctccttgagctatgcctaactcttaccaccccgatcaccttcacggcctatctatgtcaccgccgccctagccgctagcccacccacacatcaaaataacccctccaccgctactcgccgtcgccggagaaccctagctacctcccctcctcggccgcaacccctttccccctctatcaccgccgaaatccctaaccctagcgcaaccggctgtatttggggaacggctggaggttgaagaagagaagagagagagagactgacatgtgggacccgctcacagtgccatttcatatttagtttgattttcaaactttagaagtccatatcttttaaaatatagatccaattccaatgaaacttggaccaaaattcttctaaaatcattctttatcttttgagacacttttgttatttttctattttattttatttttcctatttttggattttatttgaatccattttgaatttgaattttatatgtctaaccctaggtgttgaggattcttctgacacactagataataccagtcaatctcaagacatcaagcaagtcaagttactatttaccttttgatcatttaagcctgtattttacaaattatttatttatagctcttctattcaacactctattttatatgcataatttaattatagaaacccagataatttagtattgcttattttgcttacaatctagttaaaatatcttacacttagattgggacaatacgttagaattggatgatttccaggtggatagtactatctcgatcgatatagttactaccaggtacttatgtcaaacgaacgggtacgaccgcagtttctagaatgggaacagacctagttattatgttatttagcaatgcggtacctctatatagtggttcttatttttatttttaagtcctcgagcaggaggcaactatagccgcgaagggaaaatttcaccattaccatgtacatgtaaatggtttgtgatactcgagtataattataagtataatgttaattctaaaccctgatcgagatgacgtggtgtcatatgatcagttccccttaaataccccgggaacgccagaactcctctcgctgctgttaacgtcacattcagagcgtatgaggatataagttcatggaacaggtaccacaattgttaataacctaatactgggccatgactaagctaatgaatattggcaagtcgtggactgcgggtaaagcgtacatctgctgcagtagaatatttatgaaactattcgaatagctgtactcgcggaattgagtaccgggactcatatggtaccctggttagaaacctaaagtctacatatttacaaacttttgctttaatacttccagattgtttattattgccttttgcaaagaactctactctataccaatgcataacatgtttccatggtaacttgctgggtattgtgaatactcacccttctcttataacccctttttcagatttgggtcaagaggaggacccctatgattattactatgatgaccctgataacttagaaaatcccgagaggttatacctccctagttagaatgtataaaaacttccgctgtgtaatagtcttacttatgtttaattatgtgagtacctattattgtaaaacccttagtattgtaaactttaacgtatgcaatgaagaaccagctatattgtatgtatcaatatttactgatccagggattgatacattaatctcagtcggatccaagtcattagttttgggacccgatattcggtcttcgaggtagcctgggattcgagtgatgaggaccgatggagggcaacgggatccgtggagaggcagaggtggatgacaacggggaaggaaccgtgggagatggtgccctagcgacggtgacatcaaagatgagtcatcccatgggaggagcaaccatggagggcgacgacaacattgactagcacggagccgatggaatgtcatcgagagaccaggggacggagtcatcgtggactcgtggtgcacatccccttcgaagaccagccccgttgctggtgccctggagttcagctcgagccgaggaacctcaactcactccagtcattgcttctctttcacgttctccccgcgcgtctctcttttggatcctagcctgccgccctccacccaacaccctccggtgaggaggttgagttcgccgtggccaacgacggtgcgatgcacattgcctgcactgccgtcacacgccctgatgccgtgcgagacaacgtggtgataggagagagagagaaaggagaagaagatgatgtaggaagaagatgagggcaatttagtcagaaaatggaaatttcaacgaaggggtaagcaatggtacatctcaaaggtatgttaaattgtaatgacatgcattcaattttatgaatagtaatggtatttttccaaacctgcaattttataatgccatagatccaattaacctttgaaaataatagaagaaaaatcaagagtaaattgcactaacggtccttaaacttgtaagcatgtttcacctaggtccatgaacttaaaaatcgcgcattgagatcctctaacttggttcattgtatgtatcattccggtctaaaacctcgtttgaccgtggtcttgcccatgcgtgtcatgccacgtggacgatgacttggcaaaatatcccctttccccattcttttctcttcttccaccactcctccaccactggatatatcagcggcgatggcaggcaagcagcagcgagagagatggcgctagccaccaccggtggcggggttggcccgacagcggagtgaaggctcgaggctggagctgacgatgacaaccgcgagctccctgctctctcccatcgttgttgacgagaccgtgtcggcggtcaaggaggctgccgtcgccgttgcttcttcaaatccgacggcccccacttcaaatctactcaagtggcatcagcgctcgttcgaggtgtggggctagcgatgaggacgagatggagccgtggcgggctagcctcttgaggtggagcggcagcgtggcctcgagatcctcaccgccggcttcctctcccctcttcccgcaccatggaggccatcgaggaggccgtgggcatcccaagctgctgacactggccgagattggtgatgtgagcgaataggaatgcagccgtgttcctctgcggagatagcggatcgatggggacggccgcgccatggcctcgtcggctgcggtcccccacgacgatgacaagcggaagggtggggcttgggaggaggctgagctcaggaggctcctcaagcagctggggatcctctcttcccctcctctccggtaggccggtgagctcctcccgccactggctcccgatgagcaaggccgctgtcacgagcggtctcagtggcggacccggctgcggcaacaggaggtggtgtgccctcttgtgcagacactggctaacgggtgacggtggttgtgtgctggaggcaaatggtcgccgtcgccatcggtagagcagataagaaaggaaggggaacgaaggaggaagaagataaaaggaggggaaggaaaaaaaaaggtgaaaagggaaaattttgctatgttattgtccacgtggcataccacgtgggtaagaccatggtcaaataagtctttggacctgaatgatacaataaactaagttaaaggatctcaatgcgtgatttgtaagttcatggaactaggtaaaacccacttacaagtttaaagaccgttggtgcaatttactcaaaaatcaactatgctaggttagagttcccgattggtagccgtagacaactgaacaaatcatggatacaactttaattcatggagtagtagtctaaaagctaatgttacaaatagactatgctagcttaaccggttaggtttcttgtgatgaaaaccatttcacctgatatgggtgcttatatttacgggtaattatttttctagtagtagctagtaggtgatacacgtgtagttagggaggcacctatagtgatttcgtcaatcttaaaatattctagcacaatttgtcggaggtgctcaccgatggtgacttccttaatcgtcttttatatgtgttcataggggtaggatgtgcatgtgtataggtaaatgtggtcaaaattcatttgcaaaatatcaagaatttagcaaattaaatattccacgggccaggtccaaccgagctaatccaaagggaaaaagtatatcgaaggtcctttatgttgtcatcggattataaaatcgtcctccaaatacaaaactaatatatggcatccctaatcttacaaaaccgaatcactttaggcagttttaactccggttccgacgtggcagctgagtaaacatcagacccacgtggaccccacatgtcagcctcttctcttcccccctttttcttttctttcttctcttttttttttctcttttctcctttgttgcttgcgtgttttgaccgagggagagaggaccaccggggattgaagggaaaacgacgtgcaacagggagcggcgcggctggcggccggcagggtagggcagcggcatagcatgtccacgatcttgcgcctcccgcccaccaccatgcttcggattgtctctgatacgaggccgacgaaggaaaagccatcgtagaggataaagagggccgagggcggggaaggcgatggaggcggccctggggcaaaagtcagcgaagtggggcagcccttgaggaggatgtggcacgcggccgggaagtggagcacgctggggacgcagcaaagaggtttcggatggctccgcgaagtttcccatcgccgccgtaagttgctcataggtgaacacccccttgaccggaaatggtggggctgcgctgctgctatggggattcgactgcgtcggtcgaggcatctcctccggcggcgacaccgacctcgatctggcggtgacatcgactcgacgccggcggctaaggtgtggagggcgtctcgacctcaatcaagccgacgccaatctccgccgctccttcctcgtcggccgcgctgacatcttccccaccacatcgatgatgccaccgccgccgcatcggccctcatctctgccgcgctcctcccccgccaatcgttggccgcaccggccctcccctccgccgtgctgcccgcaccaccgtgcgtcgccgcctcaccccgatgacgacacgtgatcacggcaatggtgccgcacggcacacggaggaggagggaaggtagacgaccgccgcggccatccgcgcgacggcagctatcggcaacgccgtttgtcgcatgtacctcctcttcgccgcgctcctcccccgccagccgccggccacgccgaccctcctccccaccgcatcaaagacgctgtcgccatgacgaaatgtgatgtactttttccaatccaaaatccgggctgaaatgtagcctgccagaccaatcgtgggaagcggcccagaaaggcctaggcccagtcaaggcagctgatccttcaaatcaaatctaatccaccacaaacgactccaattctaatcgtgatgaattgtgccctaatcctgatcctatccgcctcggactgttcgcggccgcgtgcgtatatataaaccgcgtcggcttcccaccggccgcagcaagaatcgatcgcgatggagattatgcaacagctcgccgccgccgccaccgccaccgccaccgccacggcaacgcccctgtgccttcctgaaccccctccgacggcgatgacgacggcgcaggtggaggccgccatcgcgacgctgcacggcaagaagcagggcctccgcgaggcctacgacagcctcgtcctccactcgcccatccccctccccttccgctggtccgacctcgactcccacctctcctccctccagtcctccatccacgcccgcttcagccagctgcaggccctccaggcttcccgccccgcgccccccgccgccgccgccgcgagccacgacgaggacgtcgagatggaggacgtccaggaacagggagaggacgaggtgatggcgcctccgtctacggtgcaggtcaaggaggagcctgtggaggcggcggcatgcgcgtcgaataccgccggcgagcgtgccggtgtcgggcaagatgggttcgttcgacccggcgggatggcggcggcgaagatggcgtctccgtcaaaggtgcaggtcaaggaggaacccgtggaggtgagtccatctcctccggccggcgccacgggtcttacggcggcggcatgcgcgagcatggacgccccgagactaaccgacgtctgcaagcgcgccggcggtggcggcggccaaggtttgtgcgcgcgaaacggtagtggtacagcgcagtcacccccgatccctagttgccctgtgctccagcagcagcacacggccggcgccccgaacggcagccaccctgtgctacggcaacacgccgctaacgccatgaacgccggccactcggccgcgttccggccgcagcagcacatgggtaaaccccgggacacgtgtgacttgcggaaggccgccgcaccgaacaccggagatcgcctgccgctgcaatggcggcagcagcgcgtgcacgctaatctcacgtgccccttgccgccaccggtggtcgcgggctcctcctcctcgccgccacagcagcgcgtgggcgtgttcccctcgccaacgccgcagatcgtgggctcctcgccgccgccgccatcacaggcgcgcgtgggagaggctaatgtaacgaacccatcgcggcagcagttcacagctagcgcgccacacgcgggcgatggccagctccagaagcggccgccgtggcagcggctgcagcgcgtgggcgtggctaatcccatgaacgccggtgacctgccgccccagaagccgcacttcacggccaacgcaagaaacgccggagaacacccgttccaggagcagcagcagccgccgcccgtggccaaacccacggacgccgccgccggtgacctgcttcctcagcagaagcagttgatggccaacgcaccaaacgccggagaacacttgctcccggagcaacagaagcagcagcccgtgacagctgcaaaacccgcgaacgcgccgcctctgcagcacgcggcgaacgccaccaacccagccgttctccggcggcagcggcagcggcagtgggttcgacttcgaccaccgaccgccactaacctgccgcaaacgaagcaggagcagcatcatctgttcatggctgacgacggcgccaacgcccgcaatcccctgtcgccgccgccgccgtgcggcatggccaaaccccccaactccggtgacccgctgacggatcagaacaatcagcagctcatggcgaacacccactctgcccctacaccggtttccacaccattggttgcatcgaaccagagtgaatcatcagccatgacgacgacgacgacgacgaacagcaaccaaaactccggcggcggtcgcaccggcccgcaacccgtagcggccggcgctgctccaaatccggccggcaaccagcagcaagggcagcggaaaggtggtgcaaacaggcgaggcggacgaggccaaggcaacaagaacaacaacgttgctaataccaatattagcaacatgagcaaggtgattggcaagggcaacaaggggcagggcaatggaaacccccagctcaacaagaatgggaacccccagttcaacaagaacgtgccgggtgatcatcaccagaagaacaagaatgcagggcagctttgctacaggtgcgggtgcagggggcactggtcgcgcatctgccgcactcctgagcatctggtgaagctttatcagcaggacagaaaggccaaactgcaagcaggagcgaatacgaatacggtttatgtgggagccatgacggattaggggttataagatgggtacattgattatatatctttgtgcgtgtagcatacccattttcgagttatcttaatgttatcgtactagacatgcttttcgtgtttcctacagcatttccccccctcaaattcttagttacagttatgttatcggtttttatgttagatctatattctagtatcattttattctggtaaaatttgatataagacatcatagtgttgtgtcatttgccataacacacttaaaaaaaatgtttgtttgtttgtttttgtgtgtgtcccctggccacatgacactttgttttggtggtaatgtgctaaaacactacaactactccatccagttcaaattacttgtgattctacatatgtccaaagttgaatatatctatctttcacaatcaattttgaaattcatacattcttatgacatgcaaattacatattactcctatgaaagtatttttcatgatgcatctaaaagcataaattttatgatgtttgaccatataaacttctagactccatggctccgaatctccttccggtgccctacgtctcaggggattacacacggtggcctccacccttgccgacaactactgggtaagggacatccgtggcgccctcattgtccttgtcatctcccaattcttgatggtctaggatgtgggtgcttcctacctagctctctccgggaactggagactgtcttgtatggtgttggacgggcaaccagtgctactcagcccgctcgccctatcatgctttattgctgggcaactcccctttccttgcaccgaactgctgtggcaggctgagggccctgccaagtgcaagttgttactttggcttgcattccagcaacgctgctggatggcagaccttctgcagaagcgtggcattgacggccactcggcctgccccttttgcgcgaagaaacttgaaacgccgaatcacatccttctcgattgtgtgttcgctcaccaagtctagctggcctgggctcgctccttcccgtggcgacactcttcagggctggtggtcatatgctagggtctacttgcctgagcaccttcacaagggcttcgactttctgttcctatcctgacagctttggaaggagtggaacgtcagggtttttgattcttccctttcgctggtctaggtggtgttggggtccatcctccaagaggaccatctctggtctttagctagtgccgctttgtttggggatttgttgggaggatagggggttccttttcgcatctttccctctgtctaggagcaacagctttagttttatcttttcctttttgtttgcccctgcagtcccttccttgtaacttggcaagagccggtccggcccattgcgttgtaatgtcaaattctagaaattaatggtcaaaagtacaaatatttgacttaggacaagattaaaacaacaactaatttgaaacgaaggtcagtattatttttaacatgtttcggctcaactagagaaataaatttttggaaaggacgcttttatcaccatggcgtgtagcagcgaagcagcctcatggaggtcgagatcaacattgacattacaatttaaagaaagtcatttgctgatattttgctgatacttacaatagactttgcaggagaagaatgcaaaaagaaatatgcccaacaatactgatggtgcccagagtttcatttcataaaaagattgtgccataatttacttccataccgagccagctcttctgaatcctttggccacagctttgtattcagactgtatttgatcgagagactgttggttctttttatagcagcaggaaatcaagttggttccaaggcataggcgcactacatgtccattgattaatctgcgtttcgtaaaaaaaaaaaaagccaaagagttaatctgtgatcagaaataccagcccagtcagcgtttgaacaggctgccttctctgaatagtaagcctagcacaagctataatctttagagatcagcaagatcagttatgtagccgaccagtacagtaacttgtaaacactgaaatacttttattaactgagtaattctgagtattttaatatctcagatcctgaatgtctgaaaccacaaagtccacaatacttagctaataacttgtctgaacatgacatatgatgataggagctgcaatgcaatcagtttggcaaattgcataccaatcctctgtagcagatcattcataatttggtataggagtatatacttcttttgggtcaagttcacagttcacaccacctccaggtttgcgtatttgtttcaaagcccagaatatatgacagcttccctgtagccttgagggcaaacagccaaacatggctgtaatttgctgaattagtgcagtgtcagattctgcatattttttttcagaaactgggcatattctgtagatgaagtaacaataacaatatgattcacatagacaaggtcacaaggatataagtggtgacagcatattgatggaagataaagagagaagtttcagttttggtttgtgtaaagcccaactcctgcaactcagtatccagtttatttccatacaactcatctagtttccataggtgtgttgagtgagcaggaccaatgaaaccaggtggttattgcatatatacatcttcacaaaggtcacacagcagaaaagaagaaactatagcataaattttggctaaagatcagccatgcaaaactactgctggcgataatattagtcactgtagcaggtctgacaaccggactaaaggtgtcgtcaacaggaagaggattttgatgcctctaggggatatcctctcgttgtttacatgtcactcaaatggttataaaaaaattggaaaaaaaaattaagaagatgtattaatatgtgatatatcactccacaaacatgcaagtaaaaattcaacttctacatctcgcaacgaaaaaaacaaatttgactctgaatatacattaactagctgcggttcaatttgtttttttcgttacgagatgtagaagttgaatttgaacttgtatatttgtgaagtgttatatcacatgttaatacacctttctaatttttttcaaattttttataaccatttaagtgacatacaaagaacgaggggatatcccctcgagggattaaaacagtttccctcgtcaacacatcatagtccacactgtatccatggcttcttagcggataacgcacattattctgcagtctttgtctgctcctcacacaatacaggtttacgtgcaggttggttgtctgaagatgaagtcgttgctgataaggtaagttgcagttagcaaggcctcatccgaaaagcgaacaggaagagatgtgctagaagagttagcctagtctatgcaatgtgtatgtgggcaacacacactgacacacgatgtgaatctgtgcaagtttcagaaagaatttgtgcaatcttcaggtcaacatcgaaccatcagtctgaattgagcagattttactatttagaaatctctgaacatatgtttgaaactgaaattgaatgaacgtacactcaatgctcaacatcagacctattcttgaagagatatctggatccatgtgaatctgctaaaatcatcaatatcagtatgtctggtcccttctattttattagagagaatccattatatgccactgactttgtcagacgtctataatttatcactgactttgtcacattctacaatatgccatcgacctttgcttaacttttacgatttatcatcgttgtccggttagcctccgttcgcactgttcatttttgtccaaatgaccaaaatacccctagaacaaaaatttccaaaatttggataaaattatcaaaatatcatattattaacataagcttgtaagcatccaaaatttggccaaaaacttaaaatctgacatttcagaatttttatccaaaatttgaaagtttttgtcctaggggtatttttggtcattttgacaaatttatacagtactaacgaagactatccggatggcgatggtaaatcgtagaagttaagcaaaagtcgatggcatattgtagaacgtgataaagtcagtggcaaatcgtagacgtgtgataaagtcagtggcatataatagattatctcattttattactgtcctctgaagtaaacaaaacaattgtgtcccggtagcacaacagggtcctgtttgaaaatactgtaagcaactctaatagtgtcctgtttagtaatcatggatacaatccttcaaagattcaggaattggcatgcatcagagaggcaccttcagtatggacaaaatgctcttaacatcttctccataacatagcgaccctctatcaatatctcaaggcatgcagtcagctttgcaaaacttcagtgagtgaaagcatttgcaagttgaagatcagtttcttttcttttccacaatttctgcatatttacctccctgattaatttcttcagtcccaatcagcattgatacagcagctgtcattggtcagagactgcaattcaagatattggcacttgttgataaataaatttactctataagtaacatccgaattaaaaaaaaaaaaggacattgccccttcagtttgattgtcttcaaacttaacagcacttgcccatcaattttcttcttttacaaataattccttcaaaaataagaaggcgtatgaccagcaccagtttaaatcaaattcctaacaagtatccccaaaagtatccccaaaaaagaagcccgctgctcgcgcggcagcgcgcgtgagacagacgctgtctcacgctgacgtcagcgcccccaataaattcaaatcccaccttactggaaacatcccacgcgcgcatcctcctctcctctcctctcgaccaagatttcccccaaaaccctagaaatccccaggcggcggcgcggcgcggcgcgcgatcgggagttccaggcgacgatggcgggcgcggatgggctccctcccggcctcaggttcgaccccagcgacgacgagctcgtctcccgctacctcctccgtcgcatccagcagaagcccctcccgctcgacggcgtcatcgtggatgccgatcccctgagcgtgccgccatggacgcctcttgcggatcacacccgaggcgacgaggccttcttcttcgcgggggcacgcgccaagaatggcaagggaaagcgacagaagcgaaccgtggagggcggagggttctggcaggggcagcggatggccgtggatggcgagcggctggtcgtcccaggcgacggtggaggcggcgtcgacggcagcggcggcggcggcctggagatcacgtggcgcaagtatgtgctgagcttcttcgccgagggtgaacagggcagctcgggctgggttatgcacgagtacgccgtcacgtcgtcggctgacctcgcctcgtcgccgctccggctgtaccgcgtcaggttcagaagcgcaagagggagccgcagtgtctggactcccacgatgatgaagacggcggcgatcaagaacgcgcggctccccggcgcggcgtggctcttcctgcagccgacggcaccgaccagggctcctatggcgtgatcgacggggaaccttcgctggtgtcacattgtcttcccgatcagatcgttcccccagcagaagaagctgatgccactgctggtgcagtcgacgaggagcgctggtcgccaccacagcccgcttcccctactgctgctctggtgaagcagaactcctacgacctgatggtcatttcgtcactgctgttttctgatcttcccgacagaatcgatgacgatgacctgtctgtgtcgcaaacagagggcaccgagctgtccgagcagggctcctccggcgtgatcgacgacgattattggcgggtgttccatggactttccgacctgatcgcgctgccagcataggaagccgatgccaccggtggtgcagagagagaagagatcgctctgctcgacgaggagcgctgcccgcaaccacagcccgctcctcctactgatgctctagtgccaccactgcagggccagaactcctacgacgtgatggccgattcgtcactgctatttgctgatcttcccgggagaatcgatgacgatgagctacagcgatctctgcgtgtgtcggacatgcctgacctgttcttgtcgcagacagaggaagccggtgccggtggtggtggtggcgcagctccagtgctgaacaagcagagtaactcctcacctttgggcgtcatggacagcgaggtgccgattgtgttgtctgatctagagttcccagagagcattgatgaagtgcttagctacattgacttcgccacggatgactgcctcgatttcgacatggacgagctgttttccgatatgccagcagactagcgccctgcagagagcaagtgatcaacgctgacattgtcctcttagcaagagatcagttcttattcctctgtagtgcagtactgcagtctgtgcagcggctagaagtttaggagttttgtgaatctgtcctggaattacctgtatttattagttcattagttgaattaaatgtaacatgtgatttattagttgagattgctgttgattggtatgaattcaatgtaagtaacatccatgtacaatgagtggtgcacattcaataaagctctgtcattcaaattcagaacagagtacattagtttatactgaaagtctgaaactcaggttttgttctcctacactgtatggatataagcgaccaacatgatgtgatcccttcaggacacagcatggatgtaatccttcacaaattgacaacatgctccaaaagagcatttttcagattcaccatgagcaatgcttataaaacatgcaccgttgctactgaattattgactgcagtgatacatgcaacaaaaagacccatcatcactcatcacaggcatttcgacctcaatggatgacatatgaatatatgatacgatttcagataatatagaacaaacattcagaccatatccttttatttgcactagcgatgtcacctataacatgagtgccaccggcaccctggcatttttcttgcatcgaattacagaaccaacatgctagctgcagaacagagctgcagttcccttaaattatgtcagataccaggatgtatattgacaatgcaagttcatcttacattatatttacatttactaaagactgcacaaaaggaaaacatgtagcatattcaagaatctacaacaactttgttggccccaatgcaagagataatgattccttcaaaactgaactgcaaactgaggtcctgtggaagtgctggttcttgaaacagaatgagaaaaattctggtggatcctatcctcttaccacatctagtaccagcagtggttttacattgtacagggatatgctccacttggtctcatgtatcttaccagcagcacttgtgctgagttttttttatatgaagaaggttcaatatgttgagatttgcgtgtcgaaaagccatattattgtgcaccttccacagattgtgggagcaggcggcaaagcatacagacaagccaggttgaaggtgatcctgagatgtttctgccaggttgaaggtgtcaacatattgtcggatatttttgctgattgttgcttgcttgtatagatctgcaggttcagttgcccaggcagaaactgcagtgagggtccgatgaccgttgtttgtggactctgtttccattagtgtttagtctgtcactaaagactagccacatgaaaattatgcaagtatttgggattggtttgtcccaagtttggctgggggacgggaatcagaagactggaggactgaagatcataccagacgctggttgcttttgtttcaatctgggcacaaaaatgtaatctgtcaacttgggtagttttgttttggctggctcagggttcatagaatagattttgagggtgtggtctgtttcagtaattgcctgttcactctgtctgtcccagaccctctatgcctagccctctctcttgctgtctctttttttttttaacctcttcttccttttatttgtaagaactctgattgtcatttctggtaatggaaatgggggccatgcagcccttgataaaaaaaaagaaagataaagactgccagtttctatagtgtgccgtgatactgatatgtgtgcagattataagccgcggctgttgtggttcctgcggaggtaaggatgaaggccctctcatctggtctctcatgttgaagttggtgatcagctaaggtgtccataaggaattgaagttcaagctgagcttgtctggatactgaattggactgtgcgtaaatcaatggcccacatattgtttatgaactgggaagatactgggcaattgatgtttgtgggaaaggtggcgagcattcggaaagatgtatgaaagcaacctgcttcagtccagtgatctctccagaattgaactgactggccattacccactgagacctttgttgaagcactcactgattccaccaccccacagattgtcttccaaactggtgtatcatctgatcttgtttttaacagcatctgaccctacaaatattgagattgtagccactgtaaacaaggattggatgaaccggagagcagttcatgcagctcagcaaggttcattgatttacaagtatcttcccagttcattgaccaaaatatgaactgaagtattgtctacaattaaacaaacataaagccatattaagggtaagacagtagacaaaaaaatagttgttagaatttgaataaattgaacatctaaggcagaagaagccacacccccactaattcaattcactgataaaactgaagcattaccatcatgggatggccagtagttcatcttgctcgctttgtggtatcatggaggatgagactatgatccatttagccaaagcgtgtcaattcttcatcaatagacggcaaatcgtattctcataatttggcctggatagaaagatccaattggcacaatctgtccaacaaagattggtggtatgcaccggtaagggagcaatccaaagaagatagaagattaatccatggataactaattaggacctgacagaatgtatagaaagaaagggctcgaataatgtttcaacaacatattattattagggaggagattagctagggggaataaaactaggaacgaatatttctagctgttatttttcttagttgttgcatctatttcttccaaattgtaactaagaacctctatgactgtgtatgtttctttctgttcttcttaattgaataggcagagctcctgctgttttttatttttagaagggaaaatcatatgatggtttccaacatgataacaaaatgcagtaccaattaactagtgcacgatctagcaaggccaggttttcccaaggtaacagtaggctggaaacgaaggggaggctacctttcggagagcgctggggttgggtgcattgcttgacaacccaccatggttgttcaagctccaattgttcaccgccagagaccttgccccttccagtccgtagagttggagaaggacagggcggcactggcggtccggcgctgtggttggagcagagagggttggactcgatggacagcgaggtcccgtctgcgccgcaccattcccgccgccgctaggtcgatgcgcggcgagccgccggcccgccgcgtcgcaccacaccgcgctgccatgagctagagtggtgtatccacccctcagaagttagaatccaggatggtcacgctgtctctcgtcccggtggcgctctcccctcgagcggtgcggtgcagactgcggaggacggcgcgccggcgcggtggctcactggcaggggggttaacgacgagtggcttcttgtccgtggagtcatgtttctatgggcttttcatggaccgggcccaaacaaataaaaaatgaaggaataagttcactatgggttcctcaaattatcgttgagtctgaaatttgtccctggaccgcaaaaccgcatacaatgtatcccccaactttacaaaaccaatgcaaacgaggtccctcaacaatattgtctccagatttgattgacatgacacatacgtggctcttttgattaggtttttgtctcacgtgacattgacatgacgcatacacgacagtttggtccaatctgaacatgttctttgggcatccacaatgtgcatgtaaaaatgaccttaggattaaagtaatatttatgttctcactttatgcattgggagaaaataaaaggagaaaaagttgctatggacaaccttaagcttaaggctacgccataaggaataaaaaaaaatcattttatacctttgtaacatccatattggtttttgaatcctgcatattaaaggttaaaaatatttttttatgtgggtcctaccttaaggttgagaaaagatcataaacattgtagcatatgttataagtgaaagaccatatgattgtgggtcccaccttatggtctatatctctactattataaaaattgaagatgtttttttatactttggtacgttattcgtgtatgagtcggtttctaagttcgttcgtttttggaaatacatatccgtatttgagtcggtttttaaattcattctcttttggaattacaaaaggagttgtataagaaatctcttaaaaaaactcgcatgctaacctgatatgatcagacttctaactgcagctcataattttctaaaagcatatatatgcgaattcccacagagaatttcactttaactaaaacgtataatgataatagattaaaatagcttgcaacgcacgggtatttgttctactgcacttaaacattgaggatgtccttaaggcaccaagatagtgctttttttttcattaatggaccgtgtaactgcggtaaataagtaattctgtcccgcgcggaggtggtgtggcgggagatgctggtggcgagttgagcccgtggcatagcagcctcacgacggaggctacgaggttggccttcatggccctcaccggcgctcgtgccgcagtgcacgggaacacaactttggcgatcaagcacctttgcggtggttcttcctggcaccggcgtggcgggatcttgttgcccattgactccatggaaaggttgcagttccgttactggttcaagtatatactgcctctttatttttattttaatgtatgatgccattgatttttttttcaactttgaccattcgtaattttcaaaagaatatgtaattatcatttattttattgtgacttgattcatcatcaaatgttatttaagcgtggtataaatattttcatatttacacaaaatttttaaataaaacgtatggtcaaacgataataaaaaagtcaacggtgtcatacattaaaatcggagggagtaacatgcatgtagggggagaaatcgtaaggtagaacccacatagcaaatcgagttaattagatcatgttattataaatttatctattttgaaaaatatcatcatcattcatttatttgaaaagatgccaccacaaacctcccaaaatcatatccatgccatgccatatgtctgagtgttttgaagcgttttttgtccatctttatttcatattttgaccaaattgcccccatgttcctccatccatttgcattcatgtcgaaacatgaattcggcaataataaaagggatagcgcacgagatctaaaagtggatggatgcggagacaaaggatttagacaggttcaggccctctcaatgagaggtaataccctactcctgattggggatttgaatccgccgggtgtattagatctgacgatcatatgtgctcatgccccctagagggcctcctgcccaccttatataggatgtggggcaagattacaagatacaaaccttaaccaatacggtatcggtttcctaaatctagtttacaatattatcaaaccaggactttaggccgttccataatatacaaggaaacgtaatacccaagtcatgatctgttacatattctatagatataagttatcccctatatctagtcggataaccatgccgtgtgggtatggggtacccataatctccacagtagcccctgagaccttcacagtcaaaaagataatcttctcttgaactagattattccaaagccaagtgctttaaccatctttgccataatctcccgaatacttttaccaaatccaaagattgtgaagggctgaaaaataattgaatgtaaatttatgtgcatcgagtagatgcacctaataggtgtagcccccgaccatgtggttagttgaacaaaccaagcatatagtcaaggaataaataatccaaccaaccgagtggtttttaataattatagtcaaccaagtgacttgatatcaatatatagcatatgcggtgcgaatccccaaataacatagcccagatgatataccgactgctttgtaaaaattgatgcgagcaacctaaagttgactacatcattgaaaattcacatagcaaaacagctataaaaaagcttgaatgctgtgaataaagaaatttccaaagtattgggcataagccatgcgcacactgcttcaacagatgtgcttaagtccctaaaagacacatggttttaccacgcctggaaatatacggcatatgtggtgtaaaatccgagtaaataaactcataaaggatttaccaaccgcctagaaaatgaccataatatataatcagcctaagccataatattggtcaataaaaatgcacacttacgtggcaaaaagcaatgatattgtatccaatcaattgcttaaaaacccaaacatcaccttgacttatataaaaaagtcagcggggcaactatataaagctttgctgtttgataccttttaagatgcattgtaccaactcctaaaaagttgagtaactgcggtataaaaggattttaaggtattgggcacttgatcacgcgcactttggcctaagcaaaaagtgcctaagtccttaaaagaacgtgataggccacacctgaaaatatgggctgcagacatattaggcctagaccaaaaaatatgccttcgacaccctttaaaggatgacgcatgtaacatgctcccgagtaataaatcttccgggtgatatagaccaagtgtagctcatatgaatagcttctgatctaagtgattatcccttatgggatactccaaaatagatataacaattgaatcccgactggcgcaagtattcggttgataacccttacagggaataataaatagtccagtctttgagcatagaaaatagacccatgattatgaattcatgttgcatgtatccggaacaagtccaaattggaggtatgatacttgtgtttgagctagtaagcccctgagcatatagcttgtccttctgtcgtagtcacaattgtccattgatggtagctggcgcagttggcatagagacaagacgaccaatatagagataatattgtctaccagaggtggcaaaaatattgatggtagtgaagatagtgataccaatctaaagtgatgaagttgcacagccgtggaggcgaagaaaccagtcggcagcagtcaggtcagccagcaatgaatatgaaggtgcccagtgataaagttgtgtagccatggcaacgaaataatcagtcggtgacagacgagacagctggtgaagaagataaagatgcccattagtggcgacataataagccatccgtgaaggcgaggataccagtcggtggtgacgaaagcaagccgacagtgaagatgtagacacgcatcaaaggcgatgacgaaatccaccaatcatgaagatgaagaaaatagtcggcgacgacaaacacaaccgacagtaatgatgataagcagcaacagagatgatcgactatgaggacgaagttgcccatcaaacagcagtagaataggctatgttgaagaggcttggcaggatattgataaagatgacgatgtcggtgatccagtcaatagcagtgtagcaaccaatgataatgacgaatacgctcaccagcgtttgcatagtaggtcaaccgtgaaggtgaaataacaagccggcaataacggaagcaaccggaggcgaagacgtagtcatccattagcaacggcagagatgtcagagccgatgaagtagaggtgttggtgatgaagtcagtgacaataatccatcaaactgttgagaagatatcaaagctcaagtaattttcttgatgtgtgtataacgaagattgatgtaacaccccttgatttgtaaagatggtagtagaacttggagttgtagctgttgcagatgcttcacttgaaggaaagtaaatgttgttgtccaactcatcgaaactgagctgattggttgataactctaaactcccggacatgtagatagaatctcaaacttgatacttgaaaattttggagtagattgtggcggcgtagagaagccaaaattaccagtgaaatcattggagttgctgaagtagaacacttgctctgaagcgaagacaaaacttataactctcgaagtagattccatagaactcgttggctgatttgagagtcttgtatttgtatagcccccgactctttggttagttgggaaataactgaacatagagtcgagaactgcagcttcttgtcatcgagtagtcattgcaatcaaaagtgaagatgcatgttgaagatgtccgagtaaaaatattgaagatttgaacaccacttgttgtagtaaaataatacggcatcatatttggtgacgtatgccgaggtgtcgaagctcttgtagacgtcgtggctggtgaagtagcaaaacttgcgaagtagcggcaattgagttggccggtgccgaagataataaagatgaagtccctccaccatggtgacaaagttgcaaaggcgtgatgaagtgaacacgagtcaacagcaacataagcaaaccggtagcgaagacgcgtggttgtgaagataaaaacaccagttggcggcggcataaccagtcggcaacggaagaagtagaatgatgatgaaaacgaagacgttctttaacagcggcaaaataggccagccatgaaagtgaagacaccatgggtggcgccgaaggcaaaccggcgatgatgatgacgccagtcaatgatgacgaagacgcgcagccgtggaggtgaacaagccagtaggcgtcaaacaaggcggccagcaatgaaaacgatgacgtccatcagtagtggtagcaatataaaccagcagtggaggcgacgacactaatcagcagcagatgagacgaccggcggtgaagacgataaggccaatcaacactggaagaatcatgcagccatggaagtgaagaaaccggtcggcagcagacgcagacaacttgtgttgaagatgatgacacctattagcggtggcagcgacatggctggccgtgaagacgatatcaccagttgtcgtcatacgaggcagctggtcggtgaagacgtagacgcccaacaacggcggcataataggccagccgtgcaggcggagacaccagtcggcggcagcgaaggcgagctggtcagtgaagacgaagacgcccaacaacggtggcagaataggccaaccgtgtaggcggaaacaccagtcggcggcagcgaaggcacgccggcggtgaagacatagacgcccaacaacagcggcataatagaccagccgtgtaggcgaagacaccagtcggcgacggtgaaggcaagccggtcggtgaagacgtaaatgcccaacaatggcagcataataggccagccgtgcaggcggagacaccagtcggcggcggcgaaggcaagccggtctgtgaagatgtagacacccaacaacggcggcataataggccagccgtgcaggcggtgacaccagtcggcagcggcgaaggcaagccggcggtgaagatgtagacgtctaacgacggtggtgtgaccaaccaaccgtatagacgaagacaccagtcggcggtgacgactgcaagcctgtggtgatgttctgactaatccattcctggagtgtaagagataagcttaaagccatgaatcctttttatgcatatctggatctggatcctgcagaacaaatatataggatgagtagtatctgatgcaaatataatactcgaggaaaatttaagtattttaaaatgtttataaatatatatttctcctattgtcaattttgatttccccgagcagatgactccttacgtttaaacactctgcccgactagtcatagcccccaaacattgggagtcggcctaggcacttcccaaacatgcatatgagtgacatgagttcgtcattagtggaacaaagtttcatggatcagagtttactacttaggtacttttgcaattattaagagtagaaaataaattatcttatctctatgcttttgatttcttccgagtaatacttagcaccttgcgttactcggtccattcaacgagcccccgggtgctaggaatcggcccaaaggcaactatccatcgacaaaccaaacggaaagtataggaagatagaactccataactcgataggcacttttgtactcagattatgtcgcaagcaatcaagataaatattatgaaaattgtttaaaaaatatgatataacatctatagccctcgactcactagtcaacggcgaaccagttgatatagtgaggcagaggaaaagaaaaatatcatataaagaaaattaatgatgacttagctttgtaatattccccttgatgatggcagaggtggccaatgtgggaacaaagtcgtccgtcaataacaatgaagacaccagtcggcggcgaaagaaggcggtcgacggtgaaagcgaagatgcccaccaacggcgtcataatagaccagccatgtaggcagagacaccagtcggtggcggcaaaggcaaaccggttggtgaagacgtagatgcccatgaacggtggtgtgaccaaccaaccgtataggcgaggacaccagtcggtggcgacagagacaggccggtgaagtcgtagacgcccaacaatggcggcataataggccagccgtgtaggcagaaacaccagtcggtggcgatggaggtaggctggcggtgaggtcatggacgcccaataacgacggcataataggccagccatgtaggcggagacaccaatcagcggcggcgaaggcaagccggttggtgaatatgtggacgcccaccaacagcggcataataggccagccgtgtaggcggagacaccaatcggcggcggcgaaggcaagccggttggtgaggatgtggacgcccaacaacagcggcataataggccagccgtgtaggcggaaacaccagtcggcagcggacgagacggccgggcggtgaagacgtagacgcccatcaacagcggcataatagaccagccgtgtaggtcgaggcaccagtcggcggcggcgaaggcaagccggctgtgaagatgaagatgcctagcaatggttggaaaatgctaggatatgtcctcacacatgtttgctcccaatctgctcgcacgcgtgtatatatgtgcatacggcagagtgcaaattatgagtgtgagcagctcgctccagccagatcagggcgacgtcagccggatggataggccaacgatgatctcacatgcaaaaaatacccaatatattaatcagactgattaggaatagcaattagcaataacgtatagatattatatgctatatatattgatgtatgcatgcagcatatacgcatactaatttgcatgtccatgcatctgaaagtattgcactccactgtgcttgcatctgcccctgtaaccaacagtccttcagcatgatgccgtcgtcggaggtaatcatggagccgtcaaacgccagtatatgcacgcgagagaaaacgaagaatcaaagggcagatcaatctatgattaaaaaaatcataattataataatagattggaacgataaattagccgatgccggatagcagtttttatccatgcatgcatgtgtttatgcgtgtagatgcagagccgatccttgcgtgtccaagtgcatgtgcggacggatgattgctatcccggcgagtagctgtcttcacacggctgatagatggctgcggtggatgacgcactgctacacgcctccgccgaggcgccgagtccgcgtcgaactcgaagcgtccagtttgatctcagcaatcaatctcaccgagcataacagaaaacggcgatgacgacgacgactggatcggaggctcgattgctatccggtgcgtgtgaacatccatcgctccagcatgcctgtccagatagcagtggtgactcccgtggccgacctccatgcagagcagtacgatcaagcagggttgtgcaggctggtagctggagacgtggccgatgatctcttggatacagatgattttttttggctacggactgtatagcagctccagccggcatcttggcgagctgcatcttgaggattcaccaccattggtgacgtcggagattggagtgatccaacttgctgaggttgattttccttgctagattgaatctgattcggcgccttctaattggttccatctcacttctcgtagataactcgacgcacccctacctagcgcgccaactgtcgaaacatgaattcaacaataataaaagggggtagcgcacgagatctaaaagtggatggatgcggagacaaaggatttagacaggttcagtccctctcaatgagaggtaataccctactcatgtttggggatttgaatccaccgggtgtattagatctgacgatcatatgtgctcatgccccctagagggccagaactttaggccgttccataatatacaagaaaacgtaatacccaagtcatgatctgttacatattctatagatataagttatcccctatatccagtcggataaccatgccgtgtgggtatggggtacccataatctccacaattcatgaaaaataatacggaaaggtaaaattccaaacttttgcatacacgggcaaaaacatccgtacaattcgacaaactaatttgtttcaaattgcaaacaatacgcaccaaatctgggtaaaaattacacataggacaaaaaaaaaagaaaagaggaaaagaaaggagctggcatggaggtctgccatcgacgaccaccgcccgacctcgctgccgcaggacacaccatccccgacctggcaacctcgatattgctgaatctgttcacaccgttgccgaaccagcggcttgtcgtcgtccccactaccaggcgcacctcgcctgccggacttgcagaccatatgcaaacccagccttcgttgccgccgtcgtcgcacttgtagaaggaaacatgggtgttttggtctttacagaaatacggtagataaaaacgcatcaaaatgtcaaaatgtgttgcagccgtatggcatggcagggataggattttggaaggtttaggtcttgttcggtttagagcggattgaagagaattggaggggattgagaggaaataattccacaccgcaatagatgtggaataaattcccttcaatcctccctcacagggatcaaccgaacaaggcccaaataatttataatattattatcaaaacagacaaatttgcagtggcattagagcaagtttaatagtatagcccactactaactccaaatcatttatagccaatgtaatagccaattcatacaatagttgttcactatactattaatacctggtccacctgtcatacacacgttacgtctttgagtccatactgcagttggctacagatctgtagctcgctgctcttttctcactctttctttatctctttaaaatatgtttatagctggtttatagcatgctattgtatctgctcttagtgcaattaacccaagaagagatgggagagattagggatgaaaacggagcggatagtttccgtccattctggagagaaacgaatacggataccttcagatcggatagttcggatacaaatacggatatttcctcccggatacggatatgaatatgatatcggggttttcgtcggatacgaatagtaatttggatatccagtgaacagtgctattcggatatctatagaagtcatgagacatacctcatttgtttacaactctagaccttcaatatacctttttagattttaatagtagttcatctcttaacactagcccacaatattaatattatttaaattttaaaaatatttataaattatactatattttatataaaatgaggtaattatatattttgatatttgtttctattagaagttgagttggtcttcgtgttccgagaaaaaaattgtttccatattcgtgtccgatcatattcgattcttattcttattcgagataatccatatttgtttccgtattcgagctatccgtattcgtttttgtatccggtaaaaaaaatatgaaaacgaatacagtatgagcattatccgttcgtatccgctccgttttcatccctaggagagatgggggtgccagtgcccggccaaagaggagaaagcagagaagaccgtgacgtgattttcttgttatcgcattgcatcgtgggctggattagagcgagcgactgatgtgtaacactgaaattttcgaatataaaactttagaataactaaaaacctttttcaaaatttgaataatgctgatattcactggattttcctttttctcttcctattgtgctagtgccaaaaattaaaataaataaattcaaaagaaattaaatccaaattttaagttcaaatattaaattcaaacgtcatttattaaagcacccgttatttaaattaaaatcctttagggaaatattatacagataaaaacaaaactagtttcaaagtctaaaccacaccttgtccaaacccttagcctatctctagtctagccgagcacccttatcttcttcctccatttaggccggcccatctagcagcccaacctaccggtgggcctgctctgtctcggcccagcctaccaagccagcctggcgagctgcgagatgagccaacccggccagccaccgtcgtccttccgccgctgtcgcgctgccggagtccggggtgccgctgccgacggaatctacccaacccgttgtacctcgccaccgccgccacgcgcccttgcgaacggtagatgaccgtccctccaccttttcccctggccgactcgccatgccgcgtctcgacggcgtccatcttgctgcaccaggagcacatacggcagcgcaggaaccgtgccgcatcacctgccacacgaaacatcaatttggcataaaaagatcaaccacacgaaagtacgaaactgctgctaatgataagattagtgtcactgtagcatacgcacattattctgcagcctatcttctccttacacaatacagtttcaggtgcaggttggttatctgaagacaaagtcggtgctgataaggtaggttgcagtgagcaaggcctcatccgaaaagcgaacgagaagagttagccaagtctctacaatgttgcaatgtgcatgtgggaacacaaacgatgtgcaatgccaagtttcagaatgaatttttgcaaccttcaagtcaacatcaaaccaatcagtctgattgagcagattttattatttggatatcgttgaacatatgattgaaactgaatgaacaaatgctccagtcttcaagagaacgatatacccatgtgaatctgttaaaatcatcaataacaatatgtttgcccctttctgttttattgtccactgaagtaaacagtcagtcaattacgcctgtgtcccggtagcacaacagtgtcttgtttgaaaatactgtaagcaactcatcagagatccaggaattagcatcagagaaggtatgctgcagatgtgtacggagaaaatgctcttaacatctactactaaatactaatacctcaaggcatgctgcagtcagccttgacatcttgacaaagttactagcagccttgcaaaacttcagtgagtgaacagattctgaaaaaaaaaaatcagcaaaaggtggagttattgggacaagttcaaggaatggatgatcttcattctgtacatttgcaatttgaagatcaattcctttcttttccacaagtttctgcattttcacctccctgtttcatttcttcagtcccaattcaaattgatgcagcagctggcattcggtcagagactgcaattcaagacattggcacttattgataaatagattactctatttatcttagtaacatccaaattcagaaaacaaaaaagacactgctccttcagtttgattgccttccaaaattaacaatactttgcccatcattttcttcttcttacaaaaaaattccttcaaaaataagaatgagtaggacaagcaacagtttaaatttctgatcgaattataaaactgatcaaaacaagttccaaatcaagctcgaaacactagttatctgaaaaaactatcacaaaaaagaagccccgctgctcgcgcgggagcacgcgtgagacatacgctgtctcacgctgacgtcggcgcgtccaataaattcaaatcccaccttactggaaatatcccacgcgcgcatcctccactcatctcctctcgaccaagatttcccccaaaaccctagaaatccccaggcggcggcgcggcgcgcgatcgggggatcgagccggcgatggcgggcgcggatgggctccttcccggcctcaggttcgaccctagcgacgacgagctcgtctcccgctaccttctccggcgcatccagcagaagcccctcccgctcgacggcgtcatcgtggatgccgatcccctgagcgtgccgccatggacgcttctcgcggatcacacccgaggcgacgaggccttcttcttcgcggaggcacgcgccaagaatggcaagggcaagcgacagaagcgaaccgtggagggcggagggttctggcaggggcagaggatggccgtggatggcgagcggctggtcgtcccaggcgacgatggaggcggcggcggcgacgaaggcctggagatcacgtggcgcaagtatgtgttgagcttcttcgccgagggtgaacggggcagctcgggctgggttatgcacgagtacgccgtgacgtcgccggctgacctcgcctcgtcgcagctccggctgtaccgcgtcaggttcagcggccacggcaagaagcgcaagagggagccgcagtgtctggactcccacgacgacgacgacggcggggatcaagaaagcgcgactcaccggcgcgccgtggctgagaccactctgttcgacggatacgtgcctcgtcctgcagccgacggcaccgaccagggcacctatggcgtgatcgacggcgaatcttcgctggcgtcacattgtcttcccgatcagatcgttcccccagcagaagaagctgatgccactgctggtgtagagaatcctctgctcgatgaggagcgctggtcaccaccacagcccgctctggtgaagcagaactcctacgacctaatggccatttcgtcactgctgttttctgatcttcccgacagaatcgatgacgatgacctgtctgtgtcgcaaacagagggcaccgagctgtccgagcagggctcctccggcgtgatcgacgacgattattggcgggtgttccatggactttccgacctgatcgcgctgccagcagaggaagccgatgccaccggtggtgcagagagagaagagatcgctctgctcgacgaggagcgctgcccgcaaccacagcccgctcctcctactgcagctctagtgccaccactgcagggccagagctcctacgacttgatggctgattcgtcactgttatttgctgatcttcctgggagcatcgatgacgatgagctgcagcgatctctgcgtgcgtcggacatgcctgaccagttcttggcgcagacagaggaagccggtgccggtggtggtggtggcgcagcggcagcgctgaacaagcagagcaactcctcaccgttgggcgtcgaggtgccgatggcgttgtctgatcttgagtccccagagagcatgcctttgtctgatctagagttcccagagagcatcgatgaagtgcttagttacattgacttcaccacggatgatacgagctgcctcgatttcgacatggacgagctgttttccgacatgccagcagactagcgccctgcagagagcaagtgatcaacgctgacattgtcctcttaggaagagatcagagcaagtgatcaacgctgacattgtcctcttaggaagatatcagttcttcttcctctgtagcgcagtactgcagtctgtgcagcggccagaagtttaggagttttgtgtttctaccctggaattacatgtatttattagttcattggttcaattgaatgtaacatgtgatttattagttgaggttgctgttgatttctatgaattcaatgtaagtaataacatccatgtacaatgagtggtgcacattcaataaagctctgtcattcaaattcagaacagagtacattagtttatactgaaagtctgaaactctggttttgttttcttctctgcttccttttcagtttgcacacactgtatggataaaaaacgaccaaatgttgtgatccttcaggacacagcatggatgtaatctttaacaaattgacaacaggctccaaaaagagcattctcagattcaccatgactaatgcttataaaacatgcaccgttgttactgaattattgactggagtgatacacgcaccaaaaggctcatcctcacacatcacaggcattttggcctcaatggatgacatatgaataaatgatacgatttcagagaatatagaacaaacattcataccacatccttttttatttgcactgtgaatgtcacctacatgagtgccaccgacaccctagcacttttcttgcatacagttatagaaccaacatgctaggagctacaaaacagagctgcagttcccctaacttatgtcagtactaggatgtatactgacaagtacgtcctacatgatatttacatttactgaagattgtacaaaacaaaaacatggagcatcttcaagaatttgcaacaactttgttggctccaatgcaacacgatacaacgatgctgcaaaactgattaatggaatgattccttcaaaactgattaacagcaaactgaggtcctgtggaagtgcttgttcttgaaaaagagtgagcaaaagtcttgtagatcctagccagatgactatcctcccatcatctaatgccagcagcgctttacattgtactgggatactctccagttgacctcttgtatcttactagcagcactgtgtcgagtgacttccaccttccaccaagtttaatctcatcatcttttgcaagctgaagtatttcctgcaattaaactaatataaagccaaattgagggtaagacagtagacaaaaaaaaaagttagtatttgaacaaactgaactagggcagaataagccacacccccaataattcaattcactgataaaactgaagaatgtggttcatcttgctcactttgtggtatcatggaggatgagactatgatccatttagccaaagtgtgtcaattctttattcatacatggaatcgtatactcataagttggccttgatggaaacatccaattggcacaatctgtctaacaaagattggtggtatgcactgggaagggatcaatgcaaagaagatataagattaatgcatggatacctaattaggacctgacagaatgtatagcagggaagggaacgaataatgtttcaacaagaatcaagaactgacatgcaagtggcacatattatcagggaggagattagcccagggggaattcaaccaggaatagatagttctagctgttgttttcttagttgttgcattcgtttcttccaaattttggctgagaacatgtatgtatatttcttgtatatttctttctgtttttctcaattgaatagacagatctcctgcccttcttttattaaaaaaaatcacactcatgatttccaacaaaatcagtagcacagtaccaatgggcatcagcagagtagttaatattgaactaatctaaaatggccagattcaagtactcaacagatcaaaaagggtttattatgcatgagattaccaaattcaacattactagcgcacaatatagcaaggccaggttgtcctatggtaagctgagagggaaggggatgataactgctggagagcgccggtgttggggccattactggaaacctgccggagaccttgaagaggactgcgccaccggagacctgcttctagtcagtgccggttcttggatataatacttatgcacagagtcctataggtcctagccagatgactattctgtcatcaatcatataattctagcagtggctactcaatctctagttagcctcgtgtcccttgccagcagcacttgtgcagagtgacttccaccaatctcctcatcttttgaaaactttactctatataattaaacaaacataaaagcaaattgagggtaagcaattagacagaaacaatgttattagttaccagaatgaattgaacatctcaggcagaagaggccacactccactagttcaattcaacgataaaactagggttaactaaggaattacagttaacagttatagtagatagtactttcaggtttcaacattgtcagtaccaattagcacctcatcggtattgaagtaatttagacactactccgtttcataatataagtcattctagcatttgtttcataatgtaagtcattctagcattttctacattcatattaatatacttagctagattcattaacatcaatatgaatgtagcaaatgctagaatgacttacattatgaaacggagggagtaccaaatttaatagagacaataataaatattcaaaactgagagaataaggaggaactagctagtgcatcatcgaggaagaggccaggctctcccatggtaataagctggaattgaagggggaggctaccttgcagttgcagagagcaatttctttctcctctctatacacttctcccctacttcccctatcagccattgccgccgacgaagaagcttcggttgggtggtagagcgggncggagtggggggcggcgacgggcttacggcggcgcggcggatcctcgcg

SEQ ID NO: 5958 - DNA, 12603 bp, Oryza sativa
  unsure (1)..(12603): unsure at all n locations
tttaaccaagtgaaaattaatgcttttttcgtcctgtgatccctagtgaaacaatttaaccaagtgaaaaaaaatgcgcaacactttcctctatcataacacctgacgttttacaccgaatcgaaggcgtgatacgtcaattaagagatgtgcccatgatgcatggataaaaatcctagctagcttcgtactataagaggacgccacgtcatctgttaaactagcgtgtttatatatatatatatatatatatatatatatatatatatatatatatatatatatatatatatatatatatatatatatatatatatatatatatatatgaaagtcgatttttttccacaataattaactgcattgatctcggtagctacgccacccacagaatttaaagagcctaaggagcatgggtcatatattctgccgaacgtcgttcttgctaaggttgtatgtcttttttcaacctactcaagtccaaaccgttggggccctttaaaggttctaaccatggagcacgaaggtcccaaaaacgcatagtttcccctccaaaaataacctctcccgttggggaacgcattagatatttacctaaacctgtgggtccttgggcagatcccacattagctccaagacgctgatctctaactagaaaagtaaatgcttgagcttgaaaagcttctggcccagtaggtccataaaactcactcggataagctgtattattaaaccagacaaaacaacaagcgataaaaccaaagacagataaagcgcctaaactataagacaagtaagcttctccagaccatacaaatgcacggcgagcccatgcgaagggtttggttaagatatgccaaattccaccaaatacacaaatgaaacccaaccatacatgtcccccaattatatcttctaaatcatccacactaacaatccaaccctctcccccaaaaggggattttagtaaataaccaaatataacaccggggctaagggtcaaattggtaatttttcttacatctcctccccaggagcctaggtatcatatataccgccaaaataaagagctttgagtactagaagaaaagcacctatacctaacaaaattaggtgaatacccaaaattgtagtcattttatttctatctttccacacataaccaaagaatggaaaagattcttcaagagtctccggtcccagaagcgcgtgataaatgccaccgaagcctaagactgcggaggaaattagatgaagtactccagatacaaagtacggaaaagtatctagaaattctcccccgggccctactccccaacctagagtagctaagtgcggaagtaaaatcaacccttgttcatacatgggtttttctggtacgaaatgggccacttcaaataggttcattgctccggcccagaatacgattaatcctgcatgggctacgtgagctccaagtagtttacccgacaaattgataagtctggcattcccggcccaccaagcaaaaccggtggtttcttggtcacgaccagctaaaacaaaagttccattaaagagcgtttccacgtggtagaacctcctcagggaatataagattttcatgaggctgatcctgagctgccatccacgcacgaataccctcgtttaaaagaatatttttggtgaagaaagtctcaaattcaggatcttccgctgcacggatttcctgggaaacgaagtcataggcacgtaggttcagagccaggccgactacgccaatagcactcatccataaaccggtgaccggtacaaatagcataaagaaatgtaaccaacgtttattggaaaaagcaacaccaaagatttgggaccaaaagcgattagcggtgaccattgaataagtttcttcagcttgagttgggttaaaagcgcggaaggtatttgcaccatcaccgtcctcaaatagagtgttttccacggttgccccatgaatagcgcatagcagagccgcacctaatactccggcaactcccatcatatgaaatgggttcaacgtccaattatgaaatccttggaagaagaggatgaatcgaaatatcgctgctacgccaaaactcggcgcaaagaaccaaccggattgccccagtggataaatcaggaatacggaaacaaaaacaacgattgggccagagaatgaaattgcattataaggccgcaattgaacagaccgagcaagttcaaattgacgtaacatgaaacctattagtgcaaaagccccatagagagcaacaaaagtccacagaccacctaattgacaccaacgagtaaaatccccttgtgcttccgggccccatagtagcaacaaagagtgtgctaaactattggcaggggtggaaactgccgcggttaagaaattgcaaccttccaaataggaactcgccaatccatgggtataccaagaagttacaaaagttgtccctgtaaaccaacctcctaaagcgaaataagcacaaggaaaaagcaataggccagaccatcctacaaaaacaaaacggtcccttcgtaaccagtcgtccataatatcaaacaaatcattttcttctttagtaactctaccaagggctatagtcatagtgatcctcctattcaattacttcaaccatttccgagcaccttatatcacttccaaggcatacgatagattatctgtggacgattttttctcgttcaatgccttttttcaatggtctcgaagatagaaattttgcatttttatctatggggtcacagccgaggtcgtggtaaatccatgaatttgattcaattagtttttcttatactatagaaataaacattggaattcaggattattccatgattcctatttccaagaaagcctattttttaagggaaaaatgaaaaaaagtaacctctcttttcccactcgctctctattgcatgggtataagaacaaaaataggattctgaaaaaaagtaaagatattgaaaagaaaaattgactttcgaaatccatttttatgtgtagcggaaaggggttgcgatttcttcttattcctatagaacatctagtaacaagaatatgaaatagtaaatagcgagaaattcttgccttgcgtggtctaagtctaaggaaatacaaaaaaatccacttatacaatttcatctacatcgaatttatatatcagaatagcggatagaggcctcattcaaggagtcaggtccacttactttatctttctttccaattttatggggtgggttggtttgataagacccctttttgctttgttgataaataataaaaaaagagtttttttctataacctgcttgttttattataacaagtcctatatggaaatgcctgctgaagagaaaatctatctgattgtcttttagccaatatccaattttagaattagaaagaaaaaagaagaattttcttcttttttttattaacattaagaaaaaagaatataactaaaatggaattggcaatataatttttttgaacttttgaaagaaaaaggaaggattttttgcaatcgttatttcttgcctctgtcatatcacggaaacctttcgatttggaacggggagagatggctgagtggactaaagcggcggattgctaatccgttgtacaatttttttgtaccgagggttcgaatccctctctttccgccccctcggatcgtttgggactttcgaattggaaggaattctgacccccggattttctcgtagataaatgtatgaaacaaatccaatttgtaagaaaaaattttggatttttactcgtcacgcccaggattacgtcctggatcattagataagaatccaaagataaagagggaaacaaagaatatcactactgtataaacaaaaagtttgagagtaagcattacataatctccaagattttttttaaggaatagattacccgtttttccttaccacacaaatccactaggatgggttttgtttattttgacacctaaaaatgcaaaaatcaatttttgaaaaaaattgcaagaattgatttataataagcactcttatcaataaattaggttaggtattgtgcggttacctaaagatacctgctcaacgtagatgcagggagtagaaagactgatccaaatttattgctgcagctatacattcaatgtagaagaatttgaattttagaatcgaaggttcataatataagacttctcggctcttatccatatttcgaatttttttagaatgaatacatgattcaatttggcagacagagtagtaaagatttcatcgaaaacttacagcagcttgccaaacaaaggctaatagaaaaaagagtacaggtatgacaggcataaaatccacgattgggttgaaaatggcataagcttcgggcaatttggcgaagaaaaaactagtcggataaataatagaattaaaacaaatacaggttaaactaagtatattaggcataacaagcgtttcgttcttgtagagtagataattggattttgattgagttatttttctaagggaaaaaggaaaaggaggattcaaaatccttttttcttcggactttcccaaacacaaaatacctccttgtattcgcactctcaaatgagagtggaagaaattcgactttcatatatatatatatatatatatatatatataatgtggcaatcgatcgatctcatcatttgttagatgcattatcacttatctgtgacttaatttgttaatgtaactttcaacttactttctctgtagtttaaaaaatatattctaaaacgaagaaagtacgtaggtggtaccactggtacgttgtccaggtagagcacacgtgggcaatggcgaagccaagatttagtgatagggggtgctggccacgagatgcaagaactcaccagcgcctcggtagacaaaagtgtggatcttgatggctcagttcatgctgagtggcagattgccctcacctcacctcttgttcgcactaatatacgtggtcgccaaagaatcattttttaaaattaggcaactaaatagcaccaaatttactgaatacatgaatctattcatccttttttagttttggagacttgcaaccgcatcgcttagttgcattaactcaggtaatcacgtattggttagttatgtataggctcaacttgcaactaactaatgagttaattgtatggattagatgcctaatcaccgggggtgcatggggatggggggtgccaggcccaccctggcaccccggtggcttcgccactacacgtgggaacgaaaatgtatatgcgtgctactttctccgttttaaattataagtcgttttgatgtcaaagtcaaattattgtaaatttaacttaagtttagagacaaatatgttataatatttacaacaccaaattaatttcattaaatcgataattgaatatattttcataatatatttgtcttgtgttaaaaatgttactatttttttctataaatttaatcaaaattaaaacagcctaactttaatcaaaattaaaatggtttataatctaatacggagcgagtagataaaaaagactctgatatgcaagttgtacgtcgactagtcgtgtgtccacctgctcgatcgcttgaccgagacatgtcatctgtgagtagatttggtttcatcacttggtccgcaagttaattaaacagttaactaattaattaatttgctcgatttgcgctggcctcgggcgtcctcgacggctaacccaacctgattagtttagcgattaacctcgtttaattcctgagttacgtgtgctctgccgagagattaaaagcgtattaattaatactccatccgttttttaatagatgacgccgttgactttttctcacatgtttgaccattcgtcttattcaaaaattttatgcaaatgtataagatataaataacacttaaagtactataagaaataaaataactcataacaaaataaattataattatgtaaatttttttgaataagacaaatggtcaaacatgtgagaaaaagtcaacggcatcatctattaaaaaacggaggtggtatatattaatcgagtaaccaatggctgcctcgatctgtcacgtcatagatcatctttctttgaccttctttcacattaattttccatgtacgcgtccacatcagctaacacacacgtcggtgcatgttatatctttttctttttttaaaataaggatttgaattacaatatttgcgtcgtagggttaaatttacatgtatggatgaaaaccaacaaaaattccgtttccacgtgaacgaattaaccacgtatattaattatagtagagtatatttagtttgttttcgccggtccagcattgtagctagtatatttgcaaattaagtacatggttgatgcgtacagctgcagcttcgtcccgatgaggacaaacaaataccgtcagtgatatatatagtacatgtgctgttgatgccgacctttgccaaacttaatccatctcgacgtaattcactctctccgacttatattaaagaatctttaacttttctctaagtcagcttttttaaaaaaaaattaacataatttataatatttctaacacaaaataaacttactacgaaaatacattcaatgctaaaaactaattcagggttatatgttgctattttttatgtaagttttatcaaattttaaaatgttatatatatgtcttatattgctaaactgatcgatggagtatttctcctgtgtggctatatatacttgcctcctactagcactctacatctcctttactgatattttgtgtagccgtctgagccgtctgagccatgcatgcatataaaaatgtaggaatagtaaaaacataagaatattataggaatgtatgtgtaaaatagagaaataaaaaatatacgaatttcttgttcttcgtgcgaagaattcttacaacaaagagggtagatcgagtggactatttttatgtgaaaatatgggcaaccctttgaaatgaatgcatctacaagatctaattcaaaggaatcatcaatcctctatttttctatttttccttcacatttcctcccttcggaatgagcccttacggcttgtttggttggagggagtttttagaagggattgggagtttagagggatgaggctataagtgttttgtttggttgggagacatgtgaattttggtgggatggggatggggaattgaggaaggaactccctccttttcaatacctgggtaggggcaggtaattgggagagaattcctcatttactttttctaagcaaatctcagccatccgtttttattaatgacctaatctccaactaaactccctatcaatttctatcacctctccaaacaagatattaggattaaaaatcaaattcccatcttaatctcatcatcaattccctcgtgtaaactcccgatccctttccctcgagttaccaaacaagccgttagtaggcagtagtaggagtagaagaacagccagttacccccactagctagtaggagtacgtcttgtacgtcgtatgcatgcatctgatcggccgaattgagaaggatggatgtgtttgggtggagggggtggagaaaattaagaaggatacctaaaacaagataagtcatagcatgttattaattaagtattaataatttagaacttaaaaggaacatattaatataattttttaaacaactttaatatagatgtacttctttaatctttataaaaaacactataatctcctgtatcacgggaggcccatcgatcgtaggatgtggtgtcatgtatagtagccaacccggccggccagtgcgtgcagtgcagctagctagcttgagcttgctacagtatgcgtgatccatccagatctcatctctcggcctgccctgcccctacgcacattgatcaggatcactgccaaaccatgacaaatctgctgcaagtgcaatctaccaatactattgttcactgtaccacccttatcagtatctgcattctgcaactctctctgcattcagtaacagtaacttcggaacaattgattgtactgtaggggtgggattgtgattggaaaatgaatgaagggttaggattaaatggaagggggagaatgaatagttaggatttaatgatgttttttggtgggtgggaaatcatttccctatctcatttgcgcctaagagtaattaattaacaaagaactatataatcgaagaccaaatccacgtctatattgggcctaatactgtcctggaaattaagttgggtcggcatcctcggtgttgatagttatagcccagtagtacatttgcggcccactaagaagccatctccggaagcatcgagaaggagaagccatcgtcaatctcatcctcctcgacgaaagaaagaggagcagaagcagataagagaagcgcctgtcctcctctccggcgaagcctctgcctcctctccacttcttctagaaccttccgcgcttccgtgctccccaccgccacctcgcccgctcgctgtccccagatggccccctccctcctagccgccgccgccttgccctttcttctccacggcgccgccgccgccagtggcagccgcaggccgcttgtcgccgccgccgccaccggccgccgcgccgcctcctccctccgagtcgccgccctcaagtacgacccttccaaggtaaccgcattacgggtggctcgagttcgagttccaggggtttgggggggtagggttctgacgtctgtgctaatgtgctatctggtggtggtgttgttgttgtccaggtggcgccgcagtccgaccgggtgctcgtccgcctcgaacagattcctgaggtatctcgtgctccattgcctcgcaatgccctttaatttgctctgcattttaatttgttagttcaagcatttcagttaattgcttagccattgtctgtggtgatagctattctgaatgcctctagttgagtgaatcctttgttgatgtagcgtgaatcgaaacatctaggtttaggtggaatgctggtaatggtgcagaaatggtaggaaggttgtgactagggagtcagtttttacatatttaatttcactaggattaggcttcaattatcatattttggcactgatacttgcatagttgcagatatattatactccctccatattttaatgtatgacgccgttgactttttaatcaacgtttgaccattcgtcttattcaaaaaatttatgtaattatcatttattttattgtggcttgatttatcatcaaatattttttaagtatgacataaatatttttatatttgcacaaaaaatttaaataaaacgaatggtcaaacgttgttcgagaagtcaacggtgtcatacattaaaatacggagggagtaaaatgtaatttgcctgcttttcagctaatgctttttcagttatgttggaacttgtgatatattatctaggaagctacatgtttaggtagcataagaaaattttgaattctggagtggtgaagaatttatctttaaacatcagcacttcgttatttgtcttacatagcgccatttgtttacactaaactttgaaataagttaactacagaaaataattcaggtgatccagttagtttcgtgccaaaagactgcagaatgtaacacactgttcagctatcactgggtcactgggtgactggattgtctaggatggctactctttttgtccgctatggcaaataatcattatcatagcattttatgaggaaaaacttctgaaaattttcttcggccaatctacagatgcgtatttccatgaaaatcatgttatggttattctgaagttataggcatagtcactaggagtagattatcttgtaacgtagcttattcttataaaacttttgacgcctacagaaatctgttggaggagtcctgctgccaaaatctgctgttaagtttgagaggtatttgatgggtgaggtaagatcttacattgccatgctctactcttataattgttaccttcaccgggctataattccttaacatcatactatttctgctagattttgtctgttggtgctgatgttaatgaagttgaagctggaaagaaggtaaactcttaatgcatgttccgagtgtgtatgtacgtcaacaaaggagaattctatgcttgcaaaactttgacatattatattcacttctgaatagcacgtaccagattgtatgttattgcctgtggtgttcttcactttgcatagtacttccatgtactgcactactacatttagattagatgcaggggggatctctaatgacaatttgttctttatgggtataactaaatttatgataacttacagtttgcgccagatttggttttatgtgtagttacctgcagaaattgtaattgctgtaagcttcatccattagaaaatgcaatctgcattttaaaatacttcccttttagtatagctacttcccttgatctttttggtggcgagaagtgagcccgccaagcactgctgtgggataacacagtagaaacttaagtgatactcggattgtcgaacattgaaatcttaaaatcactaatatatgaaaaggcatcaatattacattagtaggtttctcatatatataaaggtgcaatatcatgttaaacacaatacaacatggagaaaaaactgcccactactaatttttactgtgtgcttagatgtggtgcgatgatcccatggtcagcaaggtctcatttgggcttgcttatcttgtgcttctacacaacctattaattttccttttattgtatagtataaaacgttgcaatatactattaacttagcatattcatatttcttgtatgttatagggaaagatacttgacttgctgcatagaaatatgcatgaatgtcatgttaactgtttcaaagattgctccattaaatgtgaaatgtttatgtggcttaatgaagctgagtgatatctttggtctttaggcaatttcatttttaatggaaactccagtttttggtcattagagcaggtggttttttaatgcaagctgattagatgcccatggcccgttgtgtgaatctgaaaccactgcttgatcattacctcttttattatgcccttcatttttctgtttcttttccctggagctccactgcaattcttgttttcactctcacttgtcaaatacaacatatatcttctgctttcacctttacagtcggcacagctgttccgcctgtgttctttgtatcgcattaaaatgtcaattgaacatgattcactgacctggttctgcttgtgactttgcaggttctcttctctgacataaatgcttatgaggtaaatgaattggcttctccctaacggatacattttgtggtctttctcctaagtactccctccgtcccaaaaaaaaggcaacctagaaggggatgtgacccctcctagtataacgaatctgaaaggagggagtacgatgccttttttggtttttgttccagtcatctgaacgctcatggtattgcatgtacttgcaggtggacctgggtaccgatgagaagcactgcttctgccgtgagtctgatctgttagccgttgttgaatgagtttttactccaaaatcggagtgtccaattccacaggctagaacaaatcccaaatttattatctgctatgtgatggcgatgagttgaacaatttgatatgtcattctctacaaatgaattttggcttctaggagtataaattgggacagcaaatatcctatcaatcaatcttattcacagttacactaattttcttaaatatattgatgtcctggagataaacgaaacatgaattatggctaaaaaaaggccagagtctagaactttgacttgtttccaatgcacggctggagcttagagctggctgctgagtgttgaccgcaattcttgcattaatcaagccttgtgtatctctgtgccagggaatgttaccttctgattttcttatgcactataggatgcttactgtttagatcgcattatgtactacagcttggagtaaaatattttgagagagagagagagagagagagagagagagagagtgtgtcataatagtgggtaatagcattagtaggattcatgcatatacgggggtgnnnnnaaaatttttnaanccctcattttctctaaaatacacaaactacggatataaaacacatctaaacgaatgccaaagtaaacgaaacgctaaggctcttacaataggggtatatcaagccgggccacaattaaccggctccgaatataccaaaaaaaggatgcctgaacctccagtaggaaagcggcctcaccagtttganttcctggagaagccgtccaataaaaggttcgctcgattttctctttgaacacacaagccacgttgcgcgtccagtttaaacaaatacaaaaagtaggacctttagactgtagcttcatctggcggatctaagaactatcatcaatctttatgtcgatgctaggaggcaataacttactcgcgtacattagccg

SEQ ID NO: 5959 - DNA, 892 bp, Oryza sativa
  unsure (1)..(892): unsure at all n locations
caagaattgatttataataagcactcttatcaataaattaggttaggtattgtgcggttacctaaagatacctgctcaacgtagatgcagggagtagaaagactgatccaaatttattgctgcagctatacattcaatgtagaagaatttgaattttagaatcgaaggttcataatataagacttctcggctcttatccatatttcgaatttttttagaatgaatacatgattcaatttggcagacagagtagtaaagatttcatcgaaaacttacagcagcttgccaaacaaaggctaatagaaaaaagagtacaggtatgacaggcataaaatccacgattgggttgaaaatggcataagcttcgggcaatttggcgaagaaaaaactagtcggataaataatagaattaaaacaaatacaggttaaactaagtatattaggcataacaagcgtttcgttcttgtagagtagataattggattttgattgagttatttttctaagggaaaaaggaaaaggaggattcaaaatccttttttcttcggactttcccaaacacaaaatacctccttgtattcgcactctcaaatgagagtggaagaaattcgactttcatatatatatatatatatatatatatatatatatatatatatatatatatatatatatataatgtggcaatcgatcgatctcatcatttgttagatgcattatcacttatctgtgacttaatttgttaatgtaactttccccttactttctctgtagtttaaaaaatatattctaaaacgaagaaagtacgtaggtggtaccactggtacgttgtccaggtgggtaccgaaataaaattcgcgntgtagtctcacgttgctctattttacccact

SEQ ID NO: 5960 - DNA, 2955 bp, Oryza sativa
aggaactagctattgggctgtcgacaggttttgaggcccaaaactcattttttgcacctcacgatctgcaatcaatgggtcacagcaaaataaaattgtctaaataagaatctttataacaacatgttttttcctgtcgatccaggcattgtaacagaaacaaaaatgtctaaataagaatctttataacaacatttttttttctgtcgatccagacagcgtaacaaaaacaaaaaatcgagaaaacatggggtcggagaattaaacttcgacccccagcctccaggttgctatgccgccgtccacgagtgatgtcaccttcatcgttcgcctacgggccagatcaggtgggctgtagtaggagcactatttttcaggcccatggaaaagtggccaaaaggcccatctctcgctccctacaaagcggcccacctatctgtggcgcactcgtcttccaccttgagtcgcgtaaaagaaaaagaaaaatctcccgtctcgttctcgtcgtctcctccgctccgctcgttgcgccgccgccaagacgagcaggggagggccgggcggcgatctccatccggcgagcagcggaggggaggggatcctggtgcgtcctctttctgattcatctctctctcccaccccaccgggacctggctggaacttgcttgcgttcgtgaaccctactagcttctcttctagatctcctcctcaatttgatagccttaaacatcttaattcaagcaataacagtttgtttgttcacccaaaatgtcccaagtactactgcctgacatcatctgttggctatgtgtgttatgggaggaggcagaagtctgccacaccttgttatgttgttttcgtttttcttgtggagtttactatgtagtaagttaattgcaagatatcattcatcatcatataacatccaagtagaataacagatggatgccgcagctcttcagtatgagaaccagaagctggtgcagcaattggaggcacagaagtccaaaatgcgtgcattggaaggcaagttcaaggagctgagggatgagcaatgttcttacgacaatacattgatttgtttgaataaaatgtggaatcaggttcattcatctgtctttcatactgatgtaaattctattcgatgcatttttttttccagttcaatatgtttctgatgcacttctgtgaattatagctgattgatgatttagtgctgcttggggttcgagctggtggggatttaaacggtttgcaagcgcttgatcatgaagagatgtcagaaggttggctacttggctacttgttttactttgctctctgaggtttgtttttctttcagtactgtcattgactattctttctctattccgcagaatctcttgagtcatgtccttctgaggagatatttctcttcagactcttgaattccaggaatttcagaaataatgatgacagtagcctgtcaaaattagttgaggaagctcttgccttgcgctattcaacaacagttactctgatgaagtccctgcaagaggcttttgctgtacagcaggctagaagtgaatctttatcattagctttaaatggacagaactccagtgaaggtaaagatgaaagcaatatttgtgcccttcttttttttttttggtctaacattgcaactctattatttaatcaaataaatttatttccttcagacgttattgtggcccttgaaaaccataatgattacttgaaagaagtggttgacaatttacgtcaagctgtgtctatcatcaacaggaagcacgaaaagtatctggatgagattgaggctttcaaaaacaatcaatcaagagaactacatgaagtaaagtgtctttcaggtgttaaagaatgccacttcttcccccatttgtgttggtttgtttaaaattttgctgcattgcatttatgttgatctattcacagtttttggctgttgtctcatgtactaaatgtaaatcagttctactaaatttaaaaacaccattttttaaaatagcttgattgcataaaattgtattttggcacataccctgactttgcattttggattggattactcttgcacaccaaaacaacctgtaatgcacattcatatgttgtattttaggtgagctagaggaaagcatggcagagcttgaggaaagccgtcgaaagttggctgttctccagttgcaaacgggtggaggctcactgatgaacacatctgctcctaacggtgtgaacggtagtgtttcaactgataaatcttcagacaagggtatgggctggcgagatctgaaagatgctgttgaggaggctaaggtactgtgataagacattattattattattattttcttttcaagttttcatggatgctttgaaggctgaagagtgttattttctcacttcttatcttattgttgtttttttttctttcttttcctgctaatttctcctatggagatcagactcttgctgcaaaccgcctatttgaactccatgagactcaagaggataatctgatactatccaagcagttggaagatattcaggttcatacctttttaatttttctgatttgagttcgctttcttatttctttttaatttgcgcttctttgctatgtgtgcaggatcaattaaaagatgagaactatattgttacatcaaaaccatatacgattctcagtgaccagttacaccatctgaatgctgagatagagcgatacagggggttagttgaagtgctacaggtatgctgcttttcctcaggtgggctgttttacaatggtattgttgtttgatcaaaccctggcccccccccccccccccccccccgagttagaatgaaaaggaccagctcatgcaaaaggaagaagaaatgcttgcaaaggcagaatcagtggacgctgttcaacaatccattaccacttacaaggccaaa

SEQ ID NO: 5961 - DNA, 45004 bp, Oryza sativa
  unsure (1)..(45004): unsure at all n locations
cccccccccccccccgagttagaatgaaaaggaccagctcatgcaaaagaaagaagaaatgcttgcaaagccagaatcagtggacgctgttcaacaatccattaccacttacaaggccaaaattgaggacctggaacatgaaatccagaaacttatggctgaaaagaatgatcttgagatcaaggctgaggaagccttgcaagattcaggtagagtggacctgatcacatttatagcttgctagctggggatggctcatctcttcgtgaagagcgtaacataagtttttcttaattccactgtatagggaaaaaagacttcaaggacgagattcatgttatggctgcatcactctccaaagagatggaattgttggacaatcaaatgaatagatccaaggatgcggcttctgaagcacttgcactacgtgaggaagctgactatttaagaactttgctagctaagaaggtatttctttgatttgggtaaccatatctttctgttttctgtgatggtctccaatctgcatctattacggtggtttggaattttcttaggcttctgtaaattttgttctaccttctaaaaacatcatttatatctcttccttgcaatttcatgcacttgttcagttgccatcgattcattatgttgcattcccccgtttcagctcatgggacatttttccataaattcaccatttaaattcaaggaacaagtgcatttatattcactctgatggtctccacagaactgtccatggctatattcaaaacagtatttttcacactaaaactggcatacatacttgttccatttttctcttcaaggttgatgatcattttacacaatcagaatgaacttaatgctccagggtaccttcttgtcaccaggtgctagcatggtcatgcataaatgattttaggtccctttgaattcatttacttcatgatattgattctgtaaatattcatggcaaaactttgttttttgttttgtttttttttttttggggggggggggggggtatgtgtgtgtgtggatgctcttatgcatagttgtggacttggtgtttaatgttcaaatacattgttttttcagtagtctttacctgattaggcctccatgtgttgcgttcttcttgtgataatagctatctgaacctctaatacaattaaaacatctgattgaagtgtctggagttttcagattgatgaacaaaaggagatatctgatagatacaacacacaagtcaccgagatcaaatccctcaaagcattggtaaagtatcctgatcttcaccttttcttctagggcactgatttgcaacaatcgaatggtcagccaacatataatgatatttaggtttcatcattcagaaatgaaggcagacctctctattaactggtggatagcctgatacatgagagcttataattcttggaattgggtatcctaggtcctaaaactattgttcaaattttagcctaaaattagattagccactttattttagcctacaaactccatattctgcagaaatccatgagttcgagcattcccaaacaggcccttaactgctattactgttaaataattgaaaatttaattgtcattcacagtgtgcataaatctgagcatcatttgtgggtaaaagatgttttggaacaaaaatgcaattaacagggcttctagttctgtcattcatttttctccatataatttcaacagattgagacactggaccaggaaaagcaggagttacaatttatagtggatatgctcggtaaagaatgttctgagtcgaggtataatttgtttgctagtaccttttctgctgatttatgattgttatgggttgtattgttctcaaaagtggtgaaccctcatcatctattcttaaaaattctttatcagtaatacacaaaagactcgtgtataattgcattaagattgggaaacgaaatttcagtacacttggtctagatgcacaaccacatcagacccaaaaagaatacgaaaagaaaaggataaacagacactcacgcaactgaatcatgcgacctattcatttaatatttaagcatgttcaaaaaaacagatatggttctaagatagtataggtaaaaacatatcttgttaggaaattttcagctttcatctatttgacatgcatattacatatggtagatccttccagtttgtttcttaccatactctgttgtgcactagggcaatttcagagattgaagaatcagaaaaccgagctcgcaagcaagctgaatatttgagaaaatgtttagaagagcataatcttgaacttcgagtaaaagcagcaaatgaagcggaaactgcatgccaacaaaggctttcaattgctgaagcagaactggaagacttaagggccaaagtggatgcatcggaaaggttagtattggtgaaaattttgttttctcaacccctccgtgcaaaattgttctccagtttattgggacttgccttttcaaaataattctccattgagggaatttatagtgtagttgtattctctaaccctgctatccataccaagtaccctatttaacaaggggttaatcagactctagaaaccgggggaacttctatacacgaatctggacatagcctctgtccagattatgaacgttgctttttttctgggatgaagggagtaaaaaataatatgtgctggcttgggggctctaaactgtcctggatgaaaattgtagttgaccagctctcaattctagcccccattttccccaccacacaagcgcacaccaactcccaaaacaaaaaagatccctaaacattactttgatcttttgtctcccttgttctgtgagcatagactatgtggacaactatattgaaatgagtagttataatttgatatagctcaacaatcttcaattagtttcctgcattgaatccttttcatcacacgcattctgttttgccagagatgttatgaaactcaaggagtcaataagaattaaagaagctgaagtagatggccatatttctgaaattgaggtaggcgcggttttctcttcttatcagcagtcctttttgtgtgtgaaataaaagcatatgatattgtcattgcagacaattggtcaagcatatgaagacatgcaaacccaaaatcagcaccttcttcaacaggttgctgatagagatgattttaacataaaggtatttagatatccatcaatcttgttgcttgcctttgtagagttcctggtagtctgtagcaccttacacggctagtaggtgcagggatttatagactgttctagattctagaaccaaagctaatctgctcttttttccccaatcacaagttggttcctgtcctaacatggttctcatctaacagctagtatcagatagtgtaaagatgaagcaagcctatggttcccttcttgctgaaaagaatatgctacagaagcaacttcagcatgtcaacagttcactggagtcatctaaactaaaaatcaccagtggtgaagagcaggtagccttttatttatgcctaaagtcgttctttctgcgtaaggcccttggagatattgttaaaacaagtgttgatttacaagaaataaattgaagatgtatcggattacttgcatcttatactattaactgttacagatgaagacctatgtagcacaagctatgaaatcttcttcagagaataggcatcttgcaattagccttgaaaggactatgctggaggtatcagatgcagagaaggagctcaagtggcttcggtccgctactggatctgctgagaaagaatatgagataaatcagaaaaaaatagctgagctaaaaatggagctagagcgtgagaggttaggctgctctgaactccaggattggtcatgctatgctgccatcaccatcatgtgttcattacattttttttggttaattcagaaatgagaggataaagcttgaggaagaatacgaagaggtgaaaaacgaagtcagtgagctaacctcagaaactgaagagactactatacagaagctccaagatgaaataaaagaatgcaaggctattctcaagtgtggggtgtgcttcgaccggccgaaagaggtgatgggccattgggccactgaatcaacttattctggattatgtcgatttgtctctgaacctagatgtagatatctgggatttaattattatttacacccatcacaaattcacgtttctttgttatactcttacatgcgacagccaattctgttaccgccgctgatggcatttctgttcctttctctcttttttcttcttcttcttcttcttcttttttttttggcaggtcgtgatcaccaaatgcttccacttattctgctcgccatgtatccagaggaaccttgagatccgccaccgcaaatgcccaggttgtggcaccccctttggacagagtgacgttcgggaggtgaagatctgaagcgtcagcaaaacagcttgaatgactgacttggtagcgagcatgtaaatatatagtagtagtgctagtttctgttttcttggaggacagatattagatcgaattgtcttggtgtgcctctgccaagactgccatgtagaaactattattattatcacctaaaaatagtgcaattgcggggatctgatactgactgtgtctgttttgcgtgttgtatcattaatttatctgttaattgaggtaccggctaaagttgttttacaatttacccgggaaataatgcattttgagtttatttattgatccatcccaagatatgaaaaaaaacacaaatattagggaaggaactaatatcaaataattagaatgggtgaggttttaaatccaggtcatctagcccaccaccttgtggaagacctctaggtgtttttcatcccaaggtatgaaagaagcgtgtcaaaatgaatctgttcgatagttttggatgggctactgctattgcctgtgtaatttctccttggaggtttgggagagctgtagaagtgggcgcccttggcagcccatccaattcctaacagtgatcaccaaatgtatcctgaaatttctccctgatctgcctctgccaatatactgaagtacaactcagtgcctgcagccagtgctgctgatatttttcccggatcgatcgtcgatcgatcaatcaatacttctaatgctggcggttctgccagctgctgattggtccagatggcacaatcatcctctgatgcgtgttatgcgaagatgaaacttcaagctagcgctgagcatgcttcatgcgtacatgcggctggttgtctgcctccctgctgtcgtgcggcatcatgggccagcgacatgcatgctccatcactgagatcaaatccctcacggcctgttcggttggagggagtttttaagagggattggaagtttagagggatgaggttattaattgttttgtttggttgggagacatgtgaattttggtgggattttttagataatggaatgaaacaattttggtggaattttggtgagatggggatggggaattgaggaaggaactccctccttttcaatacttgggtagaggcaggtaattgggagggaattcatcctttactttgtctaagcaaatctcagccatccgtttttattaatgacctaatctccaactaaactccctatcaatttccatcacctctaccaaacaagatattgggattaaaaatcaaattctcatcttaatctcatcattaattttctcgtgtaaactaccaatccccttccctcgagttaccaaacaagccaagcgattggtaaagtatcctgaccttttccttttcttctaaggtgctgatttgcaacaatcacatggacaaccaacatggaaaacggaaaataggaggtgggagggagcgcatgcgctggaaacagcgagtaattttgctactcttcacgggatgcggaggtgggaacggagggaggctttgaaaaagggaaaaatgggagagggtctcgccgtctcggttgcgcactgtcaaataaattacgatgagaaagccacaaaatttagcttataaacatatataggcatgagcgaaacaatagggctccaggtctcgtagaaggcgagacctatgtgcaaatgggccaaggacagctacgcaaatatatagaccactttctggaaaagaacaattacacaactaatgactatgcaatacatctaactgatctgaacaaactgtaaaagactttgttaagagaaaccctaaacttatgggggtggctactgcgcgcatacgcgccaactaaattgctggcgcgcacgtcagctgccccaccccaggcctcccttatctttttttttctttttgcactttttttttcgattttggtgcctccgggcgtgtttttctttttctttttcgccgtttctttttcgatcttttttcaatctttcgcacacctctttacaaatatataactgaaagtttttaatttttatttgtaagttttcaaatttgagttgaaagtttttaaattttaagttgaaagttttataatttgacttgaaagttttcaaatctgagttgaaagttttaaatttgagttgaaagttttcaaatctgagttgaaagttttaaattcgagttgaaagttttcaaatctaagttaaaaattttaaattcgagttgaaagtttttgaaattccggtcaaaagatttgaatattcgagttaaaagtttttaaaatttaggtcgaaagttttcaaattcaggttgaatttttttaaatttgagatgaaagtttttgaaagtgcatctaggcccctaatgattttggtgattaattacaagcgattagagaggactaacatttttatttaaacaaatgtgaaggttgttatgtcctcaatgagttagcgtaatgcatatcccgccgaatatgttgatgtgatgtgatgtggcaaatgagcaaatggtattttgtacgttttcgtttccttgagttaataggaaagccgcactattaagagggatgatgcattgacatacgaggagtgatcaaagtgctcaaaatctatttttaaaaagtgtttctcctcagtttggtatgttctggattttttcggagttttccgaaactcattttcggactttccgaaaacacacagaaccagattttcgcttctggaaattttcggatatgtccgaaagtgattttcggacttttcgaaaaagactgcgaaggcaaaagtggttctgtatattttcggacttgtccgaaacttttttccgaaaatcatcagtagagtcaatttcgcttctgtatattttcggacttgtccgaaagttattttcggactttttcgagaacatccagaacgatgttgttggtactggaaattttcggacttgtctgaaaagttttcggaatgtccgaaaaatccttcgttgactttgctgttggtgctgagctggaattttcggacatgtccgaaaatctttcggaatatccgaaaatctcaattattgtgcataacgggcagaatatggactgtggctataaatagcccactcccatcacttgtgagggctgctggttccattccaatcatttgtgcccttggcttgctctctctctagcacttttgagccttgttttcttgtttcccctctcacctgtgttcgatttggatttggatttggtgtgtgtgtgagagttgtggattcgagtttgtgggagtgcttgttgttgatttcgtgaagatttgtgagcactttcatcatctccgggagttctttgcttcatttgttactcttggaggttgaggactcctaggcggttaggtgtcgctcccgagccaccgatctacttgtggttggccgggagaagtttgtgaaggtcggatctcacctccgaaagggaagagatacccttagtggaaggaggagtgcttagtgcaacttcttgaggaaagggttagctaagacccggctcttagtgagctcctcaacggagagtatatccctcaaggattcgaacttcgggaacaacctcgtgagcttcatctttggtgactttacttcctccctcttcactagctttgcttgtttgagccgctacaggtctagttactgtttgtgctagcatattcttgttgtaggcaactagatctaggatttactttgctgtttgtgctgacttcgaaaattttcggatatatccgaaaatttcggaaatatccgaaaattactgcttccgcttttaattgaatttttgaattagcctattcaccccccctctaggcctaattgacactttcagttttcaaaatttacaatgaaagttgtagattttcaattcttttgtgctgagaaaaaaagaaatattagcttaatataccataattatcgataactaattacgtataggattttttcttcaagtactgcgcaggaaaaaaaatccgagtcctgcgcacttcgttgcggaaaaaaagaaaaaggaggttgtagctagtgggccgcgcgcgagtatatgggccgaaaacgctcgcgacttagctagccggcgcgtctgcgcgcgataggaatctcgcaaaccttactgtcttcctggtggtgctgaatgttacgctgtttattactccctcaaaccatgaggtagcccggttcctatttacgatgtttattacttcattcatttcaaataataaggcctatatttatattttcatcattaatttatttcatgctatgttcccgacaaatataaaactaacatcacatgaaagtactttaaaacataaatctagcgatataacatgcataatgcatagatatgattatagtatgattattagtcaaaattttaccaaatttgaatttcattaaaaagagggcaccctataatttgaaacggagggagtataaaagtatgtcaagaaaaaaatcgtatagaaaaaatttacacgaaacacgtcattttaaaacttgggaagcgtgcacaatcagaaatgaacgtgcctaaatctccagttcaggcagcagcccaacacataatcggtccagcccagcccaacggacgagcaaagagcaaatctaaattgcctcctccaaccgacttcgaagtccgaacggcagaaaccccaacccgaacccgaaccccctccccatttgcgaaggcgggagcagaggagagagagagagagagagagagagagagagagaagagagagagagagagagagggagagggcagtgcgccgcggaagagacagctggaacccgatcacgcgcgcctacccgtccgtagaatcggcggcggcggcggcgtccgcgctcgtctccggcgccgacgagctcctcgaccacggagaacgcgcggaccgcggccatgtcgaagaagaaggcgcccacgtccatcccgtgcgagctccccctcgccttagaccctagcgtgtaagttgccccaaaccctaacccctatcgcgattctttggtggtgtgcccgtgtgcgattctttggtcccgtggtggcgatgttgtgtaggtcctgagcattctcgttcttgcagctccgcgcgcccatcggatcgtcctgtggcctcccagtcttccgcacgtcccccttttccggcagcctccgccgctgccgctgcgcctgcggctgcgcccgcggttcgttcgctcgtcgccaactcttctggcatggacacccgattcgacgaggacgaacggacaaccgccgccacgcggcgccgccagtcgccctctccttcttttgcaccatcgacgtcgaaggcgacggcggtgggactcactagatacggtgctgtcaagtcctgggggccgaggagggagctggaaactggggagaccagtaggtgcatggaggtgctactgctagagaacccaatcgatgctacaaaaccatctcctctccatgttgatgaagacaagcaggttatatattatttttgctccgatcccatctgtacgtgttgatccaactctaaatggaattatcacgttttccatctatattagctagctactgtagtggacttaatcggatgtttgcaaaagtttctaacagagatcttcatgcaagtgaaataacactattaaggtgctcctaatttgcttcatttgatatgtaatatgtatgaaatgccatggtgaacctttcatattttttccccttttttgaaaactatttgttcttttctctttctggataactgttccatagttggttccaatggttgctaatgctgtgcagggtgaggttattggtggtacccaacagaatgctccagagagctgtgtaacggagcgagcacgactgaatctgaaatctcgctccagtgcagtgggacaatctgctggcagtcctctcaaggaaaggtaggtggtcttgtagcccttttttgtatttcccttttcttttctataagttcatggattttctagttttatcatctgagtcttgctgttagctaccttatatatatattgaccgctatatgtgcagtacacttagcctgtccaagcacattcattaaatgccattaatgtttcattaaattttgaagtttcaagtatccgtcctgtttattgatatatgattgatgtcaaataggtgtatttagaagggaaaatttatctctgatgtttctgttcagtatgtacattcccaaaatgcatgcacatcctgtgcaattaagaatgactcttcattttgtttgactttaccttgttggaagactaaagctactcgcgatattgtcgattcaaggatcatcttttttctttgttgtaatacatgtttacacttcctacctatcagggtcagtttatattgatagccaatgctgatccctttaggttgtattgagtatttatttgtgggaaaccacttccctctggttccactgcacattatatgtgtgatgtgatttgtttattgacatttagatgcaccattagaaataaattgtgcttcttagtggctgcacgaacaatggataaattcatatgtgtaatgagtggctgaaaatgtataagggcatctggatattactatctttaatttggctccataatccccattccttgttttttttaatctttggaagcttggaattttttttgaggatttatactgatgttgaatttgcccgcaaattaatatgctattacatcttatgccttaaagctagaccttatctaactttggttttatctttctacattccacatggtagaattctggctccatcaacagcaatgaaaagagcaacggagaacaaatatttggcgaacttgaagacagatattgttgagaaggcgttgaaatatgatagaaaagagaaaatgaaggaggttatgaggctgatgatattccagaggagggttttgtattagagcctacaggtcacggaaatgggaagcaatttcgtcttccgcactctttgtatgatgtcctccacacttatcagaaagaaggtatcaagtggctatggacattgcatctcaagaaattaggaggtgcactatgtgatgaaatgggcatgggaaagacccggcaggtaaattacatgcaatggtttgttctttaggtgttagaatttcaatggttactctcattgagaagaggatggcactcgagatggggcaattttctggttttcttcattcactaaatacaaaagccatacctacccgagggaggttggatacatatatatagccatagctggctgctagcctattgctgcaccctcctagtctaaaattcgaaatttgaatgggatgctgtcctagagggcatccaaactgaataaagcataaaggaggcataaaggagatgctaactgctgcagtcctactaaccgcagctgtcctagcaactgaaaaatatgctaaagggtagatgctgtcctgaaaaaggtgaaactacccaaaagcaaaaagaagaatcacgaccaaggaccacaaagacttatccaacattctccccctaagtcttgtgcgtcgtcttgtggggaagttgggccatcccgatcctggagcagagctcgaggaacttgatcctcccaagaggcttggtgagcaagtccgcaagctggtccttggtgttgatgtagctcgccttgatgctcccttcctccaagtagcttcggatgaagtggtacctcacccggatgtgcttgctccgttagtgaaaaacggggttctttgccagggccagagcggacttgctatccaccctgagctccaccgttctagtgtctctgccgaggagatcactaagcagtcgagcaagccagagcgcctgggtcgaagcggcggaggccgccatgtactcggcctcgcagctggacagggccaccacctgctgcttgaccgactgccagctaacgaggcacttgccgaggaagaagagaatcccgctcgtgctcttgctggtgtcgatgtcgccggcgtggtcgctgtcgctgtacccgacgaagtgtgccttgccaggacacctcgggtagtagagaccgtggtcgagagtccccgcaacgtaacggatgatcctcttcacagcctgctggtgctccgtcgtcggtcgctgcatgaaccgactgacgtagccgacggagaaggccaagtccggccgtgtgtgggtgaggtagcgaaggctccccacaagacgtcggtactgtgtagcatccacctcctccgccgtgctgtcgcggctcagcttcagtctctcctccatcggagtgagagctgggttgcaatcggtgagcccagccagctcaacgacgcgcttggcgtaggcggtctgtcgaagcgtgatcccggagttgtcctggtgcacttcgatccccaggtagaaggagagaggccccaaatcactcatctagaaagtggccttcatctcctccttgaacgccgcgacctccgcatccttggtgccggtgatcaccaagtcgtcgacgtagacacccactagcaaggcatttcctccattgccccgccggtagatggccgcctcgtgcgggctttgctcgaagcccatccccttgagcgtggaatccaacttggcattccacgccctcggtgcctgccgcaagccgtaaagggccttgtgcaggcgtagcaccttggcctccttgccggggatcacaaatcccggcggctggtgcacgtagacctcctccttcaagtcgcagtttaaaaacgccgacttgacgtccatgtgatggacgccccagccttcccgagcagccagcgcaaggagtcgcacagactccatccgtgccacgggagcgaaggcatcgtcgtagtcgatcccctcctgctgcacgaaaccgcgtgccaccaagcgagccttgtgcttgatgatggctccggcttcatccctcttcagcttgaacacccacttaagggtgatcgcgcggtgaccacgagggaggtcagcaagctcccaggtgcggttctcctgaaccgcgtccatctccgactgcatcgcggcacgccatgccgcgtgtttctcggcctctacaaaagaccgaggctcaccgtcgtcgcacgcaaggtgcaactgcgcctctaggtcgcgaggcaccagtcccggcaccggctggtcgccgagaagatcctccatcgtacggtaccgtagctgctcgccgtcgtggtacgcgtcgatgcgctccccgtcgtgggagagcggagtagcgaactccaccgggctgcgctcaacacgagctggcgtcggagtagacgtgcttggaggagtggctgttggtgctggagcatgtggagtcactggctggggttgtgtcgacgaagagctcgtcgtagtcgaagtcgtggcccgagggtgtgttggtgtcggagtcggtggagattcgggggctggggtagacacgctaggtgaagaagagctgcctactcccccagctccctcgaagtggacgtactcgacggtgaagtcgtcgtacgtcggagtcgaaccatcgtccaccgccttgtcccatacccaccctcgcccttcgtcgaacacaacgtcgcgcgcagtgcgcacacgctgtgtctccgggtcgaggatgcggtaggccttcgagccctccgcgtagccgatgaacacccctggggtgctcctgtcgtcgagcttgccgatgtggccaagctccttggcgaacgcgaggcagccgaagacccgcaggtgggagaccgccggcttgcgcccatgccaagcctcgtacggtgtcctgccatcgagggccttggtaggcgagcggttgaggatgtaggcggccgtcaccaccgcctgcccccagaagatggccggcatccccctctgcttgaggagggcccgagccatccccacaaccgtcgggttgcgccgctcgacgacgccgttctgctgcgggctgtacggcgtggtgtagtggcgctgaatgccctcatcagcgcagtacgacgcgaattcagccgctgtgaattcgccgccgttgtcagtgcgcagcacgcgcagcttgcggccgcactccgcctttgcagcagcctgcgcatgcctgatggcgtccgcagcctctcccttgctgccgaggaccatcacccacatgtagcgggagaggtcgtcgacgagcagcaggaagtaacgtcgtcctcctggtgtggctggtgtcactgggccacacaagtccccgtgcacgagctcgagccgctccttggctcggaagctcgtctgctggggaaaggggagccgccgctgcttcgtcaccacgcagacgtcgcagagctgctccacgtggtcaagacacggcatgcctcgcaccatctccttggcactgagctgcttcagggcctcgaagtggaggtgcccgaagcgctcgtgccactgccacgcctcgtcgtcccgatgagcggcgaggcaaactggttgtgcgacctgcacgttgaggatgtcgagtcgattagtgcctctggttaccttggcaagaaggcgacgacggcgatcccaaatcctcatgagtccgtcctcgaccaacacgcgtgagccgttctcatccagctgtcccacgctgatgatagaattcctcaacgcagggatgtagtagactccggtgagcagcctgtgctcaccggacttggcggtgaaggtgacggagccaacacccttgatctccacgccggaggcgtccccgaacttgacggagcctcggacgctggagtcgaactcggtgaagaactcccgtcggccggtcatgtgatgggtggcgccggtgtcgaggtaccacccatcagccttgtcgttgctggagccgttgcagagggagacgagtaccttcggctcatcaaggtggaggaaagccgctgcggccggtgccgctggaggtagctcgatgcttgcgtgagccaggagcagagccggctcttcctccacccgtgcgacgtgggcctggccacgtcgtggctgtcgacagtctttggcccaatggccaagcttgccacagttgcggcaggcgtcgtctcgtgccggcttgtggttgccggtggcaacgccctgggcgcctctgcgggcgccaccctcggcacgtcttcgcgcccaccgtagctggacacctccccgcgccttgcgcggcttacggccggctgtcggggaagatgactcccccttcctcccgtcaccctgagaggcctcccactgctcccgagtgagatggagcttcccgccgatggtgatgggccccgagagaggctgtggctcatcaccatcgacgaccttgaggcgacctaacgcctcctcgatcgacatcgtggagaggtccagcagagattcaatcgagcgagcgatctacctgtacttctcagggacgcagcggaagagcttctcgacagctctctcctcatcgtaggtgtcgtcaccgtactgcaccattttctgcaagagagtgttgagacggagagcaaagtcatcaacatcctcacctggcttgaaggccaggttctcccactccttgcggagtgcctgcagtgtggacttgcgggcgcggtcgctgccgatgcgtgccgcagcgatggcgtcccaggcctccttggcagtccgcttttgggaaagcgagaactgcatctcgggcgggactgcagcgatgagggcatctagtgcccgccgatcctcgtcgtagtcgacgtcaccgtaccggactgcttcccacatgtgccgcacctggagcctcaccctcatcatcgcggcccactcgatgtagttggttttggtgagggtaggccaccgacgggaccaaagtctctgaccaccgtctggacgccgtggtgaccatggcgccggtcaggggagagagagccgtgctgcctgcaagggccgcgtgcgggctccgggctgccgccggcacgcctgcgcccgtctgggttcccgtcggcgggcgcgcggtcccttgggccgccgccgccgccgtggacgtgggctgctgctcaccgctctgctcgctcccgtgcccttcctcttgccagctcctcaagctccctgtcggcggtgatgtcgccggcgatggagccgttgatgttgctgcgcaaggtctcaacctctacctccgccgcacgtgccgcatcttccgccgcctccgcctccgcctccgccctggctgctgccaactccgctgccgccagtctggctgccctcgctgctgctgcagcggtctgagccgttgctcgcctgcgctcttctgctgcggcgagctcggcgtcctgctgacgccgagtgctcgaggcgaccgaacgccgagaccgagcgtcggacatggcgcacctccggggggctgctgcgtggagagggggaagggaaaggggaaggaggagcaaccggtgctgttgctgctgctggctaagagctcaaccgagcttgggagggggtggaacaagagatgtttagtctacaggaaagtatggctctgataccagatgttagaatttcaatggttactctcattgagaagaggatggcactcgagatggggcaattttctggttttcttcattcactaaacacaaaagccatacctacccgagggaggttggatacatatatatagccatagctggctgctagcctattgctgcaccctcctagtctaaaattcgaaatttgaatgggatgctgtcctagagggcatccaaactgaataaagcataaaggaggcataaaggagatgctaactgctgctgtcctactaaccgcagctgtcctagcaactgaaaaatatgctaaagggtagatgctgtcctgaaaaaggtgaaactatccaaaagcaaaaagaagaatcacgaccaaggaccacaaagacttatccaacattaggcaccacacgccccaaaattagctatataaatgcattttattttgtttatgttccaggtagctgcttttcttcgtggtttgctccaggcagatgtcatacacaacgcaatgatcatttgcccagtcacggtgatagaaacctggcgcaaagaacttaatattgttggtgtgctggttatcaaagtgtaagtttacatgatataactatttatctagttgtttcagtaatgatatctagttattttgtcagttttaatggatttgttttctcttgcaggttccgttatgatagaagaaccgactgcattgcactaaaaagcatagctactgttagcctgcactctactttaatgtttttgcattattctttttatccattaaacttgcttgttattttttcttttgattggattgaattcaatctgtcatgttaccacttatgccatttatttgatggacaatgtttatctattgaatttaatttattgaaaacaatcacattaaaactgtgattatagtcgatatctgtcagagttaccgattctattttttggtaggttgccttccattaatttttactgtcatcccatacagcctttgcttaactactttctatgagttagaagaaatgctacagctgataatataaaatgagatagatgcaacaccaaagtttccttacttgagattcaagacttgaccacactatcttaccttttgtgtttgtgtttgtggttttgggaatggggtgggggtggggtctggaatggttaaacctcactattgctcaactcataagcccgtgattatttttagaagaccagtacccattttattaatgcatcataaaagatggaatactgcttctaccctcgcttttatgcaagtagtcttgaaagatccctaacacagagaatcacattacttgctgatttgctatcctgaatcttggtatggtggttgctataggtattcagatgaaatattttgactcaatatccatctcctgtgcaggatggaggtgtccttataacaacatttgaagcagtccgggaccatattcaccgcattctggagacggggcacggcttgggattatattgttatcgatgaagcgcacaggatgaagaacgacaggacaaagctctttgattctttatgtagaattgattgtacacacagaattttgatgactgggacgctcatccaaaacaacttgacggtacaccctctccaaccacaatagtcataaagaaatttggttgtttatttttgtttacttatttgtaacggaacctacctgcaggaattttatgcgctgatgaacttctgttgtcctaatctacttggagagtccggacaatttcatgaaaacttcagcatgccaattgaaagggctagatatagaggcgcatctgcgcaattgataaaagagtcaatagaagcatctgaggtaaataccttctgttctacatacaggcaaaataatttctatttttctggttggtacaaatatcctgaacaagcttgatttgtattctgcagaggctgaagaaacttgttagcccttttgtattgagaaggacgaaagagatgttaaagaatagcgcctctaaacttggtactaaacatgaattgactgtgtggttgaagatctctgctgctcaagtaaacttactaaagcttatcaatatgttatcaaaatttattcgtcatctttaacttctttttttttcttactctccacaggaatatctttacaccaatcttatcatgagcaatgttttgggagatgagcctggcacacctttggcagcttctcaagtaatctcccctacaatctgaagtctattttttgtcaactctaccttttgatgtacggatctttcacctttgtttttgtctaatcacaggttgcgaggagtatctgcaatcacccagtaatggtgattggttctgactttgaacagaggggtgaatcagaagagaagaaggatgctttaactgacattatccgaaaaggtttattggcggtcagtaacatcgaggatattgaagtcgacgactacagtttgtccagcaaagtagcttttactttatatttggtggataggctcatcaaggaagatataagatcttgttattttctcaatctccacgaacattgacgatgatagaggtagtttctaacaatagttgcataactctctttttgccgggtcagccaaaggttggccaaccaatttcttaagattggggagaaaaacaaaggaatgttacagcgacattacaatgtcgcgctagtccgggagagatcccagacacagcgtgaacaagcgaaagagaaatagacaatacaacaacgattactcgccgaattgggagaagatcccagctaccctccataccgtgatttcttcttttatattctcggctacttgctccgtggtcatcgacacatgctgaaaaattctagcatttcgttccttccaaataagccagcaaattaacatgaaggcactgtcgaagtccactttgtagctcgtccgaaaacggcgtcgcgttgcaagccaccagtcagcaagtctgctgtcaccgtctgcctggattgcaaagtttgcatcgcaccatcttctgatctttcgccatacctccgccgtaaaaggacaggttacaaacaagtggtggcaatcctcgtcttctctctcacacagtgagcagagggggtcgtgcggccaatttcgcttcgcaagattgtcggcggtgagacatcgatccttcaacgcaagccacatgaagaaacgcacacgcgagggggccctggatcgccacagtagctcgccataggagcagtcctcagcagctatgaagaaaacatcataagccgacgccgccgagaatttcccgtcgcccgtcagcttccatctgatctcgtcaggcgatgggagcagggagaaatcgtggacctcatcccataactgaaaaaattcgcccattgcttcattggacagtgcaccctgcagaccacggacccatctgttgttgcacaaggctttagcaactgaaagtctagcacgccccacataagaaaatagcgttggccatcgccaagcaaagcagccgtgcccagtccagtttgctgtccaaaaatcagtgttttcgccatttccgacaatgtacttcaccactgatctgaacatgagattcacatcgttccctagcttaaaggcagccaaggtccagggcctctccctctgctccagcgacctcgcaggccattgcaaccggagagcctgaccaaagaaattcagatccttcacacctaggccgcctttttcaaccggggagcacacctttcgccacgagaccagacaatgtcctccacttacctcctcctgacccttccaaaggaagccccgacattttctttcaatatccttgattgcccactttggcaattgtaaaaccgacaagtagtgaaccgggagggccatgagcaccgacttgatcaagcaaagtctgccatcaatggataacatctttggtttccatcctgctacaatagttgcataactctcatttgtccatgtctctattatgttcttttatttatcatacttaatcatttttaattgtgaaaattgtagagagcattgtccaccatagtagatccaagcaaaatgattcgcatggatgggaaaacacctcagaaacagcgaccaatgttaatccaggtttttattgtcttctgtattacccattctgtttactccatctcttatttattgtagggagtatgtgttcttccttctttatctcagttataatttttgtatacaggagtttcaacaaactaacagatggtcactttttctgatcacaacaaatgttggaggtgtcggaattactttaactaaagcaactcgggtcattgtttttgatccagccaagaatccaaggttttttttactctttgtctctttggtaaaattgtttctacttatatgtaaagttggatcattttatttcagcaatgacactcaagtgttgatcgagcccatcgccttgggcaagataaagatgtcattgtgtatagattagtcacatgtggaacgattgaagaacacacctaccgacaacaggtattaattgcttcctgcaggcagcaataattacaggtattgcatttttaatcgatcaaatttgccatctgcaggtgattaaaggtgagaaggcaacagctgtaacgaaggaaaatcagagcaggcgggaaataacaaagccggtatgcatagacttagttcttattgctgctgtagttatctgcaggactttattgatgccagttttttcttactaacagacaaggagggtcctgagtatgcctcctgaaggttttggagtctccaaaactttgattgagcttctagctatacatggaggtgcttttgatccgtaaggattcttcttttacaaactcattactagttttaagataagataaatcatctactttttctgggtatattagtgagcttgtattccttccttttgttcattgtgtaggtcacttgatgaatctgaaatcaggcaagtcagaggacatgaatctgttgttggtgtatcaaaccatttgcatctgttttcccagagggaatctgaccctgtcacaaatgaaaaacacaagttagtttttctatttgttaatttgcatgaatttttcctgtgcattggttccctaggttattatggttcctctagttatctgcagtctgctgattgatgtttttgcaactctcaatagtcttttcctttttttttggcagatatacagctggcccaagtcgcaagcgcagcgaactatctatggttgttttttgaactatattatgcagatactttactgtttctctctacctgatcttaatattaactatataatatttcagccagtagatgcagaaattctgaagtcaataaggagcacatttatcgaaattcctatacaacaggtatattcatatatcgtaatttttcttgtaatgcctaaaatccaaactatttctgattaccctctaaaaaagtaggttggttgtttcgttggtgaaaaaggaggaaacattatgaaactagaaaatatttccggtgcaaagatacaccgccttggtgtagattcttatacacacatgcagctttataagatatctggcaccccgcatcaaataagcaaggcggaaaatcttgtaaaggaattcctacaagaggttaattaatttgcttcttttttttctgtattcttagtgtttgttaatatgcatggtgtactaataaaaacaaaatctttttagatggattctatggttgaggaggagatctccgttcctatggagaaggtggggctgctgaaaaatactaagtccaaaactaaattagtttctaatgtaaaatcttgtaggttggtttggtcatcgggagtggtggtgcaactattaaaaaatacaaagtatatctggagcatctgttaaggtggttttaaatgaataaatacccttttcatctgtctatttaataattagattggtaacttgtttcttttttaatcttggtagaatttacatccaaggagtgagtcaggcactacaggaaggtttgttatccggggttctcaaaaccaggtagaccaagcaagatcaatgataaaagatgttgcatctaaaggtttgttgataccgatacaagtagttaatttattgatttaacatgctcctatcatcttgtgtctcccccctaacttgtgtgtggataatgtgtctcagagaacctcgggccaaaaacaaggttccgatgatgattctttccccaccaaagatggatgcactaaaagtagatccacaagaatgatggcattgagagatccggggttactttggtgaatgtcatagcaaagcatttcggttgaggaagtcggccacatttgtgctgtataatataggttcaccaattttaacagtgaaaacctttgtcctattgctacgactgacatggaaatttcttagtattgtgaaacagtggaagtcgcttatttcctaataagccaaaacggcttattaggaaataaaaatgaatttgtgggtaaaacttttataaatgtattctttgtgacctaaaagccaatgttgaaaaagaaactatattgaaaatatgtcaaaatcaatcttaaaattaagcttgaaaatttaaaatctggctttttctttgacttattaggccatccgatggggctggaaggccttttactctgatttacatgtttgccttggtgatgtggccttttactctagatactgcaggaatgttcttaggcagatactgcggtaatgttcttgtaaagcagctgttttgaagcacttgatagaccatttctgacataaattttgaagagttcagactcaagagtactcgggggtatgaagaagattcttttgttgtagatggaaccagcgggagccgggaggtacagtagcgcagcacaaatttccagtttgctctgtgatggtttattaccaaaagatagtgaaattccccttgctctcttttatcttagtattgtgatggctatagatttaagggttcaggcaaatttccggctagcgtgaggaggaggcgatgagacgcggtcgtatcggcctcgtcaaatggcagtgtactagttgatttcaagggtacataggtaatttcacatgctggaacagatcttggctccgtgggctaggccacgcccactgtgggctgagtagccccatgtgtgtcttcaaacagaaatggacccgattttaggccacatggcattgtgtagcttatggtttttgaagttttttagtctatttggcaccccaaactgaacggattgagtgatacattgctcttgctcttactcccctctccgaatgtgggtttagattgtcagtccgcctaagcgcttgtgctgagcaggcgattgtagaagagccagcttctttctctcacatccgatttttccttccacgtcagatccagatgacatgtaccggctaatcaccgacttattagcgctgctctaagagcaagattaatagagagagcttatcatcggatccaaagcaatccagctcagccttacccttagagcaaatttatattgtttaatagtatagagtctaataatatagctgggtcattagctccaaaatatcaaaatattctatgtcagctgtagatgaacatggtgttagctacataacacaatcctctattttttttaatctaactggttataaatatgttgttgtggaatctgtggattaggcagcacaggcatacatgcatagcccacggtaatcggctcaagcccagcgcaagtttatctgtttcctcagcaacattgttgtcccgtgcataaagtaacaagctcttcattgcaatgcgatggcttggtcatctagctggattctggatggttcagctcacggagaggcacgggagtggaagcctggaacttcgctggtaagtagagccgcacaaagcaggcggaagattgcagggccctgcacctttttttttaacgactaagttcagcgggaaaaaattacaagattacaaccctgtagggtcgtaaccagaaaaaaggaaaagaaaaataccatcacccacacatcgacatcgtcaacacaagcccaggagaagactaacaccggaccggccgccgctaaacgtgaccgaccgccactagatcaacaaagggacacagacgagatcgccccctagaggatacaaaaacgacgtcttgaaaaagagaagcgacagaaaaaccgccgccaccgtccgtcgggactcaatggagccaagactaggctttcgcccggcaatcacccttgaggggtgagacaacacgacaacgccctcaggagggggaatgaaccatcgttgtcggtccggccaaggccggactgggttttcacccgccgctcaccacctgcaaatccatggctgaagcactgatgctccaccaccatacaagctctgccgacatgtgagacccctgcaccgacgtcctccgccggccagccttcatgtgccgaaaaccgcgccacactcaccggcagctcctccccacacctaggtcgccttctccaccgccggccgcgcctctcgcgccaagtcggcctcctccaccggacgagcctctcgcgccaatccggcctccctccatcgggcgcgcctctcgcgccaagctggtctccatctccgccgcccgcgcctctcgcgccgagccggcctcccctgccatcggctacgcctctctgcgccaagctggtctccgacccctctaccaaacgatgccacgctggccagatgcagccatctcccacgccctcggctagccatccgaagccgccatgcctctggtgaccgcagacacggtcaccaccaccgcagccgctgctgctgaacgcccagccacctcacctcgcacccgactccttccccgccaccgacgtcgccaccggcttcacacgcgccctcggccgacgccatccccgccgccttcaaccaccaccgcccggcacagcgcaccgcgacggccgccacctcagccacagccaccgccagccgcctcagacgccgccgtcctcgccacataggagccaacctccccgtttcctccacgcagccgcaccccgccgcctcaccaccgctgcaaaaagtgctgctgtgtgctgagtctgggcagggaaggtgggtctggccatctcgccccccaaacccctgcgccaccgtcaccgatcgcctccgcctctgccggctgaggttgccggcagcaagccatcgcctccttcggcccgtcgagccgccaccgcgcccgagggcaaccgaaccgtcgccgagctgccgccgatgctcccagccgcctcatgccgccatcgcgcccggggtgctcccaccgctgcgcgcaggctgccgcaccatcgctgagccgccgccgtggtgtccgggctgttccgctacctctgcaccgccgccgaagctcccagccagctgctccggccgaatctaggcatgggagggccaaatccggcctcagaggagccagatccgccgcctccccaagccgccacgccgtctcctcccctggctgcgacggagtacttcgtcggcttcccccgtcctcgtcgcaccgaggtggagaccgtcgagttgttgggtcttggcgagctccagcggcgacgagatggagaaggtggagtggcggtgcgggcggctaggattttcgcctcccgagccgcccgcgcgagagctacgcgggagttgcaattgattttcgcacagggccctgcacctgggacaattaatgctagctatgatgggagtttatcatttcggttcacgtcctttatcataacaaaactatgattatactattatagacactaatatagtaatatcttctataccaacgattataatggtaatagcagagtatcctcaccttttgtcattatgatcctggatgagttggaggctcgcgcccatcaggtaccagaacaatctggcagggacaaaatcaaggttagcccttgtagaatctagtaaagcaaattctacagacagggaactggattgatgtaacccaataccagctgaagctctagtttacatatgctaccgtgtcgttgattgttgtcctaggaatttaaataatggcatgagtgctaatatatctactcctagcaaacgtaatatagttgggaggtttgtgaggtcgtctagtgtttaagtggcaaaagaatatgatccattgggtcaattagctctctagcaaatcaacacatgatgccttcttaccgctgtattacaattaatggagaattcttcgatgcagctaaagatttggtagtatcagttcctaaaatgaagagcaggcccctaattttgagataacagtacaatcctacttttctttttgtgctatagaaatctctcacaaaaaataagatccttattactacatagtagaactaagcatcagaaattcactacgtcaagaccacattcttcccaatctctataagtgaatggtggattttgaaatgtcacctaattgatccgcgtaagctaaaaaagttggaccatcggataaaggaagccattggattgtatcagtgaaaaagggtaaaactgatcttctggagctttccagctcctccggtcctccccacacaagtgggagagagtgcaaagaaaataaaaaaaaattgcaaagggaacacaggaataaaattatcttttgaagcaaacccacatcgctcttgacactggcagtcatggtgttcaaaacaaattgcagaaaggcttgagggataaaattgtaatcatcctacttttgctataatatgaaaaaagaaatagtaaaattgatgagggatgttaggcctcgatcttccaataggtattgataaacaatcgatttgggcggagtcgcgacacaactcaatccggcttctgaacgaacacgctactgagccccgcaatcgcaacaccacgtctcctctggttatcaatcgtgccgaaacctggttgacctcgccgagaaggctaatacctgcatgcgtatcgaagaacacaagcaagaacaagatagattgcaaccaaattgcatatgaatgattaagcactcgaatttggggttctacaaaccgatctagcggcgaaactgttcttgacagactaatctaagcaaaacccgactctaaatgatgacggctactgattaagtatgattagggacgtcctagggttgccctagggcgcacatccccttgggctaagcccacgacacaattataaggcccaaaacataaatcagatttggactggataaggtacgtgttttgttttgtagattcccggcagctcggtaggaattttgacatggaaccaaaaccatatgaaagtagactccataagctttccaacaactactcatgggcttcgaaattccttctagatcagcagctaggtccatttgaaattgatgctgtcaggagatctgaatccaatatgtgtggaactttatctcttgtcttctatggaccaaaagtgacatggtgaggtagaagtagacttggagaaggtcttggtttggtccccaatcaatttctttaatcatccatgcatttattacgctcggtctcttttctttcgcttctttcgcccaagcaagtacctttacaaacgaaaacgcacgaaacttattatgtagcaacggttgttcaaatatataacaagtaaatcttatatagaacatatacgcctttagttgattaatacataaggtagtcatatttatatccgagctagtcgtgtcctcataaaaatggtattccgttgtactttttattcattccctacgattaaattaacaataggtaataacacttactaaaaatatgcatggcaaaatatgtcaattttagaacgatttcataattatacgtagagctattgacttaatttaaaaattaaaaatttataagcatattatttcaaagcaggtgcaccaatgaaaagtaaggacaagataaggggatcatacaacaatggagacggtgaaaagcaaggactcatacaccatagaagatggcgttaataataatactaaaatcatgtaaatttagtttaacatctgaatgtaaagtttgcaataaatgtttattgcacataaaaataaatctatacttattttaactagactcctggatattttttttgtctaaaacattaaaataaatctaagacaaataatataaactagctggtggcccgcgcaattgcgtggctagcacccatataaaattatatatttttccatatggttttacttaaaatttattaaatagttatattgatgtcttaagattttgaaagaccaaaccttatcatcccatgtttctaattttatacttttcaaaagtcacaccagttgctacccctacttctgacatattattctttattagcttgtttgatctactactgtttctaatcattctccttggaacctttaaaaattggatctttttagagtttatcgtcctgttaatcttcttttttataatttttagaagtcccatcaaacgtttccattatactcctctacaaccgtccactgcataccttatcatcctcgtgtttctaattttatagtttttaaaagtcacaccggttgctaccccttgcttctgttatattattctttattagcttgctcgatctaccactgtttctattcattctccttggaacgtttcaaaattggatctaaaaacttatagtttttagagtttattgtcaagttaggcttcttttttataactctagaagtcccatcaaacgctaccattatactcctctagaaccgtccactgcatcttctctttattgttattgctatttgaaaaatcgaacataattatcgtttaggtttatttttttactttcttgaagttccgccaaaacgtcagagactttgtcactgtactcctctacagctcgcccgctgccgcccttctttattgtcattgagattttaaaatcaaacatgattatcattgaggtttatttttttttactttttagaagcccgaacctttaaaaattgaatcttatagttttagagtttattgtctcgttgggtttctttttttatataatttttagaaatcccgtcaaacgctaccactatactcctctacgacccgtccgccacatactctttattatcactgggattataaaaatctaacataactaccgttggaattcatttttactttctagaagacccaccaaccatcggcggctctgccattgtattcctatacgaccttcccgctgcctctcttttttattgtaattgagattttaaaaatcaaatatgattatcattggggtttatttttttacttcctaaaagtctcgccaatcgccttgaccgatttgctacacgacctgccccgtcgtcattccttttaatcgtcattaggattgtatttggtgttttattaatactttttagatgtctcatcaaccgccaccactttgctcctctataggcctgttacttaaataatctcgtcatgtgttttagatggtcttttctttcagtagtcttattttttttatcaccaattgtagttatttataaattgtattcctagttgaaatcttatttttctctttctaatttcagaattaattttatttttcttattgtgttcttttgatatttgtattttttttgttttcaatttcagttgtttcaaaattgtattcctactctaactctcttttcaatttgtctaatttctgattttattttattttatttttttattccgcattttaattaatctactattgggttcttatatgtactcttatttaaatattgcttatatttaatttcaaatttaagttaattttaaattgtattcctacctgaactcttcttttcttttcttttttctaattttgattttttattctgaattttaattaatcttgtattggattcttttatggactattctttcaatattccttatttttaattccgaatttcagttatttttaagtgtattcatactcgaactcttccttttccttttcctattttcaaaatttattttatttttattctgaaatttaattaatcatgtattgggttcctatatggactcgtctttcaatattgcatatttttaattccgaatttcagctatttttagattgtatttctacttgtactcttttttttctttttctccgattaatgtgggaatttctagcctccacaacgaacatggtgcatccttttaaggctgttttaataatataatagatagatatagagggggttaccatgacttaataactaaggttatgtgtcacgtgtcaaaatttctatatttttttaacttgaatcataataggtggggttttatgaaattatgtttgaaaaaatgatgtatgccaaatataattcatatattttgatatacatagcaaatagtaggatggttagagtcgtacaaatgcgcgactatatacactagttctaaaccgaaatgaaacaacatcttgctcaagtggaacggcaacaccatgatttactcatcaatctcttccaaattcaccaatttctcattcgtactcccttcgtttcatataataaattgttttgacttttttttccttgtcaaaactttttaactttgatcaagtttatagatagcaataattttagcacaaaacaaacatactatgaaatatatttaatgttatatttaattaaactaatttggttttatagatgttgctaaattttctataaacttataatatgaaaagagtcaaaacgacttataatataaaaatgagtacataacaactaacgccaaaacgatcaagtcaaagtgtttgtggctgctcaacccaaaaaattctacaccctccatcctaaaataagtttatttgtagggttatgtgtctagtgtttgaccgtccatcttacttaaaaaattattatgattaatattttattattattagatgataaaacatgaataatattttatgtgagacttattttttttatcttttcataaatttttcaaacgtcggatacaaataaagttattttgggacaaagggtgtacctagaagtgtcatggattaatttacagcgaagacgagttgtaccaactacactccctaagagcatctccaacagcctctctaattgactctccaagttaaattttagcaattatatccaaaaaaaacatgctccaacagcctctccaactcactgctatttggctggccaaaccatcctcctcactggctacatttggccattctacttggctggtcaatggtgggccccacacatcccatctcctccaccccctcccccctctctctctctctcgcagtctcgcatccgtctttttcccacccaatctcgacggcgagctcgagcacggcgcgaggaggcacgggaaggagcactgctacgatgcggtgacgacagtgccagccgcgacaatggcgcccgtagccccaggcgatggtggacaacggcgacgacaacgaagagaccgccatccgtgcgcgcatcctctcccatgcgagcggcggcggtgccgcagccgccggcctacgcctgccgcttccgctcgccgcttcccggctcagctcgcctcagcccgcggcctcaactcgccacagtccccgcctccgcttgccgcagtcgtcggtctccgcttgcctcaacccgtgacccgcctccgcctcagcccgccgcctccgctcgccaccacctgtcgcctccgctcagcccgccagctctgcgtcgcctccgcttgctgcagtccgccgcctcgccgccaccgctatctgcagctcgttgcttcgcacgctcgtggcccgccgtccgccgtcgccgcatcggaggagaggttgtgggaagaaggctgtagactgtagtccaggaggaggaagggagatgtgagtgggaaaatggggtggaagaggaagaagaagggtagcagagactaacatgtgggtcctatttgtaatagactagtaatagactagtaatggagagggtagacagagaggctcttggagcgagtaacgactttgacttgctaaatcaaatggatagctggctatatagatgtttggagagtctattttagagagactgttggagatgctctaacaacccaaagatgaggtcccgcatcttgtggatgagccacgctgagcgcttcttcatgtggctcggcggcttctgttgctctgagctcctcaaggtttgacacgagtgatcacccacccaattcagtaacaagcaaagaatctgaagctaccattgactgctattgttgaatgatgatgatgatgttgtttgtgcaggtacttgagagccatcttgagccgctgacgaatcagcagttgatgggcatctgcaacctgcagcagtcgtcgcagcaggccgaggacgcgctgtcacaggggatggaggctctgcagcagacgctaggagacacactggcatcggcggccgccaccgtggtcgtcggcggtgtaggcgccgacaacgtcaccaactacatgggacagatggccatcgccatggccatgctcaccacgctggagaacttcctcaagcttcggtcaaacatcaatggcgaactaaattgcttattaccatggcgtgatgcgatgatatttttgtgtaggctgatctgctgaggcagcagatgcatcggatcctaaccacgaggcaggcggcgcgggcgctgctcgtcatcaacgactacttctcgtggctccgagcgctaagctcgctgtggctggcgcggccgagggacgcgcgtcacggcatggcagagcgcgcatcgcaccgaccgcgcccccggcggcacggccaggtacgcgccgcagccactgcatcccgctgtcggcgaccacctccccacccaccggccggcctgcccaagaggagaaaagtgagagagagagagaaagagagagaggaggaagggagaggaggggaaagagatagggtgatgacgtggaatcctggcatgtggggcccacatgggttccacgctgattcagccgtcacgtcagacaaaaccgcggtcaaaaccaccgagggacctaaagtgaacggttttgtaagttgagagatatcatatatctggttttgcggttgtgggacgattttgtaactcgatgacaagttgagggaccttgggtgtactttttcctttgaaagttgggacaaattgagggacctatagtgaacttaaccccccccccctaccttttcttttcatgtgcttgacgggccgcgaatgtcgcgtttgacatgtgggcctgtgggggcaaaccttagggtgtgtttggataatggaaaatgtggagtggaattgggattgagaaatgaatgaagggttagaattaaatggaaaagggagaatgaatgattaagatttaaagatgtcttttagtggatgggaaatgatttcccattagccaaacaggaccaaaataaataaaaatcacccccgtggcatgtgcccccgcaacacagaattccccaattccccttctcccatcccaggaggagccgccggaaccctcaccgtccccccaagatccaaccaatctaccggtagacccggtgttgtgccgtgatggatccattaggcggtcgccgccgccgtactgctgcatctgagagtggaggaggatggatgaagggttgtaccagtgtgagggcgagagatgtaagtcacctccgatcccttcaaaacccaccattttttttcttgtcttggcttattttgtggcaacacatcaggccagccagacacataatttaccaccagatctgaatcgctcccgcggttgtaatgtataggatgtatgtatgtatgcatgttcatctgtttgtttggttttccctttcactagattcattctttcttagcacaaagcacccccccaaaaaaactctcttttcgttgtccttgtggatttctcagaattcggcgcagctgactccgattcgtttttggtgttagagagacaccgattcggactatgttatgttaccttttgtgaataaatatagtactagtgtatatgtgcaccgcaatctcagagttaagcatcatacatagtctttgtttgtgtgtttgctgcatgtacgacgacaccatggacgtgaagacgaggagcaggaataggaagaggaagaggactgtagtaccacctgcagcagctacttttcctgatctgctgccggaggagattgtggtggagattctggctcggctgcccgtcaaatccctgctacgcttcaagtccgtctgcagagggtggcgtgcaatcatctccgagccatccttcatccgaacgcaactccagtgctcggcttctaaacaggagccatccatcctcatcagcccccacaccctccttgggcgttgcgatattcaacccccagttggaggactaggtgattggcccaacaacttctccacccaaatcagcttctaccaatggcagcgaggtgcctccattgccaggttcatggatgccacggccttccctgccaacgagttccacctcgtctgccacttcgcccactgcgatggcctagtgctcgcccccacagacaccaacctctacctcttcaacccggccacgagggacaccatcactctccctgacggccatggtgataaccaccaccatggcacggaaatggaagcttgctacgctgcagggctaggcctagatcctgtcacacgcaagtacaaggtggttcgagcattctaccgttcaatggaccccatccgcatggggatggaggtgttcaccgtcggtgaaacgggcgcaggctgtggctggagggagaccgtcactgatcctccctaccctgtcagtagatggctcactgccttcactgtcaatggtggctacttgttctggtacatggatcggtttcgctaccctaatgacactctccatggtggcctcctttggtttagcctgcaagaccaagcgttccgcgtcactcttcttcctcattcactggaccctgccctagatgacaaggtcaggccggacgtgctacacggcgaattgtgcgtccttcatgccaacagtgacaccatgcctgtgacgatttggacgacaaattcgccgtcttttgatgattgggagcggcgatactgcatctatgtctcgagactttgccatccaatgggccttcttggtgatggcgggatgttgctgtgggcaaaacacaccatccaccgctacgacctgtggagcgatgagctgacggccgtgtgcgagctgggtggcatcaggtatcagggtggtaggccaccaaggtggaagaatctcttcaacttcagcgtaatgccatacaccgagagtcttgttagaatcactgctgctgcttaaggcatccggaatccggatcctataggcttgtacttaatgtatatctcactctatttatcacctaaatacagtgcaattgccaggatctgatactgacagtgactgttttgcgtgttgtattattaatttatctgtttactactgaggtactggctaaagttattttgcaatttgcccgggaaattaatacattttgagtttatttattgatccatcccaagatatgaaataagcgtgccaaaatgatctgttcgatagttttggatgggctgctgctattgcctgtgtaattttttccttggcagcacacccgattcctagcagtgatcaccaaatgtatcctgaaaattctccctgatctgcctctgtcaatatactggagtataactcagtgcctgcagccagtgctgctgatatttttcccggatcgatcgatcgatcgatcaatccatcaatacttctaatgctggcggttctaccagctgccgattggtaaagtatccctcagcattggtaaagtatcctgatcttctccttttcttctaaggtgctgatttgcaacaatcagatttcatcagtcataaatgaaggcagacctgtctattaactggtagatagcttgattatacatgatttagagctgtatgggagagttcaagctcctaattcttggaattgggtatccctaggtcccaaaattgttgttcaggtatcagggtggtaggcccaccaagttggaagaatctcttcaacttcaacgtaatttcccctacagtgagagtctggtcagaattactgcgcgctgcttaaggcttttacgccatgagaagcaacttgtatttgatgtatatcaacctattaattttatcactaaaaatagtgcaaatgatcgaagagatctggtactgagtactgactgtgagtctgtgaatgtttgcatgttgtattattaatgtttttaagggctcctttaaatcactggaatgaaaaaatggaggaataggaaaaacattggattctgatagaaatgtaagtgtaaaatagatgattgtaaaaacacaggaaaaacataggaatgaccgtttgattggatcacaacaaaaacataggaatttgaggtgagataaaaacttgaaggattctttccataaggctctacttcatgttaaattttccttcaaaactcgcatgggaagaggcatttcatagaaatttcataggattcatttctttgagctatatagaaaaaaattctataggaataaaattctctaaaatttctatgaaattatgaatttcctttgaatccgaggggcctagatctattaactgaggtgcctttatgtattgatccatccaaagatatcacgagaagtgtgacaaaatgatctgttagatagttttggatgggctgcgctgatgcctatgtaatttctccttgggctcgcttgggccaggctttgggagagctttggcagcccacccaattcctaacaatgatcactaaatgaatccagatggttctgaatttttttttccctgatctgcctctgccacatgcaactcagtgtctgcagccagtgctgctgatattttcccacatactactgtatagtgctgatgtttcttggccattttaacagcatcaccatttcgcttatacttattacaagcgaaatggcttattagtgttattagtgatttaaaaacgaatactgaaaaagaaaccacaatgaaaaaaaccgaaaaccaactctaaaattaagttttgaatttaaatataagctgaaggctaaacgatgaagctataacactagtaagatgatgagtatggcttgcatcgacggaatggtatggaagcttcactttttcttatcagaaagtggcaaagaggcagcagacagaatcgatccatggcaaaggcagagtcactgagagtccttccaaagctgccacttgagaattgccaatgcattgctcctcctcttttcttttccttttcatcatcttcttcttccttaaccaaaagagccccttcctgcctgcctgcctagctatgtggctagaaggaacaaatcctaaagatcagagagaatcagtgacacgtttcgactttcagctccaagcctaatcatcatggccatcgtctctccctgcagattgctacttgtttgtgtgtgagagaagcaaagaacagagtgagtggtgttccttttttttttcttatttcttgtttatgaccatggaaggaaagaaagatacctttgattttgtttctcttggatcacttctctttttctttctttttgtctgtcgagcgatagatacatactggctttgagcctgcaggtcagtgccaaaaaaatgttgtgttgggagggtatatttgacgtgaggctttattcgattccaaccttagctagcttctctttctcctcccatcatttgctacagaaactgtatttgcatctggttattcatgtcgttttcatcgcataactttttatatataaaaaaattcactgacttggcattgttcagtgttgagaggtatatagtatctttggtcgatctgctgcctttgccgaatcagttgttcagtactcgagtcggtgcgtgccttgtcttctcttcctctttgcacagttgcagatgcagagagctgatgggcctacatatgtccaaatttaaacctagaattaagtttttttagatggagggagtatgcgtctagctatagtttcatgggggaaagagcagcagaagcagcatgaatgcacggttgaaaacttgaaataatctgtttcctttccctggtaaacgtatgcatggtttcactccaatcggggcatcaaactataataactgacttgtcaacggcatgcgtgtacgcgtgatctaaggaacgtatccggaggagttcatttgaggcgaaaaatacccacccagagagagagagagagagagagagagtttacttcctagcccacccagagcatttggtcactgatacagtaaggccttgtttactttccttttttttttcctaaaaacatcgcatcgaatctttgtacatatgtatagagcattaaatatagacaaaaagaaaaaactaattgcctagtttgcatggaaatcgtgatacgaatctttcgaacctaattatttcatgattagctataagtgctacagtaacccacatgtactaatgataggttaattaggcttaataaatttgtctcgcggtttccaggtgagttataaaattagttttgttattcgtgtccgtaaactccttccaatatccgatcaaatattccatgtgataccccaaaattttcttttcagtaactaatcaggcctaagcttcgcatagtaatcctagtactctctccgtttacttccgcacgagtcaccgttgactccaccaagtagaataaactgtagagtactgtataaacttttgaatagtacttattccatactatattacggttctactatatatggatttttatccctcgatgggatatctgttgacgaccaaattttcgcgtcaacaatatcccttcgttgtttgtatgtcatctaaatagttatcaacaaaaattgacaatatagattaatatgaaatatattactccacaaacatgcaagaccaaatttaacttctacaagtagcaacaaaaatactaaattaaaaagtatttatcgtacattcgcatctatatttgttatttttgttataacttgtagaagttgaatttgatatatttcatattattctatcttgccaatttttttataactatttaggtggcatgcacgaaacaagggatatctccttgagggataaaatcacttcccataccgttgagctattatgagatggaaggagtaaatcattttagtattatcgtaagccaaacttttataattctaatcaagtctttagaaaaacacatcaacaagatttagactatcagaattaaatcaaacattgatgtcttcatagtgtatttatttgttagtacaaataaaggtgtatattttataaacttggtcgaagtttgacttgagataaaactgaaaataacttacaatatagaacaatgggagtattcagctttgatattatgtggtatttgcaattcattaacaagtcgcttttgaaatgtcggattctttttaaatttctgttagaaataagatgaatcttatgccttcttgaatgctaagctactttatacaaggaaaaaaaaaagcaaaggggaaacaacttgaataaaagacattttattttatttttatatatgtgcgtgcttacatatagtatgtggaattgtaaagctgatggaactgagaatcaaatcaaacctgatatcgatatgtctcaaagttacttgttattattacctgcttttacatttgtaaatcctcatttactttaaaccgaacaaatatataatcctaagaacagaatctagaaaagcatacaggattacctgcatactcacgtcatgctgatcgtagctgacccaactgcaatgctagtttctgcagagataatacggtgcaaactgaaccaaaggaactgaagaagaagatcgggagtttttttcagaccaacaagttcttttttttcccgagaaatttcagatcaacaaattgagagacatactactacaggagggagagatagatagggcttgttcagtctattaacaaaattaaccttactaaaatttgataatatcaagatattattgatttatagcctcgtcaaattttggttggagtgacattgataagaatactgacattggtaatagcaaaatattatgtttagtttattactctatcaccattttgataaccccggaaatccatgcactaccaaatcatccaatgaggagtctcacacagccagcaagcagaagtgagatgtggcatcatgcagattccaatttgaagattagtggcctgattagacactagattagcagcagttgtgatgaatgggaagcatcaagtggcgacatggttgcaggtggtggcaggagacatgcacgtgagggctcccccatcattggagagtacttgcagatagaccctgtgagagtgtgagacccattcatccattcaccaacaaatcgatgcagtgccacttgtagatggagtacctagctatagtcacaaatggagtactgatcaggttattatgttgctcagctactcataaactaactagggagtaccaaggtgtacgttttttatcagttctagtgaaaccgttagggatcggtttgtaaaaatcgaacaaatttagataatttccacacaaaagttgtcagtgttttgctcggttttcagtaaacaaacatgatcgttttcagaaaacggtaaggtaaaccatgaggagcactaccttgcttgctcttcatgtgtacgttgctagcaagcaaacatgatgtatgtaccctaccctcatcatgaatgaaaccacgcccccactatatatatgaaggtatcagtgaaattcagaatggatgcaaagccttactgtcttatagcatcacactttgccgcagtttactatgtgtgaaaaatgctaggttaatttgtagtatagtatttgattcaattctcgtacgagctaaaggctcatgcattgcaacggatattatcgaatattataagagataaaaacaaaaaatacaagtttatagcatagttagtttattaggcatataatactatatatttaaggaatgttacatctaaagcaaaagcattgacgtctggagaccttatagccccaaatatcagcttgttgtgtttaaagacaggctcgaataccatcactaacataatttaaagtagtatagatttgatttgcacagtagttttgtaccgtcccttatctaagttgcggcactactcgtgctgccgtgcagtattggtgggcccgtggtagtcagtaggacgaggtccaagaaacccgccacaagcccaccgctgcagctcagctcagtacaccacagtacaagtagggtcactcacaaggctgcatgtatctaaatatttgacaccgttaacttttttaaatatgtttaaccattcatcttatttaaaaacttttgtaaaatatgtaaaactatacgtatacataaaaatatattaaaaaatgaatcaaatgataggaaaaaattattaattaataatgaattaaacttttataaaatatgtaaaactatatgtatacatcttgaccttgacacatatgcaaattaaattgggattttatctaaattttcttttcatagaaggagtaatattaatagtgtgtatttgcttttcaaacggaaaaaagaatcatacgttttccctcacttttgttggctttgaaagataagaatgcatacaaggcaggcagcatggacagcctaatatatgattggctgttggcccatgtatttctagacacgttcatgtagtagctgcatgcacttcgtttgtttatagatcttgatatatacaatccacgagcaacttggtatatacatcgatgtctttgtgttccattagaagtgtacgtccaattcaaaatttaagaaaaccatgggtcaatttttaaattaatccctacatctgcaatttttagttccatttgtgggaagatcaactcattgaccggataggccttcatttctacgaaatggcagctctccatgcatgagagcagatttaattgacttttgcttgtaaggtttttgtcgtgctacagtgctgctctctctttttttccctttaattcctagaataggagctctactaattcttcaaaaataattaataagaaattacaaacagcgtgtaaaagtctaaaggcataatatcgtgagctacaaattaacatttacgccacgtggacaacccaatacaacataccacacgccaagtatataaaactcaagaaaaacacgacactctaccaaactatcgcaccctcacgctctacatccaactcaccatttacaattgtcgctttatatcgctcacctcatgaagctagctctaacttcaccaacgaaggcattgtcacgtgtaccatctattgtacatcatcgcgacggtagcgccaatttcctcgtgatacttctaaaaatatcgggaggctttttaactctcaagatgttccaaatatctcatgttattggtatgaaacttacttttccttaattatcctttctttggtatgattaattacagcataaattaggccatgttgatatattcctttcttaagaacattagcactaccaataaacttcccaatcctttagctataatttatatccaaagtttaaataattcaaaagaagataagggaaagcaaagaattcaacggagacaaaccctcttgagcccccccaaatcccaaattgcgaaaatctagtacactcaaatcacaacactagccaagccagcacaccactactctactggatcgagtacagtacacagtatgatgattttttttgtgattatagaaattaaatgttaaatagtgaaattaggagaggaagaatccaagagcaattaggatgcgagtgcagaagcgtccctttcccggacaatttcccggcagaagtataaatcacaagccgccatggccgccctcgcttcctgccaaaatccttacttataagccacagacaagtgccgtagctaagctagctcacctttctcctcaccggcaagatcgcaagaacgcaacaagagaggaggagattgatgtcgtcttcggctgtgattccgccgccgtcgccggagaggagggtgccgatggtggctgtgccggtggtggccgacgatggaggcggagggcatggggcgaaaggggaggagagtgtgagcgggagcgtcgcgggcatttcgccgagcatcctcatcatcgccgtcatcgtcgtggtgatgctcctcgcctccgtctccatccactacttcatccgccacctgtgccgccgctcgtcggcgtcggcggccgcgtcgtcctccgcgccggtgctccccgtcgtggtgcgccccgcgtcgtcggcggccgtgggggagcaggtggtggggaaggcgtcggcggagcgcgcggcggagatggagcggctcatctcgcggctgccgctgttcacgctggcgtcgtcgctggcggcgctccccaagtcgtcgcgcgactgcgccgtgtgccagagcgcgttccgcgacgacgacgagctccgcctcctcccggcgtgccgccacgcgttccactcccgctgcgtcgacccgtggctccgcgccaacccctcctgccgtcccaaaaaaaaggcaacctagaaggggatgtgacccctcctagtataacgaatctgaaaggagggagtacgatgccttttttggtttttgttccagtcatctgaacgctcatgggggatcctctagaatcggcttcgagctgcagcatagttctcatngaccag

SEQ ID NO: 5962 - DNA, 5569 bp, Oryza sativa
taaacctgacttggccgagctgaaagtgtgttcatcgttcacttcaatttagtttacttccaagtgcaatctgcctatctatctagctactactcctagattgttagaccagtgatcaagtagtcgatcaaactgttgatctgtttgaaatcctcatacttaaactggcaacttgtgcttgattttgctttccatgcatggacctagtcatgcatcactgatcgctaagtcaaaagatcaaaatctcgataccaagttaggaatattcttggagattgtacatatagaaaaatggagaagatatgaacaggtactgaatagtgatttctttgatcaatgtgcctggcaattaggaaggaaaaaggagtcaggctaacatgtcaaatggccatacatatattcagctcacaattaattaatttattacaagatactttactctgatttttccatgcatggacttcattggccgacctttttttaaggagtcctaatttttgttggggtccaagctaagaggcaacaagaggtcctgattttccctaaagtgtcacatgagtgttgagcactgtcatatggtgaagcatctaatgatggcaagtaaaagccattgcatcagcatctgttgcattcatatgatgagctttctttctttccaacactccacacaaatgttgcattcatatgcctgatctactctattacttaccttgttgcagagatttatgcatcaagtttaagacacaattgcactaattaattgaggccatgttggctgctttattccttacttgttgccacagcacagtgctagctaggcagcagtccttgctctagactttttccttttcttttttttccccttgatgaaagcaaccaagctagctagtcaattaccaaaaggaaaaatatgcacccttttgtttgttgcctagtcattgttaacacactttgagttgagcacggttgcttctttttaatttttttctagaggcctacatttttttgctaaatagttcgcctattttcttatagaaaaatttcagcatcgtcagatcgattgagattcatacgtttctaaactaccttgacggaattgagtcaagctaattggctacatttctagatgagaattaatagttagtagttgaatatattgtagtcactagctagctgctaatatatatgacttgtacatataccacaaataatatttctttccttataaacaagacatgtcatgcatatttttcatcccttcagtatatttgctttgcaaattgaagtgtcacttatgcatttgttatcttttttcccccatgttaaatatgcatcatattgcatcccggtcattgcattgcattgcaccctactactagtaataagtaggccatgatgagcttgtgatcacaactttgcaaccaacacacacattcatagattttccttttcttttctttgccttttttttccctttgcattcatgagtagtgctttctagctaggacctctactgtacatgtattttcctaattaataattcatgtatgcagattgccgtcgcttccgtgcgatatctcacagaaaaggatcgcaaagtgccaaagcaggtcagcgtctaactagatgacaagccacaaaatgcactacttgcaccatatgggctaatttacaagataattttgtaccatgaaatctgttaatcttgccataatcaagccctagttggcagattaattagggggctcacccaatgaaagatatgattaatttagtctcagtaaccaactaattaattgtcgttagctgagacaggagacaaactaacaaacactgatcgcgtcctgattaagacaacccatttttgaagctcattccttactccaatttctcgagacaatagacaagtaggcatgtaagtgactctaattgcatgcagttcttcaacttatttagaacgtgggggaatttgcatgaattgtttttccatgtagagctgtcttactattggcacacagagatcggacctaccggccggccaacgactagctagctagcgagtgtttcacctgttttcagctggaaaaatggacgtgatgtgcgtatcaattcaaaggagatgctctctccggtcatgcaaacaaattgtcttaaggtatagtatggtctttgatatatagtcaataatttatgatatagcatatttgttaaaccaaataaaacttactactagagtatgctaatttcaagacagttttaacaatgtgattttcatgtatccaattaaaatattttaagaagatgtgaaatgaccgtagcttaactagttaggctccttatgattgaatctgtttacccggatttaatttttgggcttggcatcggtgctcgtgctcgcgtttatgattaatcacttttttattggtacatgacacccattgacaacggtttttggacgtgttcataggatagtgtaagaatatatttaagaagatatttacgcatgcttgagatttataaatgttctattatagaagtgcgccctaagccacaagctatcggaaatcaaaatcatgcatagccggatcttcagcagagtcgtgtcacctgttttgatcgttcgaatggtctaaaatattggacggctaacaaccttctttgcttaatcttgcccccatggtcttaattaatctttgcccagaacgattaggtcctggaaactaggattaacaaaactttaattgcagtgaggatcaagaaaaaaaaaaatctccctgtataattttcggttttgagaggtattccgtaccaatcaacgtcgataagatcaaaaatcgaaagaaaagcgaaattaaatatggcacacgagggtgacagccgtgcactgtccaggcgcgtacacgtcgctcgcgtacgtactttgtgtgcagtagcagttggtactcctgcacagtgtacgcgcgcgcgacatctgtacactacgtacacgtttacgtatacgtgtatatgcttgtcgtccacgtaggcaacctccgctactcggtctctaagagcttacaatagcagtctataaaccagctataaacatattttaaagagataaaaagaagagagaaaagcagcgggctataaatctgtagccagctgtaacacggactccaagacgtaatatgtgtatgacatgtgagatcaggcattaatagtattgtaagcaactattgtatgaattggctattatattggctatagatgatttgaagctaacagttggctatactattaaacttgctctaacgcagagctgatcaccgatcagagtgtagtacagcgaaataagcgtcgccagactttaccctaaattcaggactatatgtttctgttttctcgcgcacgcttaacaaactgctaaacaataatttttaaaaaaattataagaaagttgttttaggaaaatgtattaatccatttttcaatttttttataactaatagttaagtatgcattaatctctgttttatgtgtgaagggagcggttccccaactgctccagaagaagaacatagcttaattaaatttcctacggtgaaatcagtctatacagatttaagttctaaaattgatacaaatattaatatttactactaattgttttttcagtattagacaacgagatgtctatggagacatcatagtagtatccagcagcctatgtggcgttgcattgggaagcctagcgcggtgagtcaccctccaccgtggcatggccccacctgtcagtttgtaactgccaaccaagtcactgaaaaattagatggacgattttgtctccgtaaaacagagtgaaattaggaggaccactggatccgctatgccagggatgtactcatgatctgggccatccacgtgtctgattaaatacttgaccctgacatgacatacacgcatacttaatgcattagcttaattagctagcaacaattggtttgggatcatggcaatgcaaagcttctactactagctagctaggcatgatcatgcaagaggcagcctgatgactctgatgtatgttaacaactgcaagcaagaggggttatttcactagtcttgtcttcacatgttaactgcatgagtagctgcttagtttggagaggcagtgtcctaatccagcaaagggcagggcagggtcagaccagaaatgctgcctcatggtaagtgggaacattagctttctcactggaatatgatgccattgcttgaaacaactgtgctcactgtagtgtaacaaaatcttgttcctgctatctttgataatggtacccgtgtttatcggaaaaatgcttactgtaccagcctaatgaagacgaagttgaagaagaagatgatgaacaagaagaggaaaagatctttccaaagcagccagcaaaaaaaggatttataaaaaagaaaagaaaagaaaagaaaggtagccaaaggagaaagcaggggagaagagaagaagatgagatgagctgagatgctgcagccacatgaggaatgctaccttttgtctccacttgatcatggaggagaccaagaccagccaaccaaatcaccaattagttaactgcatttgctactaattgctagtgctaaacaaaggtttggttaaacggtagccaccagtaaacaaatcagtatgcaaaagaggaatggggttttaatattaccaaagtcagcaggagcgagccagtaacatcctagctggaccagcttcctgggaatttttatttcagctcaattctcgatttctcattgcattacacactgattaacctttttttttcattgggaactcagtacagaacatggagtacacagtatacatcacctaaattctagcaaggtcaactagtagcagaattcacacataactatgtagcaataactataattaagttactgcagatagtactacatatatagccttttttttcctcagtagtatttgtatatatatatatatatattagatattatattaccccttattaagtaaatagaaaagggaaaaggaggaaagaaatactgcttttccaaaggtaataaactacagaagaaaaggaaaaaaaagataagagagagaaaaaaagaagaaataaaaagtggtaattaatcctagtggtgtattgcaatttagtccttgggattaagcatctgttactcccaagtcccaaagcaatggctcctcaagccggagctccgcattgacctcgtcgacgtcggcgagcggcgcccacatcgccgggaacccgaacggcccgtcctggatgtcgaacagcaagtccggcaggtcgaacagctgctgctcatccgccgccgccgccgccgccgccgccgccaccggcgcggtggttgagccgtcgtcgtcgtcgttcttggcggcagcggcaggctgctcgtcggcgtcggcgtggacgacgcatggcgcgacgtcgtcggccgacaaggaggaggagggcgacgaggacggggacgtggtgaacgcggcggccaatgcggcggcggcctggacgtccttgggcgaggcgga

SEQ ID NO: 5963 - DNA, 9021 bp, Oryza sativa
atgttgattgcgtgtagtattggtgtgtggtggtgcccttattgtaattatgctggttagggtggtcttatcttgaagttattggacttgttattgcttacgattgtaggcagttcatctctcaagatgatgggtagtgaacagatggcattcaatatgttttcctgcatttgtatctcgcctggtttggtgtgactcaaacagaacgatcttatttataatttggttcaaattgatgaaagcaataatctatcattctatctgttctctgaatgtgttcgaaattttgtattgggcactcacattagtgttgtttgcattattgtttagtcgtttgatgttatcctttggattcactaactgaatcaatcccacgcctcttggttataggttcttgtgtctgggaaagaagacccagccttggagcttcctccagctatggatgctctcatgagagtttttaagcgtgtcagtggtataacagatggagctgctgagggcacacaggcagctactgcacctggtgtatgtgctgcccgtttgttggttcctggagctcaggcaattaacctaattgggaagcaaggtgcttcaattaaggccatccaagagggcactggtgctacaatacgggttatatcaataggtaatgtactctcgcttgatgcatagcatgttaatacaccattgcctttgtgccaatttgatggttaaaatttctgtaaaagtttgattttacaccagggcttgctgtgcattattctgtgatcctttgtttatactgtttgtatgggtttaaggctttaagcaagtaatagatattttgaagtcttcccctgttagtattaaccatggtcttgatatgcgtattttattcaaagaaagcgtggtagagcactttgcatgtcttcttgcatggaagaacgtatcatgtccattctactcttggtcacagtcagtagaaaatattgtgggaaaagtttcaaattagcacataacattgttgcgtagaaaacccaaaggcttaacttttctagatgtagaaagatatcaagggatcaacaaaaatgaattagtacaattttgtacaaacaaatgcgtgttgatggtattgtacttaaacaccctctaaaattttcaattaccctgaaaagtgacagcaatatataatatcaacttataaatttatgtagatgagcgagagcgacctttctatgtaattgaagatgaaaggatagttgagatccagggggaaacagagaaagtcctaaaagcacttcaagcagtttctaatcatctccggaagtttttggttgaccatagtgtacttccattgtttgagaagactgtaagcacatttatctcatgttttactttacccttcttatcaatcctaatatatgccgtttctgatttgtttctcagaatgctacagtaactcaagatcgcagcactgatgcttggactgatatatcacatccttcaattgtttctgcacaaataaaccaaccacctcctgtggttgatgaatatattcttccaatgaagagagaccctctgtttctcgaacgggaaccattgatagaccacaatattcatcgctcaggtgtttcgctttatgggcgggatcctgccttgtcaacattacgaacctctggaatacatggtggtggacctggtggccctctactttcacaggtatggttgatcttgggtttcacatgcatcttcattttttttttctgatgagctgtttgctggaacaaacatgattcatgtggttctttgattttgaaatctgttgtaatttgagtctcttttgcctttgattatgcatcctatccattaatatatgtttgccagttattatttatcagtacaaatatttatttcctcgtactgtttactgactagaacacgtggcacgcagataactcaaacaatgcaaattccccttacctacgctgaagacataattggagtgaaaggagcaaatattgcatacatacgagctaacagtggtgcagtcgtcacaattcaagagagtttggggagccctgacgatattactgttgaaatgaaggggacatcatcacaagtacaagctgcctatcaactcatccaggtaataccatggcatatatatactccttaaaattttgtattttcaagtttcagccataaaaatctctaatgtcatgtcctcctccctcaggattctctggcggcacatagggattctgtcaggagcagctatgcaggattagatccagtatataggccaagctattcacagtatggcagctcgacctatccgtcgtcgtcattgccatcgtattctagcatggatgggggtggatattcgtcttcaggtctcggtggatatgggtcatcttaccggtactaagcagttagtcgataggcttgttgccgccctgtatccatccctgggccatccttgtactgagccagcaatagatgttttgatggcttttgttcttctcggctgtagtcctgcagaaatcattgtgtcccggcaaatgtttttggtatatctgcttttgttagtgtgacagggcatgtggtttatatctcatcatggaaagatgcccctaatttttcatagtttagttgcattttttgtgattcttatggttgtgtggtctacctgtttgtgttgaaaacggatgagtcaatgcacgtgttatgttcatccaatattttcatgctgtaagcatatgaatgaaaaggaaaaaaaaagtaccgtgaagcataactgaagcataaagtcgctgttacatgtaatactttgatactgtgcccttctacaaaatatatgaaaaagaaatagccgtgacaactagatgatacttcaacaaaatcatttctaccaatacgatcttttacgtacaaagatagcaaaactaagggactttgaatcaaaggatttatataggaattttataggatttaaatcctatagtaaattttactatttggccctttaatttaaaggattgaagctttctaaatcctatgaaattcctatggaatggcacattgcatgtggattttgggggaaatttagcaagagctccaacctcttggaaaattttctttgagtctatctcttatccgattcctgcgtttttcctgcactccaattaaacgatcattcctgtgttttgcaatcctctgttttacacttcaatttctgtcagaatcctatgtttttcctattcctccgttttttctaccttgcgattcaaaggggccctaaagcttcatatttctagatgtacaaagaatgtgagaatatcactgcctaccgacaatattaagttgattggaccttcaaattgatcccgtatcccaatactgttgttgtaacgatgaactaatgaagaacacactaccgagcgtaaccacttcatcgtaccctgaaaatatgggctctgtgaaacaggcttttactgtggattctctggcgttttcagtgatcttccagtgaccaaaaaattagtactcctataattacaaggccacatagatgagccaatcattcaagggccaagcgtacaggacatattgttatccaaattacatctccagcggcacaaataggagtaactgttagcttctaaattgctgcaaaaaaaggcctacgaggaaataaatatgaagattactcttcacttgcatacaatgttgtctgtctgttaaagttgaccagcatgttccacagttccactagcccatcctgtagtgacaagaaaaacagtatatcagtcatatcgaattgttttattgaacataaataccatacttctgagttcaaaacatacggaacagggacgaaaggaaataagctgctgtagctacatgacacacttcaaagtttaggcaattcaactgactactcatctttcagtcatagcaatcctactgtaaaccttgtactcgctgacaaaatcactgaaaaatcctgaccatctggaaaactccgttccctcaccatatacaaacacacaacgggagagggaggagggatggagaaaataaaaggaaaaacacaacaagattcctctgttcagttttttttttcaacaaataacgattcctaccaaagaggaacaattcagctctcctgcaaaagcacattgagagcctcagccgtctttcctgtataacaggaagaggatcttcataatctagaaaacagaaacaaaaatatgtttgcatagacggaaaacaactcgcaaggcaaaacatcactgcaaagaaaacaaacaacttcataagagatatggatgattgtaagggaagtgcatactttctctttctaccaccctgtccacccatgacatttctcatgtcgttctttgggatattggtgccaggggttcctgcaaactgcataggagacattgcagatgcaccagctgctgacataggtggcaaagatgatgatggtgcagcaacaggtggaaccacggtcgacggcactggtgctgctgggggcactgttgctggtgcaggtgcaggtgcaggtgccggagttggttcaggaggagggcggggtaagatgtgcttcaacctattgttcctatagtttttccagaagaaatattgctgcctatgagcaacttcctgcgaataatttgatggaaggaattagtttgtgctactgatgctaataaagcacaacagacaaaacagaattacgaatatgcagtacaatatgaacaaatgatatgcttccaatttgttcagttgccccctaactaattcataaacaaataaaggtgcccattcataagtctgtaagaacaacaataataaagttttagctcatccccattcactaacaatctacagtcaaagtaatacattccaaatacacttaataaaggggaaatctgaaaggatgttataggcggtactataaaaggttgaaatggcacatgtgtactaggaaaaagggtttcaaagggtcaccttgcttgctggatgggccattgcattccggaaattcgcattttggaggagctcaagaaagaaaaggcagtgcggatacctacacaaacaacaaccagtgtgaccaagctattttgtcacagcaagcacctactagcaaacagatctaaattatacggccactcacattatgtatttgatgtactccggacgctgccagtatttgagatacttgagatacccgataaatgcctcatcctcaaagtacctattctgtgctagatctgtttcaacataagaaatattagccaaatgccattttacatacagtattaatttcagtactcatttaacaagtttgattccattaaaaatagcagaagcattgagagtaattgggcataagcaaaacataatccagacatccataccttcctactgatcaacatacacttcaattatgcatccaatctacggtaccagactaccagcaaactaattactctaggcagtgtatcacgcttgctgaccaacacaatcaaattgctgtttatttttccttaactaataccatcaagtcaaagattaaacactaatttgttcaataaacctaatgaaaagatccgcggtaaaaccccaagccaagtgaaacgagaacgaggatacagtacagtacagtggatgtaggtagggtttgcgaggcactggatgaactcgagctccaacaagaaccgctgcctcgcgtcgttggggtcaggcgccggcattgcctccggctccatcacgcagcaagcacctgcaagtgttggagagagagagagagagagagagagagagagagagagagagagagttagcacgactgctccggctggatccccgatctactccggctcagcatagcaaggggggaggaatacctcgaaggccctggatgcgcgcggcactcggacgggaaggggaagccccgccgctgctcgcgctgagagccgcccttctctctctctctctcccccccccccttggacgaaccctagagcgaggcagcagcagagagggccgcggcggcgggcggcgcggcggcggcggcggcgtactcggcgttcccctttgcactggcgctcaggcggcgagggcaaaagtgaggaccgattagatcagggacaaaatcgtccatgaaaacaaactaagagcaaagataataaaaatggagtaaatttcacgatactacataatactttgataataaaactacatatttaataatgtgtttcataaaactatagatttagtgtcaaatttatcatggaactaatgtattatatcatataactatagatttaacaactattttatcataaagctacatatttacaactttaaataaataatagtgatacgatctaaactctagaacatgtagttctttgataacttcatcactaaatttgaagttttgtgatatggtgcattaaatctgtagtttttgtgaaaagtttgacgctaaatctgtagttttatgatactttgatccaagtgtctacaattttgtgaaacttactataaaaatgagaaaataaggagagaatggcactaaccggaatcattcgtaccgcgggacatttaatttattgctactttaagatgtggcaattaattatttgccactcgctatctataacatgtcagccctcatgtgtctatgacatgtggatctagtgataaataatttagcaccactcgtaagagtggcaaatagttaattattctctgaattaatagatgtgaaatgttgtaagacgttagtgttacatactagtaatttcttcgcatgagaaggggacacgatgaggatgagagaaatacacaatgcttcagcaaatacatgttttttgaaagttaaagtttttccctcgctattattttccaaccttccattgcacacaatttgatagtagaatctcatattgaggaaagatgcttggttgatttagatcacataggcttatctccaactataagggcccctttaaatcgtaggaatgaaaaaacagaggaataggaaaaacacaggattctgacaggaatacaattataaaacagaggattgcaaaacacaggaaaaacacaagaatgatcgtttgattggaccacaggaaaaacgcaggaatcagatgagagagatagactcagaggaaatgttccaagaggttagacctcttgctaactttccttcaaaatgtgcataggattacccatcccataggaattttaaaggatttgataggattcaatcatttgtttcaaaggccttcataggattttttttttcatagaattaaaatcctccaaaattcctacatttttcctacaaatcaaaggggccctaaaaaaagaaggaaaacctagtgcgtaaaaacggatgttaagttcatccttatgtaaacttatgggacgagaaaaaaaaatataatgcggttacactgtatgagctgcaaaattgtatgatggtcttgacactcaaaacgatacaaccgaacaacagctctatccaacgcagctccgaagatccaattactaaacccaatgatatctcatgtggaaaacaggtttaggtaagacaggcttggtgatatgaggcagacctcaagctacatactatatactagataactaaacacatttctttacttatgtataaaatttatagaacaagtccttgtatgtttctgagaaaataattataaccctttatgttataccaatgtattattggtgtattaaataacatgatacatattgatgaaatatgagatattccttgtattttatcttagggacatgttatttatggaacttgatagacatagctcacgttgtcgtgacaaacacctactaaaatacacacagtagtgtgatgaatgataacccctttgaaacgattcaagaatatgctctgctagtttactgttgttaggatcacctccattcgttttgatcaaagggactgtttggtagagccttttagatccaaatccaataaagttgaagttctatcaaatgattgagatccatgcaaaaatggagcagagtgggttggataactcttacaagtcttacaagttgtacttgtggtttagaagttctttaaggaaattaacattgatatatattggttgtaaatttgaaacacatattcatgtcttataatcgtacatcaaaataaacgtaagtaataatcatatttatcctctcatctctttcatgatttctgaagatgatagtagcttgtaagtattggagttggatccccaaaaaaaaaaagtattggagttggatcatgaattaaggatttaggacaattacatatttacaaacacatgctaggatttaagaggttgcttggcaaatgggttaggaaaataatctcacctaccaaaaaaaatatatttttaaatcctagccatccattattccttcctcattgttttcctaaccctttatccattttgctatcccaacagtatcccgcttatctcattattatcccatcacaccctacgactgtcaacgcttccaaatgggccctagctgcacggcgaaaccaaacgcagccacgccggcacggcacgcgcgtgggcgtggtggccgtaggccgtagccgccgcgccgcgcgaataaattagcaggcgagatcggccgccatcgcagattcacgggtcgagacggggcacagaccagacggcgcggctcctccccattcgaaaaagccacgggcgcatcgcaccgcaccgcatccgcgcggcggaaacggaaagcactagccgagagggacgtccacccacccaccaggccaccacccccccaccccgatccgacacggcacacgcccacgcccacgcccacgcccccacgcccacgccgcgcgccgctccatctctcgcctcgcccccacgatgccgcggcgccgtgccgtgccaccactccctcgctgggccgccccacccaccaccaccaccaccgcgccgccacgcgacaaacccc

SEQ ID NO: 5964 - DNA, 9971 bp, Oryza sativa
cgtgctaaaaagtcaacggtgtcaaacattttgaaacggagggagtataatattagttcagccaaatcttgttcgattaatgcccaaaaggaagaagtcggagggattaatttcacatatccatagaagtggaataaattgaacctctttcaagggtccaacagggatttaccgaggaattgatccgcaaaaggtaggctatagttggccaagtttatatgaaaggattgtcgatagttatacttttaatgttttacagatatactaataaaaaacagtagtcaagtttttgattgcaacatttgaccactcgtcttattcaattttttttacaaatataaaaaacgaaaagttatgcttaaaatactgtagataataaagtaagtcacaaataaaataaataataatttcaaaaaaaaattgaataagacgagtggtgaaacgttgcaagcaaaaactcaaatcccttatattatgggacgggggagtacttaaatatgtgcatcaagattgtatcaataaagacctaaacaagaagtaaaaaagggtggggatgaaaaacgtagtactaaaaaacaagtcaatttaccggcaaattaagagaaattagaaatttggttgtaattggaacgatatgatggaaaagttgaaagtttatgtgtataggaaagttttgatgtgatggaaaaagttgaaagtttatgtgtgtaggaaagttttgatgtaatggaaaagttggaagtttgaagaaatattctggaactaaacacggcgaaaagtaggccatatcattttgctgttataaaattaaattgcattcttctactggttacacatacctgatacgcgtactgcctatagacgtgtagtagcacgtgcactgcatgctttctggacacggccaacttaactgtcgtgtcgtcaataggaacagacgaacgatgcggtttcattttcattagccgatcgatcgatatctcctgcctccgctacttgccaagttgcactaacatgcgttctcatttttattttgggtactgctaccttcgttccatattttttttaagtcgaatttatttagctttatcaatttttttaaaaaaacataacaaaattttcaacataaatcaaaataattataataatatattcaatgttatatttaataaaactaattcggtgctacgaatatatattactatatttttttcataaatttagtcgagcttttttaaaaatttaagtttagaaaagtcaatccagtgggagtaacttctaatacacggagggagtacaaatcattctaggaccatgatacagcccgcacatatgcatcttggtcggcaacgtgtgacaagaggtactatgccatgcatgtatcaacattgattcatatacaagtgattacccaattaaaatctaaattcatgtctaaatatttgtgtataagggttaggctcagcttgaaacgtattatagagctttttagaaattatttacttgattatgaggatatcaaatgctttaataaacaaatttaacaaatagttttaaacaaatgatataaggaatgaagcataagattttttttttagaaaatgcatttttccaagcgtgaaataaacaatccatttcaacattttgataaacaaaatctgaatagaaacacgcggatgttgagttgtacttactttataattttaattttaataaaaatggattacagcttggatcaagttttgttatcagagcttttttttgaattatctttttaccttggaccaattaactttatatttatttttcaatttaagatcattatctatcagaatttaaatcgtagtgacaaggtttcaatataatttgagtaaatttcataaaactacaggtattttgaccaaattttcacaaaactacagatttaaggagttgtatcacaaaactacatatttagcactaaatttatcacaaaactacagattttagattaagtatcataaaaatgcatatttaatattgagcttatcacaaaaataccacttttggagtttaaatccctagcaccattgttatggtggagctataaacatcattactttgtgattaaattgattctaaacatgtagttttgtgataatttagttactaatatgtagttttgtggcacttcatcttaaatgtgtagttttgtgataaatttggtgttaaatgtgtagttttgtgatacaccgagttaaatctgtagttttatgataatttggtcatagtatctgtagttttgtgaaatttactcatataattttaatgggacacgctgatcccgttcgtcaccataagcttgtctcatagacgtatccacgcgtatacgggtgttcgcggatcatctccatctcatatactccatctgtcaaaaaaaaaaaaaaagccaacctagtagattcaaacaccactatagactaggatgtgccatatcttagtgctaagttggctttttttttcaaccgagggagtgcatgtcttacaagacaaatttgtgcatatgtgagcgtggtgtgatgtgtcgtgggtttaagggacaaataagaaaagaagatgcttttcataatgttctaaaaaaagagatggttttcagaagcatcgcacgcaaggggcaatgtggctattagaacagtcactctccacccttagctacagctactacaagttgagacgacgttgatgttgatctcgtcgtcacaagtgagaccgggactagtactcggaccagagaagacaaacactacgacatgatagatgcggcctcctcctcccttcgtgcgcctcgaaccctccgcgaagccgccaacccccacccctctccccctttaaatcgctcgctcgcgcgccacactcctcgaaccaccaccaccaccaccacgtgttcgatcgcgtcctccaagccccagcacctacgcgtcgtcgcgccatggccggcttcggcttggaccagcacctcgacctcatccgcgcccacctcctcgaagacgcccaccaccacgtcctcgcgccatcgccgtcgccctcgccaccgggtactgggcgtgtcaggccggcgcccgtgtcgctgcccccgaggccgccgctcctgtgggcggcggcgtcggcggcgccgcggcagcaggaggagtgcttcgagctcggcggcggctacgcgggggagggggagggggaggaggaggacgacttccggcggtaccgcggggtgcggcagcggccgtggggcaagtacgcggcggagatccgggacccggcgaggaagggcgcgagggtgtggctcggcacctacgacaccgccgtcgaggccgcgcgcgcctacgaccgcgccgcgttccagctccgcgggtccaaggccatcctcaacttccccaacgaggtcgccgccgacgccgccgtcaagtgggcccctcccgtcgcccctatccccgccgccgccatgtccgccggaagaggcaagagggtgaggtcggaggagcagtactacttgagggaggtgaagaaggagaggctgatcatggcgccgccggagaactcctcctcgtcgtcgtcgtcggcggcggcggcagccggagacatctgggacgagctgaaggggatctgcagcctgccgccgctctcgccgctgtcgccgcacccgcacatggccttcccgcagctgttcgtaagctgatcgatcgctagctccggccatggacggcgccgtggcgagcttggagtgcagccatggcgcgcgcccggcgcggtacacgcatggctgccgcgtggtggtgtccgtgacgtcacgtgcgaaggatatggccttaatcctgaattagatagggtgttctttgattaattcgctaaacttcgtaatattaggtaatcgatttggctttcggccaaatattgaattctttcgttctattgctgctcaggtgatcgatgatcatagtagcttcattgcgatttgtcaatgaaatgatataaatatgtattaattacaagttgaagagtactaatgaagaacatcagaggctcagagcaattgagcgcacatctcgttaactccagtctccttttggaatgattggctagtagtacttgtaagacatcgaccgttgaagtcgtgatgtttgctttcttcttttcctttttagaacacgtgattttgcttttgactatgctatttgatgattaaacagagaagaaatattcgtcttacaagatcatatcaccgaaaagactagctaggcgcatggagtagtactggaaacaagctctgctaaggccctctttgtttaggcttaagcttattggactagacttttaagccagctgtggttaatctaggcccattttggaaaaaaaaacattagctgtaatttttctcgaagttatatatttcttgcactaaaaaattaaaaaattagagagataatttgagtttctaagatggattatttcattcatattttaaatagtaaaaacggaacactaaatctctatgattttattcccttcgttcaagtgtaaatgtcagttttaactttagattggcatattttgatcaacaatatttttcaaataatctagcatcaaaattgtatcattatatttgtactaagagctttactaatactctcttgcattcgaatatgtttggtttgacacgcttagaaataatggtcaaatttcatctacctctaataaaaaacggatgactagtaggagtagcattcagactattcaacgggaatcccatcccgggccaactgatggagtgtgccaccttccggcccagggatggtcaccctgggccggctaacaaggatacggcccagatggatgcgtggacctctggtagactagcagcagtgcggcccatgtacatcgcaggaatcccgtgtgagccgaaaagattgaccaaataagcattatgcttttttttagatgggagtagctatacaactattgatagtttttgggatgaaaaaatttcaaatataactactatataattacattgtaactactatataactactatataactaatatgtaactcgagtgtaactcaaaatagcctgatgggagaactggttaggggaacaaacctccaagttggaggtgttgggtttgatccctacagcacgcgtttgaattttttaagccgttttccctcactagcacaaatctcaaagcatattagacagcttaaaatttgaaagttttcaccccctgttaactgtcgccagttggttccctcactagcacaaatctcaaagcatattagacagcttaaaatttgaaagttttcacctcctgttaactgtcgccagttgtatagcaaatccgttttagaaacataggcattcacaacgccgcgcgcagacacaccatatctatatgatatctatatgagttcctcctaccactaaaagaataattagctgtaaatgcgagcactcgtgttaaatctaggatttgaactcggatgagctagttccaccacaagaaatctaaacagttaagctacgttcaactacggctgaattgttgtccacttgagagagttctggtcacaacaagtcagcaatcaggatattggcgagaagcctactcttcttcttcttgatgaatgttgccaatgtggtatgtgggcacaatttgcacaaaatgatgcttgtgggcaacaactttagctgcattagcgtcatctaattcagaacaaaacttgaaacttttcattttcctttttttgaaaggatctgaaggctgaatgaagcttgtaagcaaagtggaacacaaagcttagaagcgacttcactgatatgtgggccccttccctactgtaggtcccgcgccacgtcagctctcgacggcgctcctcctccaacttccaagtcgccggagcggcagttgggccagttggcctgggcccacttcaccccaaccgaaagccccccatcaaactgacatgtggggcccacccaaagcctactatctccgcgactaccggactggcagttgggccagttggcccgggcccacttcaccaccacccgaaagccacccatcacactgacatgtgggcccccacgaagtcacgccgcctccgtcttctacctccgcctcgtcgtcacaagtcacaagcacaagaggcgaaagcgcggcgccgtcgcggagaggagaggagggcgacgagggggaggcgattcccaaaccctagctaccctcaccgccgccgccgccagcagcgatgatggcctacgcgctgcgcggtgccgccctcgtcggcgtcctcctcctcgtcgtggcctccccggcgctcgtcccggtggcctccgccgtgcccttcatcgtcctgcacggttagggtttttttttttctctcgcttgtttgcccccctaggttttgtgctctgctggtgcttggatttcgtctgaggttttgctggtcgtgtgtacttgtctgtgtccgggcgcacgcagggatcggcgaccagtgcgagaacggtgggatggcgtccttcaccgaaatgcttggggaatggtccggctccaagggatactgcatgtaatggcgccttatctccccccatctctctctcccttgtgttctggaagtggagactgttcgagctgtgatatttgtgaattgtgatgttgccttttgttatgacgagaaattagttgctgtttcaagtgcaatactagtgctctggtttccattaatatatatgtacaggctattaattaattatttctttgtttttccatgtgaaattgttaatgcgaataaatatagatgcccaaattagatatggtagccttaattatatatccttggggttggggaggtttaaaaaggaatagattgaaatactccacacatatttagcaaatcacgaggataatgaagtatgatgagacgattactgtcaagttccatttgttaacttgtccctgcaattttgtgaggaggatctgggagtaacatatacagttttatacatttgcaaagtcaaccacagtttctgttatggtatgtacacccaatgtgtgatctcacaaccaaaccaattgatgtcccaacttcttttttgagagtttagcccatgctgcatttgtttcagtcaaccacaataactgtttctgttgttggatgcctggagattttatcgcgacattcacctctttcttacacgtttgggtattcacgtaatctgttgtttcagtatcttatttttcgtaccttaccatcctgctctctatttttagttaaatgtcaactgttgtatgaagccaagtttgggcaattcaatacatcttagaagtctcctgactttatgccatgttgaggaactaatatgttgtctgttccaattgcttttacattacttagtatggccttcctggctgttggaagtgaatttaacctgtcgcagtccatagtggggataatgaagattctgatatgcttcataattttgtatttgttcctgtggaatgggccttaacaaaatatgcagaaacaactattgttgaaaaattcatctagtattatggtatgtacaccctagtgggtgaccttacaaccaattgatgccacaactttgtttcttgagatgtgttacatcatatatcagtacaaattttaaaaagtttggcacatgctgcatttgtttgctagtttacttatggagattaaatgtattcctcctcagtgaaattggaagaggagcatgggactcttggctgatgccacttcaagagcaggttgatttcttgcccttgataatttcctttttttaaaaaaaaaatcaaatagactgttcttgtacaagtttctgagattatgtattcatctacaggcagacactgtttgcaagaaggtgattcagaacctccatcacttctatttatgtactgtatgctgaattctcaaggtactatatcattgctggaattgattttccaggtgaagaaaatgaaagaactccgtaaaggttacagcatagttggcctttctcaggtgtgttcatgctattatgctattttatgttcatgacaatagctttattgtaacatgcagatctgttctttgcttcttgtacctctatgcattgctgttcttttgttatgtcttcttttagtcctaagcctatttgatcagtcttggttaacccaaaaccaaaaaataataataaaataaaaataaaaataaatcaaacgaggcctgtgtggaaaaaaaaaaagtgattttcctctctttgtgctgctgccgaacgcaaccttaggcctgtgcggacatgtctcgcttttgttctatgtggacctcttgagtataaaacgtaggagtgtgctatgtgacccttcgatagatttttatttgggttattgacttagtgggagttttgttttcaatgccatgtatttcactagagaatcaccttattgtttcttgttgcatgtcaaaatttccctcatatgtaccctttttgttaccttttacaggggaacttaattggtcgggcagtaattgagtactgcgatggtggaccaccggtaggtgaatctagttcgcttcctgatgttacaataataatatattttatatggtttgttattaacataacaacaccaaggtgagaaatttgatgtacttgtggtttaccatatgcgtcccaacctttcttgatccaaatgatgccttggacctctcttatgtacagttatagtttatttgctgactgtaacaggtaaagaatttcatctcgattggtggtcctcatgctggtacggcatcagtaccactttgcggtgtaagctcactctatcctcccctggtctccttcttttgcatatgcgtatagaccagtatttaagagtagactgcttggtatgaatgactgaaggtttttcatgcatataaatttacacactcttaatgtttagtagccaatggttactaataagcaacaggtagctatttgtagaatgacctatagttaaaacattactccctctggtttaagatatatgttattttagctctatccaacactgaaaaaaaactaggaaaagctaatgtcatagatcttgacatagagcaaggaacgctaatgtgagggggaaaaagttatataaaaaagaagttttttcccaaagaaatctttgctagaatggcataaaaaaatggaccggagacacttattgatagaacatgaatatgtcatataacataaaattttcggggatgatctgtagcattggccaaaacatgttggatgcagtttatgcttgctaaccatccatttgcacagctatcttgactcactggagaaaaacagcaatgcattacaagtgaatagtgataacttctttcaatttgccagatttcaagggagggagaaagcatgctttgagtcctgtatgaatatgtttttgttcgtttctttgttaacctagatcactaattgactgtaatttcaaacagattgaggttgtatgttaatttgtaaattagcatgaggccttgagactgctcccttacttttgtgcattcatatgaatgagcatgcctccaagttttccgtggggtttacttcatgcaatgttttctctagtatctgaataatgtagtttctggtaaactcatcttctgtcatttatagctgcactaggaacttcaattctcaggctagtgacgttgctatctaacagttaaacaagtactgttgcgctactaaccctttcttcttttttttgcagtctggcatcgtttgtgttcttattgatgctctgattaaattggagatatattcaaactatgtacaggtgtttatgacttgtctttttttgccatgtcttaattggtagtatcactgttaggcattacacacatcatttctctttaagtaacttgaaattggtggtattgcaggcacaccttg

SEQ ID NO: 5965 - DNA, 43306 bp, Oryza sativa
  unsure (1)..(43306): unsure at all n locations
cacaaaaaaaaaatgtttggacattgatagtctctacaaaatacaacttttacaactattgtccaaaacatatctttgactatgattttctattataatacatgcaaaaagtaagtaaatatttaattttattaaagtactttctaagactaatctatacatcatgttctatagtcttcaaactaaatattttaaaagttattgataatccaacgtcaagaatcatggaaccggagggagtgatttctactactacaatatacttatggaacccaacaatattacaatattatgaagaaagtacttttgtaacaaatctacacatatgaatttcatttgtctaattcgaacacacatgctcaaagttttgaaagtttgacctatattttttttctttggatgcagggagtcaccaaaaaggtatcttcaataacattgtgcttaaggcactgaaacaaactaccgccagacatcgtaaagtaggcaggccaccaataagaatcataatgatcatgtagagttcaattcttggaactgttacctaagaaagccatcagttggttcaatgaagggctcccatgaattatacttgtcattataagatcttgccgcaaatgacaaacccacagtagcatttagatgttgaggaccaccatgataactaaaccccacactattaaatgatattccaaataatggtaccatctgcaaaacgaaaaggttggaaacttaatatggctaacacaaacataagtaaattaatccgcatgggatgaatagttataacaccgaacataaatggcatagccctgaaacctcaaataaattgaggaacttgctaaagtacagtagcacaagacttaccattcctccataatcatcaaatgaaactgcagaaaatgatttgatttcagcatcaataattatgctatctgaactgctggatgtaggtggaccagcaagcttcagggcaagtcttcttggaggttttctaaatccacttctaacaagaaatgtaccaacatcattatcaacggtccataagctaaaactttcagatgttctagcaccagatgagtcccacacgctttcctccgaaaattggcctcccttcaccatgtcacttctaatacatcttaagaaatgcaagtcctctttcgctggtgaacttttagatgcaacacatcctaaagcaacaaaacctggtggagcttgaggaaaccaaaacgatacaccctcagtacccctgtgcttcttaattctaccaacaagctgataaccttcaggagctctgagaaaggtatcatcgccagaatttcgaagtacaacagctgaatttggtggctcatacctacaaccaaaaagtattttaatttgaataccatagaaagtttagccagaagatcagaaagttgactgtaaaatatttacccgttaacagcaatgtcaccaaagtaaaacattccttcagacaacattggacgccatatagatagtttctttggtgaagacatgccattattagaccaaattagtttaaagcttgctactgcttcaaatagccgacctgaggtcaatgctgatctctctatctgcgaagcatcattgtgactatcttgccctatagagctagtcttggaagagtccgcatcattgaacagcatatggcgaagatcatatgcatttccatctacacgcatatgtgctggatctccgggtaaaaaggaaccaaaagcattatcaacccgccagaatgacatattggcattaccgctgaaaaatataaattgaaaaatataatggatgtagagttttgtagtcgcacaagaaacttaagctcaaaggtaatgttcataatacctcagtggaatgcaatcccttaggccacatgaagaaaccaaggaagcagacaaacaaaaaactgacgataaaggtggttcagcagttccagttgaagaaacacaacccaatgcaacatagcccacaggtgctacaggtaaccaaactgagcagaaccggtcaacattagaaggcttgttcttcaaatctttctcactgtgttgatcctccatttgtttgtggaggtccagatcgccaaactagtttgtatgacaaaggccttttgacccttacaatgtttgtgttcaaagcaagaactcctttagtaggagagtcattcctaacatggaatatgataaccaaggttaaaaacatttcataaaaaacaaggagagagataatatagttaagtaaccaaatacattggtgtgaggaaatcgccaaaaatggcatatccagatggagcacgcggtcgccaaaaagagtatacttgatcgctcgcaccacctagaaaaaagaatcaatctccttaaaacttgaggcatctgaaattagtaaccacaaattaggagcatccaacaacaaaataacttctaccataccctgcatagtcacaactttatcaaattgagagcacaccagtgacattttcttagatgacatcctgagaaatgctgaaatttcttcctcaacagctaaaaacagcctcagaatactgaaggagaaattcatataaatctcagaaaccagcagatgcaaatttgtcttcccagatgcgtttgaatatttcacagacatgtcaaacggttctataactctgatgccattactctccatctttaaaccgagtatgtttccactcatctccatactgtcacccttcattataagcctgtcacatgaataagaataacaactaacaatcaatgacctgaactgctattaacatacatagtacggtaagacaagtacattagttaatgcattgacaaaagatgaatatacctccctctacaaaaaatcgtgttttttctggcatgacacaaatataagatgaactggaatacatcattgtatggtcagatatgtcatttagaagttagaagaaaattgatggggaacaaaatatatgcacgaaaatattcatagtttttctcctatgaaatatctttttgccatttcaagacttcaagacaaagatatattttatgttattaaaaaggaccaaccatcggtactttgtgaaaagcgtttgaacatgatctcaacatcaaatttcatctgtactgcacagtgacaaaaagagtattgcatctaaatcatgcattaccgatattttatgccactgaaattttgcaggcacgatattacagtacaaaaccatttatttttggcatacttctggaatagcacaatggaaaatggtaacaaaaaaaaaatcctcacaaacttcttacagaaactgatgtggcatgttatgtgtgcgtcttgctttttcataaccaccaatggattagattcaacggttgagatatttgtttgtaagaattgttagtacatatatcactgctcttcaaaaattcttatgttgaatattttagagtggttttaagatagaaactgtgagaactactttatccaaagggtaatagagagccaacctgcaaaatgcatctgtacgggcatgaataaccttagttgatagtgctaaattttcaccagaatttcttgatgtgctgtagaaagtaagctctggtccaatagcctgggataacaatattcaagcgtacaatcaacaaatgggaataatgcaatgcagattcaaaaatcacaacacgcaggataaaacaataacattagtggtatcctggttgtgttcagaaagattccaccaggcaagtattcattgtcagctggaactgttttaaaaacattgcagatttagatgtgattatattagagttctaagttagtctttgaactattgctgatacacatagctggtttgtggaaatgttactagtagattgatattcagaacatgtcacttgttttttatctgcacaaatggcttaaataatgacttcctcacaaagtaaaacctgcatgcacaatgaaatataaatagtaactttaagcatttaaacgtaagcaaaaatgagctaggtgcccacactcgaggtgcgcctcagagagactgtccaacaattgagttgtaacagatttatccccagaatctacaaaaattcaggtgtgtggtaggggctgcactcatgggtgcactcgtgtctaacatgtaaactgtagcctaaaataacagagcaaggtggtggccaactggccatgatattgtttccaaatacaaactgcattcacaaagaaaaaagaggaatccggactgaattcagcactatgaaaatccagtgcgtatttccttattcacaacagtaaccatctggaaccaatatttaactttctttttaggagaaaccagtaatgaactagaactgtcgagagggattattctagttccaaaatcaagggtctgatcagggcaagaaaacagaacacacataaagccatctccatctctcgtttcaacttttacaactgacttagaatcaagtttatctgattctagcctacagcacaatggccaagattaagtacctcaggtatagctagatgttcagagcaatacctgtatttcaattatgaattctgttgatctattggcactaatattttttacaacatcttcagtaatttcctcactgtgagtagatagaaggccttcattttcgcttactaagtagacatgatcattttctgatgctgaataccagcaattactgccgagagatatacacgagtccaaatactcaccattctgcagcaagatattgtgttgtcaagccaaagaaatatattgtaaattactactccctctgtttttttaaaaaaaaaattttgatgttggtagaaagaaatgtcaagtaaaagaaaatggagagcaaacaataaatattgaaagtgtagagcataccactatcgtgacattccgaaattgcaaccccttaccacagagcacatgaatgaatctttcagcactagggcctgacagaatttttccctccctatcccgcaaatatattttgccaccttttccgtcatatatatagtagtcgaacttctcattatcaacaatcagaggtttctgaggtgaaatactcatagtggaacgctcctgatagtaaacttgatcactgaataccagtggagaagtcatgtgcagaaggtccttatcttcatcattagataacagactacgagcagatggcacaaagaactcgacaattgctagcaagaaatcaagtgccacaagaaacttgggacgctgaacacacacagacacagttgacgaagattttcgcaggatagcatcaaaaatgagcattgaggggattggctcaaggcctagatctttttgtattcttcgttcacctgaatcaagttcattaggattatcatagccatcagcagatgatgtgtctctaactgttgctgatttcccaatggcaagccttaactcatcttttgttccttcacggtcatcaaaaacagaaaagcctttgagagtagcaaaaagaaagctctcctccctcgtatttgatttatacagaagccatgcgccacttgcctgagtacagaagattgcatgacaatgtaagagtatactctacttgaatcaacttaacatgaaagaatcctagtatatatagtatcaatgcgattccaaagcatattactcttgaaactttacctgcatgctagccataggtgagtcccttgtcgatcctgaatgaagagaaagctcaaccagatttatcgaaacagatattttattagttatccatgtctccgcatcttgagacaaatcttgaatactttcagatgaagaagatgaagatacatgagattcagctgtagtagttccatatcgaggatcatcaagagcaggcacaacatgtggtgtctcggagaagtttgacaatgcacattcagatataatttcatattctcgattggataacgctgctttcagaacatccacctaagagacattggacatgaaaatggatttcccaatgacacaaaaagacaaatgataaattgttgcttactgtactgaatctaaccagggagctttcattaaaaatgcacttagagaaaatgatctaccttaattgaagcctccaccgctggtaactgatgcatcaggtcacgtaatgatctatggatctcgaaggagagaccttccacatcttgaattatagtttcaccacacaccatattcataccaatagttagatttatgtcctttacctgcaaaggtaagtatgtaaccacagttataaaaacaatttgaaggtccatggcagaaagttccatttctccaaggaaaacaatactaagaaatataagttattttctccccacaagtgctcctatgtttcaagttgggttaatttccaaattccaatgcctccaaaattaacaaagctctcatgtccactggctgaaaattatgcaggaaaataacaatatactttcttgtccaaaaaatatatgttctcaacagatataaggaatacagcgtaatcatcataaggaagtacaattcccagaatcccacttatttttctgctctgttcttatcacccaacaaggaacagcaagtaatgaacacatcgacacattttgatgtagttctcaagctcaaaaactaacataaacctgaaaaggaatatgctacaacatgtaaagcttctgaaatctccattccaatggcatcagactaattatatggtgtaagtcatttctcaatggctaggctatctccatctgttgcccatgttcctcttttttctttttcttttttttaccatgtacggttttttaggtgtcaattaaagttttcagtagggctctcccctcaacctccccatccaaacagggaaataaataaacatgttgacacaatgaacttaccgtaaccgttaaaatttctagatgaatagcgctcatctcattcttgtcaccaccgatccattggaatttattttggatctttatgtatagaacatcaagctccaagaaactgcaaaccaaagcaaggctctttaaaatatcataaagatatgtgcatactatcagtacatgtccacagacccatccttactcagaactattagtttcacgaggcataacaattataggcctactgaaagagacatccaatttgagagcaggtgatccttccatatcagttttgctaacccacttctctgagttagttacattgtcttttagctttacaacactatcagagctcttaggaacaaggcccatgaaataattgataatctgcacacagagtatgtatgagaaaagagaacacttaaatcaatggcagaagagggaaaattagatgagcactaaacagcatacctcttgaacaaaacggttgagataaacaattctaacttctgaaagctgcgctgatagactatagtcatacccactatagtcttcgtcatcaacattgtatgaactaaagtcaatctgcacaaagaattaaaatgttgtttgttttctttcaagccagaagtagatagaaaatgtaagcataagcagttattcctcaacaaaaatgcataagcagttacagcatacaactagggagtccattgagttaatcaaatggtagtacctccacaaaagaacttcctcctggattacgcatatcacaaacccaaaagtagggatgattgcaagaaagactgtcatcgcttattttaaggtttccaagtgcagcctctatactgaacgacgatgtgaacaccttaaaatgccaagatagtcatgtattaggaaaatcaaatcaagatcaatcatatccattagagatagatgataatcatacctttatatcagttgagaggttattttgtgataaagtagcaagccggtcaccattttcattcattaataatatttgtgcctctgccatgcttgatgttagatgaaaaactgttctgcttttacctttagccagtaatctttttatgactggtcctgcttccagatcagacttaggttcctcaaccatattatgttctacaggatccgatgttgtatctttatttttatcagcatcagggacatttgcaaggttgatggcattcataaattccatgattgcaataacagttggtcgatgacagaaaaaggtcagagtagcaacacttatcacaacctggtaaaaacaacaaaaaatccgtctgtcacacaattgggagaaatagtactatccatataaatttcgaagtatgtacccctttatgcaataaagaattgctagatactgtcatactgagatatttaccctgttatccaagttgttgtattgaggggactgctgatcataaatcacaatctgagctttcacaaaactttcaaaagtaatgtcccctgaagtgaatccggcagattgaagctcaatatctggcagcaaaccaggaattcgactgaatgcaggtggctgcaaagaagggaggctagtaggcaaaaagttctgtgtgctgaaataatctgatatactcctctcatgcagcataggtgtttcaaattcatcaaaatcatctgatgcttcaaaaaacctttcttcactgtcacttttcttcagtgcagtacctctaggtcctgcactattctttcgactaggagttgggacttcgttggtttgcacgctattgataaaggatctcgccaaataccttggtacaggactaccagggtagttatactgatcttcaatttccagagatcgcaagatagtaccgattagtagattgccacccttcattgagagttcaacctgtttgtttccacaaaaaaaaaacgtagcttaatgaatcagtcatataacaaggacaaaaggtaatttcttactccctccatcccggaataagttcattttttgcccctctcatttgtcccaaaaataagttcatttttaagcaatcgtggtatcgtggtatcggagtttatagaaataggggatgaatgcattgggagtagaaagtgctgaataattgcgttgggatttgataaagttggggtattttagtctttttggttttgtattggtatgtgtgggatgggtgaaaatgaacttattttgggatggagggagaagggaataaagagttacctggccaccaactgcccgaaattcaaacaagctgctctccttagctagcagaacttttttgagtttgtggttgctctacagaaaagatagtcacaccattgattcagatgcaagtttacaaggaaaattgggtaagaggcacacctcatagccacatgagaagcagatctttagctcatcaagaatgccagcaacgaacaatttttcaatgctaacatcttgaaagctgcccttgaaggaatgggtctctgatgggaatgcaacttcaggaaagctggaaagtgcggcagaaccctgcaaacagactaaattacctggatagcaataggatataacaaaattgaacatatgaaaaaggaccaaaaagtaccgatgcacggtatatagcaccctgcaagcggttctgccatatccttcgtgcttcctcattgtcaaacaacataatcaaagcgccagtgtcttcaagaatctgtacaaaataaagttaattggaagtttagaactatcaactatgtcacagggattcatgttccatatctacattagcccacacttgcttactgtgtcaattctggcttgccattactgacggagtaaattatgatacaacatgactgattgtagtctaataaaagaagtaatttacagaatataatgaactcagctacttgaccgttccttgggattaacttggccagaatcatgaagtgccaggatattctgcacaccacttgtaagctccataggaacctgatggacttgtttattacgtaagctgtgattcaacacaaaagattaaagtcaaaataatatatccacctgcataaaactagcataaagattataagccatttacaaggttagatcaaagctattctcatcaccatagatgaaaatgcaataaattattgtatcttcatggaaacattgaagacatcaagccatgtcaaaatattgttgttctttcaaggaaatattaacagtgttcactccctaaatagtaaataagtaatatatggtaggaaatcaccagcacaacaccatgatacctgagaaacatctaagactaacctaccaagaatcttgaaaggcaacttactaaaagttgcgataaagatcctctccgcaaatatacgctgaaaactactagtggctcataacaaaaacattcatagatattaacagttttactgaaacgaaaccataagtgattaacttaaggtgtagtatttatagcacttccagacaaatctatttggaattaaaaatgcatataggtgcactcaactgtatattaagatacaaaagtccaagagaaaataaagcacagcgaaagtgtacaacctggaccattgcttgtatgttgtcgatgtcggattatcaaatacataaagaaatggtcccaccaggcgcaggtacctacgttgccaagtagcttctctgtttccaacaccctgattaaggtaacagggcaaataaaagtattagcaatgtaagtatagattgattaaggtgagagagcaactagcaattttgttctctccaacatccactttaaaataatatactccatgtatgccacatttcatttgatggtatcacccaacaacagtgtttctttgccatggtcaattcaaagcacagctttcaactgtcagaacatgtgtagggctgcccgggaaaatgaagaatgaggtaataactaacaaagggttgtccagggaactagaaaatgaggcaacacagagaagcaaagatgttcggaggtgatggcctgtggctaaagaacctgattcagagtggcattcggctaaacgaaatgttaggaccagcactcatctaaacgtcaattttgagttggcaccaacaaaatttaagaatgcaatcattaagatcagaataccacgggcaacatcaggaaaatccagttgctttgaagtctatataacaagtactgtattatatttctttaaggaatgacaaccatgtcatcataaaattgcatctcagaaacctaagcaaaaaaagttcatcacaagcaccaggtgaatgcacatatgcattacaggtgaattatgattaaaagcagagtaaagcatgtgtcaatttcagtatggtgttagtctcctatcaaataaatgaaaaaacgacaatcaaattaagttggatgtaccggtttaattgaactccactcagtgagttcgtatgttgacctcttaaaatcatcttttctcaaagatgtacagatcatatggccaattggccattgttcatttttgcaaaataaggtcatgcaaagtttactgtgtctacccctaatcccttatgcccccagttcatgatacatgcaacacagattacaaatccagttcaagagaacagaaaagtgcaaccttccatgtgagaagagatgaccatccctcaaagtcagcctgatcccacaaatgtgcaagatctgaactgtttttgtcgctatcattatcttgaaaaatcttgaaaatttccattaacctatgataacgtgctggagagaaatgaaaacccagggatggaacccgtactgccattcttgtagaagggtatagtgcactttctaactggatctgaacaaaggaataaaaatttattaatgtcctgttgattatatgtactgttatcatattaactgttttgagtaaatgaacactagtcgtttacctgctgaagctttaaagcaattccacacttgtcgataactgacaataaatttacttcattggatctttcattccaatggtaatcaccatccactaaaaatgcagatacatcacttagcactagattgaaattcagatacatatcctgctcttctgaagcacgggaatcccatatctcctgaagcaacaaataaaatcagtggcacattacccccaaccatgggcatataaaatccaactttcagagagtgcacgtgacctccgtccgaagaattaaattccctaggtcaagcaaaagcttggtttcatgtatgtcatctgggcggaactttgtcggaacagtaattttgggggcagcaatatccagattcagtgaaaatctaccaagggtattgtgcatcagtcaccattcaagaagggtttgacaggtaaaatataactaaatattaactatactaattagcatagaagagacacgtaagaaatggaagagacaacagcataggaaaatgcaaatcaatttcccttgctaacaaacatagaaacaacaaacagctaaatcccagtttgaaaatgtattaatcaggctagtatccatttaaactatagtttctaatgtccacatcaaaagaaatttgtcagtgtaagaacactaacctggactgatcttttagaacccgtgacatttgctgttgagcagtgcgcttcacttcatctaatgtcatcttcataaattaaaaaaatacggaagaattaaatatctgatcataggaataagtattttacaaatgaatgttgaatatacctgcacagcagcagcagtctctatcgccagagtctggctaatggtagggctactcttgaagaatgcaacgatttgatcaatagaatccttcaaatactgccacagaacaggaactttaaacatataatggtagaataaacaaatacacattaaaggttcaaaatggatagctcacagttatgtaacaaggagaagctttagccgtgaaactccagtccagttgctcatcgaaaggtttgtaggagaaaatgccaataagagaatcggtaacacttgcactctgtcaattcatatagatagcggcatgtttgagtaactttgctgtcaaatgaatttcaattttcaggtaaaagcacctaaaacaaaaattagagaaccagatgggcaaacctcagcaagcagaccatacggagataaaagcttgtaggaaccaagcttcaggtcaaaaatttttgcctctggatacattttcaagttacaacagaaatcttcacatgacagatcagcaagatactctgagttatcgatgataagcttcgatgcattatgcttcatgcgtatttcaaaatagaactgcatcaatttcatatcctgttgaacaggaatatagtcatcattttctttgtagccaataatcctattcaatctttcccaatcttcatcactaaaactctttgagtctccctcatcctttgaagagccagtcctgcacacaaaagatgaattaatttctacaccttccacaagcataaagcgcgaggtttgtatccgaactaaccatccaaatgaccaccaggactgctgcttattttgttgagcatattgatgtgtttctgctgactgctctacaaacttgtgggccaacatcctgcacaaatgatagtaaaaaaaacatcaaaaaactatatactaaactaaatgcattgagcaatgaagaaatggtataagaacatgcacatgaaacaaggcctggagcagaagtttagtttaactccatgtgttagtgcatggataattacggacaaccttcgttctattctctatggctcaaatgatcatgaagttgaacaggacactcatctattcattgtacttgtacatgtaaaagcataacaaagctatgaatcatatactaagtattattcataggactaaaaagggccatgatgtgtgcattgaattcaatataaggaaattttaaacagcaagaataacatacataatcaacaggaatattctgcaacaattgcacaaaagacaggcatgtaacatgagtagtcgttgtgtcaaacaaaaaggaatgctgagaagagccaatggagtacacacttttacattaatcaagcatttcagtgtactaaaaacaaaatggtgtacgacaaagcaggtgaataggaatatgtaatcagctccttgatgttccctgggaacagggaagtcatcgaactacaagcacatcaggaaataaatcagccactgcaatatgatgaacttcttgcactgaccaatgatcaacattcagtatgtgttacataatgaaattgaaaatatgtcaatctcaccaacttcttgctttcacatttgtgtggatagctggaacagatcttatggggcatcactaccagtttttcacttatttactatctcagggcaacatcagggagatggtaattctcttggtgcataacacagaaagcagaagtagcaacaataactagaaaaagaagaaagaattacctccattgtaaaatgacttctatatctagttcacgatcaagtttctttatatcctcgttatcatcaacaaccaatcggctcatgtcagatttcaataaggatgcatatacagatacatatgtctttctaagtcttgcatttttcagtagttgctcccatgatagatttccactgcatccattaggaatatcaacataaaataattgataaagtcatacgtacagggggagaacaccatgaaaaagtacaaaagttaaaacaatgcccacagccatatgtgattaattaataacatgctttgggtataatcagaaataggaaaagattgagagagtgatttacagtacaacaaataaatgcatcaaatctattgtctaggctctccaaattggtgctgcttgattgccttgttactgcccaactcctttctaatctacaaaaatgtttgcagcagcacagcatgtacagtttcataaaaccaattaaccaggcatttacagcaaaagactaatgctagaaatcatgaaatgtcaaaaaaggaagacatgagtctgagaatgagtaaaatagatgtcggaatgcatgcaagatttcttgttaaacatccttacagcaaactgttaaacataatcctgtttcatgcttataaacaacttcgcatgatcactatcattaaaccttgattggtaataccaactacagaattaacatcgaatgagagtaccttcaaatataatctagcggtaccatcatattccaataaacatatatttatccacaaggaatttctatctgtacaccatgtggaagccagagaaagatatgcagaaaatacacaccttgctttctttgtttcatgaaccaccaccttgtatgcatacttccaccaagaccttgggtcagatttgactggcaaagatggccggtagtgagcatatttgagacgttgattaaaagaagaaaaattatcagccatcttcaagacgtccctgtagccatcctgatataaagaacaaggcgtacacattcaacagtgccattggcacagagggagagagagagagggagagtacagaccttagacaaagacaaagtaacgtcatccaaatcaacagctgcattttgcaaagcctgtccggttttctttgcttcatcaagttgtatcttcgtatatttggctttgccagagataggtcgtaaaatgtaagtgtgtgtttttgaaggaggattagaactgtcctgctttctgaactcaaaaatctgaaatacaatttatgaagcagcaagaatttgtcaagtggaataaaattattggatgtaaacagtgatattggcatgacccagcttacgaaacctcactgcaacccagtgtcaggaaatctaggcacagtttatggctgttcagttagttaatgaaaaatggacgactgtatatgtgcagaagtatacagtaatgatcgatggtatgttttgttattaacaccgccaaagtgccaaaattatggatggggaacaagaggtgagattaagagatagggatgaaaatttgcttagtcctctcaaaagataacatttcctttatataagacctccctaacaatctcagttgggtaactaatagattagatgtacagctaaagctaattatgattgttgcagctaacttgccaacttcctgaacaagctaggtgacatcctgctgtatgcctgccttcttgaatcacttaaatggtcccatgcaacaggacaggcagtcatggcctcgtgcataatatatatgctcaaacatcaatttttttattagcaattgactacagatggaaattacctgactccattctgaaggtaatagatcttcccaggacttatccacactccaaggactgctatcagaatcaaaatacaatgccaggctctcaagttcgactgactgcaaaccatttgcaaataaactataaaaaatcaagatccattggtatgaaaattatgaaagattgtcacaaggaaaagaaaatggacaagtacattacgccaaagattcttaatcaaaatacattcgcatcaactagagatgtttcttgtgttccctactgttctagagttcaaccttctgtttcttgaatatcataaaatacatcatatgcgctttaagctgttcgatacaactatacatccatagtgctctcctccatcactctagaatttgcatcaacaaagttcactactaggctgcggatggctttgtgtcatgataatagtgtgttttggcacctattgttgtccaaattaagatttgtattccttaaacgaaggatatttgaattgcacgccccttttttgagaacggaatgtgtcttatcgaccaaatggcattgaaattggtgtccatgccctaactttactttccagaaggtttagtagtgagttgcatagagataccggtatccaaaaagtaaccagagctattaaggattatcaaattagtgagcaccaaaacaatataccttcttaactcggtccaaatccccgcctgtggcaaaagtctcctttccacgatcatccacagtaaatgctgaaagctttgagagtgccaaacctgctgcaaaagggtggcctggattgctatagagaacaagttattatcattctatatgcatttttaaggagaaattcagtaaacgggatttaagtacctctctgtgtcctcatatctgatatgaatattgctaattgacaacttaatatttccaattacagtgctaatgaaagacccaagccatgacgaattcttcaagaacaaaagtgccagtaagaaataaatgaagtgttccaaaaataatgaatgttaaacacacaacatcaatcgaaacaaaggtagccagattgactatctggccaactaggtgatccattatcatcagtacataaacacatcagcgaaaaactaaaagggctaaataccagttcagatttcagctgttgttggctctccaataacttcatttccatttcctgagtgaataaccacagatcatcaatgcatatggcactggcattgtttccataactcactttaaaaggtcacaaagtaattaccctgactctacttctttttgcctcttgaacggcatcctcactgcaaccttcaacttgtgttgctggttcagctaatataaatattcgatcaagataaaccaaaactggctcttgaccaagcctgctccacgggacctaataatcattcacacattcattctttagctcagcacttcatatcttaaggcaaaagtaaatgcactgagctgaagcaattacagcaaaccttgagcttcactgaaccaagaaaaccagctttcaccctcacaggtaactttaatgaattgagagcctcaggcttcaactgcatgttcgtgagttctacatcacctgaaatagtatttcaaaaaaatgtaatagcattaagcagcaaaaatggatatatttcattgataaacagggtcaatagctagcaaaaggaaaaacaagtgggtttacaagttccttctggtatttgaccaagttctaggaacaacacattgtgttctactctaaatataataaatgcatgccattgtctgttctgcaacgaatacatgccactatttagatgaaacagcttaatatcatagaatattctataggtggcctgaggagttcccagcccatccgtccatgatgccacatgatggaattgccatctgatgcctactgtcatatgcttctcgtgataaatagcatcgtgcaagttgaacaaaatcctgtgcatactttcatgaactattgaaatccattccatatacaatgtgaatttacctacaatcgtcgtaacatgcaaaccacggatacattcgtttgatttgtctatgcaatcactcaaacaacaatttccctcaaaacatcttgatgctcttactgccaaccatcaacacatgttttggttgattggcaccatggaaagcatatacctagtatatgtatgaatagaccatccaactttacaattcttcacagaactggtaacagagaaggaccaacttcatatactttatgcgctcaagctacaggatctacaagtgaacaccaccctactcttgttttcttgcatctttatctagtttatccgaaaggaatggtcgtctagacagtcagaccaagaaaatcatacatagtgatagtactactactattccaatgatcaccttgcatatttttagccatacaccacattccaggcttccaggccataactgtcagtgataagcagaagtaaattgtccaaaccgataaattccctaaattctgaattacagttgcaactctgagcgctatgctcttgtagtgtcgagtaacagcatcaagatgtgtctgttagccagagaattcaagcggtttctggatttcacctagaggacatactggtggcatgtctaacatttgccctcaatcttcttacatggctgcagctcttgaatggtattcgtccatgttaaacatcccagataaccgtgacatctccacccttctctgacaaacagcttcctaattcaatactctgagcacctattaacactccacgatttgacagcaaccacaactcacactctcacagtcgccaaaaagcacttgtatgaactgctgaggtgctgataccagcacagcttgacaagatactttcgatctgcaaagcacttcccagtcactgctccgcattatcgacattgtcactgcttgtaccaacacttgcattcacgaagtttatgttccaattgtggtccacgcatcaatgccagtcagtttagttcagaaaaccaatgcgtacacacaccgatggtccaatcctacattgctaccaacgaaatcagcttccacatgaagcagcatcttatgcagacgccagccatttccgatggcacaaacgaatccaacaatcacaaactacacactcagattgaacttcctaaaactcccaaaccatacgaaatcgctgctccatagcgattcgctacctaccactgtttctgctgcaaccgccactactcagaaaacaaagcagagccgcagcaaaagtagagagtagccgactaaagccgcacgaactaatcatcatcgacggaagcagagcgagaggaggatagggaaaggggggggggagtgcgaatgaggtcgtcacctctccacacgctgatcttgagggcctccttgctgagcccccggacatagttgccgaggtacttctgcagcaggaaggcgacctggtcctccaacatctccgccgccgccgccgccgccggcgatcggcgccgcccgccgacgccgcgagagcgaagaggcgagcagagattggggcgagatgcctcgcgcctcctcctcccgaccttccctccgcgcgcgagagatgagagaatcaatcgagggcactggactagaactcagtggaagcaggcagtccaccacgggtagtttctgtgtcgaggtaggaaaggagatcgctagaaggaggaggagaagaagaaggcgcgaaaattacggagatgccctcgcggtcgcggctgggatgagacgggtggcgtggcgtcgggcgatgtacgtggtgcgtgctggttagttaccggctcggtctgagtcgtgtggtagtgtccagagaaaatacacctggatttgttaattagtaaattaaataattaattgcttaattgcgatcaaaccgaagggcgagaagtaattagaaccttttttaatcgcgcaagctggatggatggtcgagcaaagtcataatcacggtagcaagtgactaccaaaccagcttattgtcgttgatgaaagattaggaaaaaggaaagggaagagaaaagaagaacgcggcgtggcacgcaaagtgcttaaccaaagcaggcaaatgtcgacgggggatgtggacgacgctgacgccggatgcctcgtgtgcggggcgcgcgtgacgactcgagcgagcacgcaaagctacctctgcggcgttgtgctgccggcgtggccacgcagcccaaggcgcagccaacgacgacgcgttcgtcgcatcgcccccggcacgagcgcgacacctgcccctctctctgccaccgcacctgccaatacgtgagccgcccgtggataggggcaaccgaaacaggataacaactgaggctgggtttaggttacacgctaaaattgaaagtttgaagaaattaaaacgatgtgacggaaaagttgaaagtttgtctgtatgaaagttcgatatgatgaaaaaaattgaaagtttgaagaaaaaagttagaatctaaactaggcctcaaagggtattttcctcgtcatccactctttcgggcgtgtttgtactttggaggagtataatgtacgtgtgtatatttataaggtgagcgtgtacgtgttacatacgtttgcgtttataatgtgtttcaaaaaaaaaaaagccgcaatgctacacacacagcacatcggtacatcacaggagtatgcaagtaacattggttagactgaatgactgagtgccaactactgtcagtcggtcagatgctatactgatgctaatgcaaaaggatcaatcaaaggaaaagaggaggaacaaaagtcacctcgaagaacaactcctttggatgccggtacgctagcttggaagctcgatggcattggccaaggctgtcttcttttcgagcttattcctttcttctaccacactctgctagttacttacaagaatggtgatctgttctgatgggaaattcccgctttaccagcccatctggaaagaagcccgtcaagagcatttctgctcttccattttggagtcagcccagcccgttaagagtaagctacactagcatttggcccacgtatcattctactgtcatgaccgactaggcctaaaaattaagcccactagaactgttcggagttcggcccaaaaatcacccttatacataaaaatggtttattctctgggatcaaatgctttcggtcattggatttggagatttggagtttttcaaatgaaacggaaaaaaatgctttggtcattggattggcactaccaacgtccagccaatgaggtcattaggcaaatgtcagtgtttatcttgcctttgatcctatagaaaccaaaaacggatgatgacaccatttctagaacatgtctttttttttaagtacgtgtttgaccattcgtcttattcaaaaaatttaaataattatttattcttttcatatcatttgattcattattaaataaattttcatgtacacatatatttttacatatttcataattttttttataagacgaacggtcaaacatgtgctaaaaagtcaacggtgtcaaacattttaaaacagagggagtatttgtcaagcttgctttctcttccaagccactcgtattgccatgcgattgcaaaaactttattccttctgcggttctgcctattatctttatcgtatatgccaacctttttttcttctttcctccccagaacgcctatctcatttgactagtttgcacctgacaactacctcattccccatcagacaacaagacatatagacccatacaaagttgcaaactataattcagatacggcaagtagcaacagaacaagatgagacaacagcgttacggttagaatatcacacaggtggcaaattggcactgatccatctgaaatgtgacgcccattttctgtgtgcaaacatgctcgaataggagtgtgtgcaccttgtttatggtagccaagatcgagagagaagcaaaagcatccatccctctatttatctgtatgtcagagctaagctcaaataatttctcctgcctctgatgaattttcaggcatttataaacagacaaaaatggtaacatcattcaacactcatggatcttcatgctcttagaaaaagataataatacctctaattctcagacgtgatgcacgtgatcacctgtttacatgcatcttgatgatgcggattaccagtccaatgtaatcaaacaggcgtgtttaattttgtgtagtacgggagatcaatcaattcaagattgacatgcaacatgcatggatcgagatcgcagtggcggtaatcaatgggttgattgggttgggtacatatctgtcctactggttgggagaatacggattacagtacgtccttggtgtatgttcagaaagaaattggagtactggtggtagtaattaagaggagcactgtatgagaatggagtacagataagtataattaactggtagagagtaaagaaagattgttgggcacatgatccttgcctgcccaagaaccgaaagcatgaaagaggcggcagaaaagattcagagaagtggatatcccctgaaagaagcctccagataaaatagccttattccaagcaaaactgatcaggtgacctcccctgaaagaagcctccagataaaatagccttttgagaaagcttagccagcaaaaagtaaacgatcagttactagtgttaatcaactgcaatgatcagtgctttgcctaccttggcctacaaatcaaagtactccatccgtccaaataaaaagacaaaccctagattttcgtgtccaaatttgactgtccgtcttgtataaatttttttataattcgtattttcattattgttagatgataaaacataattaatattttatgcgtgacttatctttctatatttttttcatattttttttaaataagacggacggtaaaatgttggacacgaaaatcagagttgtcttttttttttttggacagagagagtatctatctaggttagcatgctctgagctggactcaagtagtgtagtcaagtagtcgtatctgtcaagctgtgtgcagaaagccaagccaatcttcaccctgatcaagtgatgcacacaggtgaaaactcaaccttgtcgattatcttgatgcccattataaaagctgacttgtcctagagtgattatgaatggcctgaagcgataacgtacaccagttaatgtgtgctagtaaaggttttgttggattaattgccgatcgatcgattggtgattataaattcagaactgcagttaacagcaagcagggttgcatcgatcgattgccttatcatctcgcaaagcgatatgcatgatcgatccatcgatctactttggatttcacgctaatgtacatgcatgcatgtggacagacacacatgacatacagagtacagtttggcacctttcgtcgctgccggatcgaattgatgaactaacaaacattccggacagagtagaagagaaggaacaaatcaaaatcgatcgaagctgcgtacgcaagcgccgatgatcgagtgagtgacaaggatggcaaaccagactcagcagatgatggttgagatcagcctcgatgatctatctatctatctatctgctcgtgcactgcgctacaggccagcagctaaaattcgacacgaaacttagggggtgtttagatggggctaaaactttttagcccatgtcacatcggatgtttggacgctaatttagagtattaaacatagactaataaaaaaactaatttcataaataagagctaatccgcgagacgaattttttaagcctaattaatctataattataaaaagtttactgtagcatcacattgtcaaaatcatgacataattagactcaaaagattcgtctcgtgaattagtccaaggatatggaatgtgttttgtaattagtgtatgtttaatactccaaattagtatccaaacacccgatgtgacatggacttggaataagtcactggaaaccaaacaaggcccttatcgatcgagagctagctagctagatagcgtcgacctgatcgatcgtggtatatactctctccattctaaaatatttaacgccgttaattttttaaaaaatgtttggccgttcatattttttgaaaaaatttaagtaattattaattttttttctatcatttgatttattgttaaatatatttttatgtatacatatagttttacatattttacagaatttttttaataaaacaaactattaaatatatttaaaagtcaacggcgttaaatatttaaggaacgagagagtatcatcttgatcgactgaatcatccttaacgctaaaaagacgtctacgactgaactcgagatgggcgagatcggtgcatctggttgcattggatggatagatcactcgattgatgtagttgagaggaaaaggcgatcgagatcgatgcaagatcgtccacgtagccgtcgaacatgtcctgtcaggttaggaccaagctgacctggcagccactagcctcgagtctgcatgcacacgcatcaccaatgtgtctaacaaactatacgaagcaagatgagccctagcgaaaaaagtagtacatccattctaaaataattataaatatagattgtttagtatatatttaaaaagaaaaactacgataactcttattaaatagtgtgtagataaaaggctcccatcggatggcttaataagccaaagaaaaagccaaattttgagattgattttgaaatattttcaacgtagtttctttatcaacattgtcttttaaatcaccaagaatacatttataaaaattttatctacaaatttatttttatttcgtaataagccgttttggcttattgggaaataagccaaacgatgggaaccaaaattgagatgaaagttgagagtaacatagaaaaaaaaaattaagtatattatggatgctctaagtttattgcaggatgcacatgacgggacatggcactacgtagggactgcttagcacaactccagctgtacctcagctaaacagtttcagctccacctaaaatgagagcgaaggtgggttgagctctctcacaaaatgaacaagaggtagagttgggtttaggcagctccactccatgtctaactcctggagataaatttagaagttacggctcgactgatcattgtagctactagatgggctggcgatttgggcccacgagctagctagtctccttgacccacctgtcagatgccacccagcagcaaggaacaaagttgcagcaaatcgagcgctcgatcgtggcagatcgaactttggcatatatacacgtaggagtagtttatatgtacccagtcgtgatggatatcgagtcgtttaaattgatttcttccatgtgtgtttgggcttcttaacttcttttgcgtgctgtatagtatattgcattatgatcgagtacaagtacacgtactcctacactgtgccggacgcaagtttgctcgttgttgagtgtgtgcaccgatcttgatcaatgatactctgcttagccactattactacacgtgtattaagtctagaataaattggtctcgcttgtacacacttgaaacattataaacatgctactatgtttttttataagcatatttgaatataatttaatagtatgtatgtttggtgttgaaaatattactatatttttttataagcatgattgaactttaaataattttaactttagaaaggttaaattatcctacgatataaaacggagctgtatacactaacttctttgcaaactgaacaataaaccaaaataccactgcatgcatgcatgtgtgcatttcattgtggactgctcctttcacggtgcatataccgtgtcctcctgcagcagctgatggagatggatatcaacggacacgtctggagtagcaattaactcctcctgtgactttttcagaagatgtagctcatgacacaagtacgtaccgtgttgacaaaccatacaagaaaatcggagttttttttttttgtctctctacacgccgtgctggtcggtcgacctgttctccacccgccagcaattaacctgcactcgatacaaccaacatgggccacgaattgaacactaccgtctaccgtacccctccgattttttatagaaaagggccttaattttttttacattcgatttacttcaagaatcaatataaatataaaaatataaatcacgtataaagcatctttaatagtagtaaatcaaataactgcagaataaatatttttaagtaagacgaatgtttaaagatatgttaataagtaaattaactgtgttttcttaaaaaaggaggaaaaatagagagcattgttcgctccccactctattgctgaaatgaactggcatttcattactgaaatacaactggtagagtaaggttttgtctctacgcatcacactggtgtgacggtgtcatcgcaccgcgatgcaccgaacaaaaaacaactgctacagcagtgttatgcagtatactaaaaatcagagatattggtatttagcagcagcatcaaacatgtggctgctatctatacgtagtatcagtctgtttagcgttgcttgatgtatccttggttagtacgcaaccaacaagtacacgaggaaaaaaaagaaacttgacaagggcagggcatgcaaccaatatccgtaccaattccagtacatccctggaaattcagaattcaggcggttccgtttcaagctgacgcttcaattcagacttgagacgcaacatttttcttctcttcaaaaaaatcttcagagaagcaacaataccacacctacaacatttctaccacctactccacagtgcacagtcttggtgggcccaattctggacagcggggcccatctctactacgactgggcccacgtgttaggaactcccaacgattatctctcaggaactggaattaatcacgaattgcgcatacaagatttctcaaccccgaaggatcgagccgccgccgcctacgcgcgcatattccagttcttagcccccatctccttgttcttcgtttgcgtttatattacatagtttcggctgatctctctctctcagacagctcatgccagctggttgtttactggacccattggtcacccttgtagcgtggattgggcctccttgctcttggcccaagctggactggtacttgcttcttcttggtcttgaagtctggttttcctccttgttcctgggcatctgcttccttgtcgtcaggctccagcacctcttcctcttctgctccttcttgtatcatctcttctgtatcttctcttgctcttggtggagatggaggcctgacaccacggcccaacaaagcctcctccactcctccgctattgattcgctgctgcgttttgcatcgcgacgcgcgcccatccggccgcccggcgaacaaccgacagcgccgccgcgacccactcccggccgctcgatcgcgatcggacggccgcgcgcgccctcacgtgatccccgcgcatctcccgccactacgcccccctcgcctttaactgcaaatcgccaaccgcgctggtgtctggtggtacacatctcgcagcactttttactgcagcaactgtacaacggaccaaatcacacaacacaacgcagtaaaaagaagaaaaaaattgcactctagatcgatagcgatccagtgtcagtgactgtgattaaccctctgaaatagtatatgatcttgactaataatgatacaaccgagcagaaagatgccaattatcatttggtcttgactaatatgatctgataacagagagatcgaattgattaagcaatgcaaaaaaaaaaaaagaaactaatactaataaaactttacaatttttcattcattgttcagagtttggctttcaatggccatgcatgtcccgaggaggaggggagcaaaaaaaaaaaaaaaaaaggcgaggcatttctgtaccaatcgttttcttttttttcacgagatgaagacctgcacggtgccggtgaccgcgccgcggcacgtggggcaggcggcggcgatggcggtggagacggcgggctcgcacgcctcgcacacgcagaggtggcggcaggggaggaggacgacggaggacggcctcgcccggcacgtccggcacggccgcgacggcggcggcggcggggtcacctcctccactctgtccgggtcgacgaaccccgactcggcgtcgtccgcggcggcggcgttggggttgatgttgtcgtcgtcctccggcgacttgctgcccctcgcctgcgccgcggccgccgccgcctgctggagctgcgcgtggagcgccgcggcggtggactggtcggcgagcgccttcgcctgccacgccgccgcctccgcccgcagccgcgcgacgcgctcctccagctcggcgccgcgccgcgccgcattcgaggcctccgcctccttctccctcatccggcgcgccgccgccgcctccgccgcgccgagcagcgaccggtagtgccgccgcctcacctcgcccagcgcgcggcgcagcctctccgtctgcaacaagcaaaagcgacgccaccaccatcatcagaaaacacatcgccgaacaccaccagcggcaagcaacgaatcaaaacgatcgacatcgacgatcctcacatgatcctggaacatacgcgccatctcgttcttgcaccggtcgaactgcgtggcgagctcgtcggagaggagagacgacgcggaggaggtggtcgtcgtcgacacgtgctccgacccgccgtcgtcgaagtcgaggcggagccccgtcgacgccggcggccgcttgttgtgcagctgcgccaggctcaccaccttgtgcccctgcgcctgcgcctgcggctgcagcgacaacatctgcggcggcggcgcagcaaccatggccgccgccgcatccgcctctcgcggccgcttcctcgagttgcccccatctgcaaaaaacaccatccatctcaatctaatccaagaaccggggaaaaaacacgcagatcaagaatcaaaggcgatcagttacctccatctccatgcgagaagtccaagaagaggggaggctgctgatgctgctggtagtgatactccatgcccgccggcctggtggtctccggcgagacgacgacgcctctgctcaagaaatccaaaccaagaacaccagaatcaatcaccccatccatcgtaactcttccccgatcaagagcagcgacggtgagtacctggcgaggaagagaggaggaggctgatgctgctgctggtggtgatggtggtggtggtaatgcgcctgaactgccattggtccgcggcaattgcaagcaaggtgggggaagaaaaagaaggggggaaggaagaggaggaatgaatcgaggcgcgcgccaagtgtgtgaggaggcaccccgggggcggtggtggtaggagagagttgcgggcagcgcgagcgaactggtcctctcctcctctcctctcctctcctctcttcttttaatcacggcttcatctctctctcgctgtttcttttctctctcacggtctcacctcacacgcatcgcctggcatcgcgcatgcagacgcagcagcagagagaacacgaggaggcggtgacccgctgttgctgctgatcgactaggacgtatttattcctccctcctccccgaattggagatccattacgattgattcgcatttgcgttacgtgaaaacaaaactggagtttttgaatctacgcatttaaattgcaccgtgttcacactttttttccccgtatggctagacaaggaagtaattaacccatgttctttttagcgtatattcaccgaattattgaaatgagatctaggttttaaaaaacaatcctattaaattgcttagacctttcatattactccctccgatttttaatatattgcgccgttgattttctaagatatgtttcaccattctcttatttaaaaaatgtaattaccatttattttattatgacttgatttattctcaaatgttctctaagcgtgacttattttttttatatttgcataaaaaattaaataagacaaatgattaaacatttgtcaaaaagtcaacaacatcatataatgtattaaaaaatggaggtagtatttattaagtttattttttaatttatctctataattaaattgataatttaaatgaaacggggccttaatgtgctgatgatttgtattgttggtgagtataattagccttttcctttttgatagattttttcctttccgtggagctaactacaataattggtgacgatatactactaattttatcatggggaaaacgggcacgaaaaacgctttgtttttttttttttgcaaacggtgggctttgggttggtgttgtgacttgtgacatactatcagatcatgtcacggaactatcttgagatttctttcccttttgtaatcaaatctctttctgtgaacgatgatgaaagctgttgaaataccccaagctctcttgattgcggaataaatctgcaagatatccaaaagttcattgcaacctccaagggctctaaaatgtctggcgtgcatttatcaatttcgcgcatggcaaccaataaaacaaggttaaagaaagtgccattgccagctatatattgcgaattaatattctgatattttttaaaagcatgacatgtttttcttgtttcagagtccaaaatattctagccataaagttcgttacgaactgtttgtgcacccagctgcatatgccctggctctccgaatttgagcggcaatagctatggctttctttcaccgataatcacgatctgaaaatttcataaatattggaccattctatgattcttttattattttctcctaatcctacggttccagaaaacaatcataatcctgtcaccttctcgtatgcatgaaaatgtttaattccagccgtgcaatcaaaattcacacttttcacattgccatgtcagcgtggtgccgttttgtacgctccaaacacattcgtgatgtctgaatttttgaatggtgaatgtgttgtcacttagcatcttgtgttcttggcagagcgaataggtcagtgtccgtgttcagtttcagacgagcagattggtagattttgagttttagacggacagattagccggctttaaacagggtcgtcctcacgtttatattcagagtcctgactagataaacgaggcctgaaagtctgaaacacatgcgacgtagctttcgttgctttggtcaagcacaaagccatggtttgatggtttccatcgtcaagatcgattgttacccactagcatgtccagtagtaccactatgatttgaactgctgacagcttgctcattttcgtagcaaatgtcttgtttttctttctaatttcaaggtatagctagacgggcgtcttctgaataaatacagactacagaaaagcttgcgcctgagaattttactcctatacaagttcagagccgacaaattaatccgagctaatagtatactatagatataagtacttatataggactatgctagacgtttttattgtaaccttggggaagtagatggaaataaaatattctatccgttttgaaatgtttgacactgttaaccttttacactttttagcatttgtttgaccgttcgttttatttaaattttttgtgaaatatataaaattatatgcctatataaaaatatattcaacaatgaatcaaatgataggaaaagaattaataattacttaaattttttaaataagatgaacggagggagtactaagttagcttttgtttgtttttgttttgtttggtcaagctgtaggttaactaggggctgcacagcaccaaggaaaaatgaggtggtagtggctgcgttaccattcaagacgaggcgatgggaaagagacgttgcattgcatactcgcagtcgcatgcacacgcacgactgactgccgccccgcactgtggtctggcctggttgactcgccgaacaaaattacaaaaaaacctgaaagaaatcaaagcagaaaccgcggatgcgtccgtttggcggaagcgatgatgccgatacgatgcgattgcaacgccaccaacacggcaacggcgataggaaaggcaccgcagcagcagctgcagcctgcagcgcgacgcgtcgtgtgcgttgcgttgccagtgccagtgccaccggggcacgcgtaccaaaccgtgcagttatggcggttatcatgtaagataatgtttctgaaaccaccatatatatcatgatagtcgtcaaactacaaggttgaatgtggccctaactttagacacatgcatggagcattaaacatggacggaaaaaaattacatagtttgcatgtaaattgcgagacgaatcttttgatcataattacgttatgatttgacaatgtggtgattaattaagtttaatagattcatctcgtagtttacaggcggaatctataatttgttttgttattagtctacgtttaatatttcaaatatgtgtttgtactaatttttttttatcaaaatcaactaaacacggcctctattccaaatggtttggtaaacatggttctgcactcgcgtggcgtccaccgtccagcggcgtaggctgaacgcgaagggcacgaccgacagacagacacggcgccggatgccgatgcgcggcgtcgacggcgacggcggcgacgacacggccgcgtttcgtggacggcggggcgctcttcttttttttacctatggtctcgagctctgcatctgcacggagcactgtgctgtgctgtccgtacgatgttcttggcaggtctctctcctcctcgatcgaaatggcagcaggcctccgctccgctgatgttaaaatttgtggacacatctctcatgttttcacgcgaaaaaggttgcgagagacagtgcaatccaaccccatttattactgctttcttcttctgttcatcgggtattggagttactagcagtctagcactactctgcgttgcggatttaccggtagtaaaaaaaggacaagcatatgctttcccgaaagcaaagccacgctgatgcatagtaggaggaggaggagttacgccaatggcagtcaaaccaaacgtcgtcatctttctcatgctgataggagtacgagtgctccttttttttcttttgtttttcatttgtttatatcgatctagaagtataagctcagtgcatcgagcagtgctgcaagcagaaacctgagattaataaattagcaacaacagcagcagcagcgatgctccactccactccaacaacaaaaatgaacggcttagctaagctctattacgagtagctaattaaccccggttgttagtgcatctaccactaattgacctgttaccacttaccactaccctaccctatggcatgcattgcaattcgcaagcaccataattaagcatcatatcggggaaaggggtaaatgcaatagaaacggaagaattgagtatgaagtgcattgatgcgtaccatgcatgcacacgatgcatgatatgatttccctttgcaagtgtaacaagcaagcagcgaatcaatggcccggagaggtactatgacagtgaagaaaaggcaccaacatgcaacatgcctgcactgatgcacttcctagctcatcttggaattcgcatgcatccatgcatgttgcttgctaaatcagcaggaattaatacttcaaccactatggaggatcgatctatcggtcgtagcactgccgaaaggagctacatgagaatagaccttttttttttttttttgacacagctcgcttcagctgcatcttttttaaagctgaagctcagacaaacagttttagactctgtttagatgagactaaaactttgaagtccctatcacatcggatgtttggacactaattagaaatattaaacgtagactattaataaaacccatccataatcttagactaattcgcgagacaaatatattaagtctaattaatccatgattaacctatgtgatgctacagtaaacattctctaattatagattaattaggcttaaaaaatttgtctcgcaaattagatttcgtttatgtaattagtttggtatgtagtatatatttaatactctaaattagtgtctaaatacagatactaaagttaagtctctggatctaaacaccaccttaccttcacctaaaatatagtagcggaactaggtgaagctcttacaaaataaattacagatgtggagcagagtttaggctgctaaatttaggagttgaaactctacttaaatagaccctaaccctagttaggagtaatttaattacttactaacacacgatgcgtaatcgctagggaggtcggcaggcaacagcagctgtggcatatgcatgaaaggtgcttgccaattgccatgcgtaatgggatgcaatggatggatggaccctcacgccgacggtggccgacgtgtgtgttatcgatccacatcgtgatcgtgatcccaagtcttcaacagccggcgtacgtccgtacgagttgcctgcgctacatgaaatgcaggttcaggtagctaatcaaacttcttcactgcaaaagaaaaaatgaattaccccctccctccgttcaaaaaaaatctaatcctagttacgaacctaaacatatactccctatgttcttaaaaaaaaccaattcctgactataaatctggatgaggaattgattctttttgggatggagggagtacatatctagacttgtagttagggtttatctttttttttttacagtctagtacttcctaactcgatccctctccaaatgttcacgtgcatgcatatagtctgaattgtatatatttagaacatgttctttttaagctattttactagattattgaaacatattatttgcggatcatgacctagaaaaagctagtaatatgaagttgttgctttttgtctttgagcaattatcgggtcttaagataaatttccataaaattgaattatattgctttggtgaagcgaaagattttgaaaacgaatacatggaactctttggttgttccactggtcaatttccatttcggtatctgggtatccctattcattacaggagattaagaaatgccgattggaaggaggttgtagaacgctttgaaaagcgtctaatcagttggaaaggaaaactcctatctaccggaggacggctaacattgattaattcggtgctaagtagcctcccgttgtatatgatgtccttctttgccataccaagagggatacttacaaagcttgactactttcgctccaggttttaatggcaaagtgatggtcaaaaaaaagtatcgtcttgctaaatggaacatactgtgccgccccaaggaacaagggggattaggaattcatgatttggaaattaagaatatggctctacttagtaagtggttattcaagttgctctccacggaaggggtttagcaacagttgatgcgtaataagtatctcggtgataaacctcttcctcaagctcaatggaaggcaggggactcacacttttggtctagcctcatgaaggtgaaatgggactttctccgttttggatcctttataattaaagatggctcccaaattaggttttgggaagacaaatggttgggcaattcaaccttgaaagaacattatccttgcctttacaacatagttaggcataagcacgctacagttgcacaagtcttcgaaaacaatcctccatctttttcatggcgaagagaccttataggatcaaaactagcagcgtggaataatttattaccgcgcatcactggttttcatttaactcaggagcaagatgagtttcattggaacttaacctcaaatggggagttctcggtgaagtctcattatctagctctaattcacagcaatgttcccaacattaataaccgtctttggaaattaaagatacccctaaaagttaagatttttctttggtacttgcgccgtggagtggtgttaacgaaggacaatttgataaaaaggaaatggcaaggcaataagaactgttgtttttgttgcaatgacgagacaattagacatcttttcttcgaatgccattttgccctttctgtttggtccatcatctaaacaacatctggacttcctccaccatattgtgtagcgcatatgtttgggagctggcttgatggaattcataataatttgaaatcacatgttctgttaggagcagctgctacttgttggtcgctttggctatgcaagaataatgtgatttttgataaaaaaaagtcatatcttcaatttgcaggttttatattctcttatccattggcttcgtacatgggctatcctacagaagcttggttcgcgggatatggtagttgtggcatgtcaacattcggagaaggtggtcaaggagttttttacccagagatatgggtggtgatctagtcttagaattggtggtccttaaaactctgtgcttttggaggagatgaccaaggagttgttcatgagtggcaatttagtcgttagattgatggtcctcaatactccatgtcattcttttttcctttcgagtgtggttttgtttgttcagctgtgtgcatcttagttatgtagaggccggaagtgtgctcaggataattgtatcaccttgatgtaattgactgagttcaataaaagctttcattatcttaaaaaaaaatatttgctttatgttttaagaaacatgtttctcttttagctatgcactcaacttaggggtttaattgaaaagttgatgggtctccacgctatggatcaaatagagacatgtaccatgaatattatagtagttagaaattcaacaattatcatattataaaacctagcaattcgctcaagattatgataaaattcggaaatggtggatatagcaataaaatcattttcatgctcacattattttcactatttttctttatttttgtcggttactattttcacactgggtcggtaaaagttagaaacgaaacgttgggtcagggattttccgtgaccacattctcctccataatgcacggggccagcctcgttttgttttctggccctctttacatttcaacttttttttaacttttaactttttcgtcctattgaacttttttagggcatcatcaatgtatatagggcaagtaatttatatagatgggacccacataaatagactttaactatagcaatctctacaatgtatatagatacaaagtagcattaggagatgagagagagatagagatagatagtattatttattccatatgggtagtccataagcttatggatacctttttattattttctcaatatggactagttgcacaatggtaataggtagctgaatgaaatataatattgcttatggactacttttatttcacattgtggatgcccttatatacataaacttccaactttttcgttacatcgttttcatattgttttggttacatagttttaatttctttaaacttttaattttggcgtggaactagacagttgcgttgttttcttttctgttgcgttgcatctccagtgatctgtgcgtctgtgtgggggcaacgtgatgttactactgttgctgtaagagtgcaggagtggaagctgtcgagtcatcgagatacgcgaaaagaaaggaggaaagctagcaatagcatagcagctcggtccacgaccacaaggcaaactgcaaagcaagcaaccaggcaggcaggaaaaccaaaaccaaaaccgaaagggattggatttcattcactgatgattcctttttccccttgcaggattcgattcgatcatctcactgcagttgcttgctgctgcattgcgcttgcaggcagcacaaacacactagcaacactagcaggagtacacgatacgctgatacgctccgtctaataaacatctgatttgatgactctctactcgtgatccacggcaaaactattgacagctgaaagagacttctcctgctgccgttgcttgcttttcatgagtattacacaatgccgttgtcactactacctgtacttgacagcagctatatactgtaggttgctccatcgatctgtgctgacaacatggattggttccactagctaccaatggttggtctttagaggtttttttaaaataatgaaagctttattaagacttagttaaatacatcaagataatacattccaactgagtccacccccggcctctacatagaatgcacacagccaaaaaactggacctaagaacacttcctcatcacaaaacacagaaactagtggctatcaatccgtagactagatcgccacccatgctcctgggtaaaaaactcctatgccacctggtccaaacgttacgataccacctgatctttagaggtttggcggatcaaacgacgatggatgcagtaacatgaaagaagaaatgcgtgttttgttactagtagtgcaataataacaagaaaaatatatactatatgggtaaaaagaagagcactgcgtgggtgagtgcgtgaggtttatagtgctcgtgatctgaatatctgatccgatgctgctagctgctgctggtcgattgcaactataacgaccatttgaggtggggcggctcagctcagctcgctgctgcgccagaatttacgctactcctcctactacctgctctctatatacaacctacgagtatgactatgactcacccatccactctaccgatcgatgcatctatgcgaagattgaacagccacagtgctcgccaccatcgacgctgatatcgattccatgcatcttcccgtccaaagattgaacaaccacaccgcatctatgcgatgctagtacagtactacgcagagatttggttcttaactatcattgccacaattcacttcagacattgtagtttacatattgtaagctatacttgtagctaaaaagctaggcaaatgatcgtgtatatgacatgtgggacaaggtactaagaaagtatcgtaatcacaactataacaatcaatctaacacaaggttaagaattagtgatactccaatgtgtattgtgataagttaaagcattgaaccaaacgctctccgcatgcaccaaagcaacactagtacattgaaatgaaagaaagagtgtactgctggtgacgcagagctgccgacgagatctgaagctctgaattgatatctctctgaatctctggaaattggtgatcactgctcaccgtcctacaccgagtcatcatcgcccattatctctcattcgcagcaacaagaactgaacgaaacgagggcaaaaaagaaagataaaattcatgagcccgatgtcgcagtcgcgtttccttttcagacctcggagctagcacggcgcgccacaaagcttcgctttaaggcaaaatgattcattgattaattcccagtttctcaccacaaatctggttgcatcttcccttcctctccttccgcttgaaatcttccttccttctttttctgaagtgacaccaaaattcgtttttaagagtagtttctttcatgacaatacaactttcagtacaaggatctaatttatgatcctgcttttacaagaaatatactcccatatgttaggacaggtccacttcaagcaagagcactcggttcggatccagcaggtgccacagcttattccagcatttcaatttctaaggaatggaacgatggattaatgcgcaagctcaccgtcactgaacttctgaacggtgttttttattaaaaaaaagttgtgtatatgaattccttagaatattgttttaactccatttgtaactttgaacaattatcacaaatttttcagccattcatccattcggcaaaaaaagggggggggggtttagatttataaccaccccatatgtttgtcaatagaatgcttatttggttttactactactcatactttacaggagaaggggaacaaaatgagaaatcaaagatagcagctactacctccgtcccatgaaaaatcaatttagtattgaatgggacgtttcctaatacaattaatctgaattcaaggttgagcgggagtacagcaaaaatgtgaccaggtgatagccaatccaaccgcaagcaaagcagccagctgacagacgcagaacaggctctcgtgaagcatcagaaaagggttgagatgtcaccgatctccagaaatttaagaagcaaccataaactgttcttgagcgacaaataaggctttcgccttaggattataaaatggacatgcatgcatgtgctttcaagaaaatgctgctagtactagcactgttccttccacaagctaccatcacaggcaggcaggccactaattagattcagcagttgcgtgaaagattatctgtcccagaatccagacctcacaaccacaaggatgacaacaactggcaccactaattcccaagcatcttggcaacatcacaatcaaattggagtatacaataaatggatggtgaactgtaagaaattagccccctttttaggtcatctgttactacaagtcttggcagatatattacttacacgaaaagcacacacagaggattctgatttttactgtactatagctaattataagccgtaatgcttattaacgacaaaacatatttgtgagtagaacttttgtgtgtgtgtttttagcgacttgaaaaccaacactgcaagataaaactatataaaagaaatcaaaatcaactcaaatgtgaaatcatcaaattcaaattttgttgctgtcaatgaagaacagcaagtgtactgttccatccaagcatagtcaaacattagcagttgtggaacgttctctctcctgtgtagatcgcactcgtacgtgcatctgatcaaataatattggctgtcatgctcatcaagcgcgcacacacactactgttgttccaacagttgtttgcatgattcatttgcaattatctttcaaactagctagcctgcctgctcaacaattattgatcatcacactggacacaatgctcaatgcatgtcaaagatcaaaggttagcaaactgtactccttgtcgatggaggatggccatcaagaggtgaaatgcatcatcactaaataaaagcattggtagtactcttagtagatgatggccttgatgaatgatgattatggtgacaggtgtttggagggccttaataccagcactgagtgactacatgttcatatctctgaatgtgagcctcacaaagtcacaagggagggaggagggatcaagatctagctagaggccggcccacaaacaaaattgaggtttataaagcattaaaggggaggaaaccatgggtgttggggaatcaaagtgagactttgacatatatatgcatcatgggtgaatgaatgagaaatccgagatctaaagccaccaggagtgctcaccaaagttgagctcaacctttcatcagaataattctcattctttttttattgtggagttatcagttaccactagtatgttttcaggagtcttgatctttgtggtgatacactcatgcaaagtagtgcacaaacaccagaatcaacaaaggtaggtagctagctagcttgcacaagcacaattttgagggcaaggcagcggctgtttttttcatgaaagggagtggacttgaagcaaatcagatgcaaggacaaaatctttattagtgacgctaggcactgctattcaccattgctttactggcaattcaagtcgtaactgaaatattctgattccccttgtaatttgttggttataagaatgttatcgtttcgagatggcgaaacacggtccaatctgaattcatagatatgtattttgatccctgcgaaccagatttatataattttccgaagaagggtgtgtcttgttctgttagcatgtggtctgaaatctgaatctgaatgtgatcggtaaatttgtgcaaacaacacaaatgcatcatacttggtcaaattgcatcatcaggataatatggtgtcgtaaaaaaaacaattagaaatgctctgcattttggttaccttcttgtctctttgaagaaaagtgagaaaagatagaaattaggggatcggagaattaaactccgaactttcctacatgcaaataacttttgatcccaatctcctattatcccatccatggagtagaagtagtaacacagatgctacacgagaaatgttctgatgagaccttcgtcgttcacgtaggctggccctccgccgtcaacctcggtactgttactgttagagttgtgctgggctgctgactagtactacttttatggcccagtaagcttttagctgagagcgaaataaataggaataagttcatctgaggtcccttaacttatctacgaatccgattttcgtccttcaaccggaaaactagatacaataggttcctcaactctcaaaaccagtgcagatgaggtccctcggtggtttntnnnncntnncccacccggccaaaagcttctaaagctaaagaattaacttttctaggtagaaaacaacggttctgtactttatttggcgagctgcccatgaaccaccggcttttgcatattttctaccgtgttcccaagctgaactagggatttcgggacgcctaacagtgcatgttggggaaaattggattcaaagggcataaacaacttttctgaccccctcgtcctgcgatcttagcggtctaagtccattaattcccgttattctgttgggttcactggagggtacggtctgtctgctgcttgggtcatgttataattttccttactcttttgccttacatctccttttcccatctttttcctactttaagatgtcctatcggtcattgttcttctctgggtgccattttcattatctcatatttacactttatttgggtttagtcaatattctatttctaatccccttctctgttcatcttttttattcattcggataccaactctaccc

SEQ ID NO: 5966 - DNA, 51616 bp, Oryza sativa
cctccaccaccaaaccctagctcccaccgccgccgacgatgtcgtcctcctcctccccgccgcccaacccggacgcgctctcctccccggacctccccccgctggccgcccccgcggcggcggccgcggcagccgccgccgcggtgtcatctggtggcgcggggggctccgggcggaggctgcccccgccgtgctggacgcacgaggagacgctggcgctcatcgaggcctaccgcgataggtgggaggggctccgcaaggggaacctcagagcctccgactgggacgacgtcgccggcgccgtcaccgcccgctgcgggaggttccccacggcgacgcacaagtccggcgtccagtgccgccacaagatcgagaagctccggaagcggtaccgcgccgagagggcgcgcgccgccggccgctccaagggccccaagtggcccttcttcccgctcctccacgacctcgccggcggcggggcgcccgaccctagccccaaccccatcatcaagatcaaatccaagggccccgccgccgcggccgcctccccctcaccggcgtccccttctcccgtctcctccccttcctccgaggaggatgaggaggaggaggcggcggcggacgcggggcggagcaggagccttcacggcctcatctccaacggcgggagcgggagcggcctgcgcttcaccatccccaaggcctcccgctccaagcctgtggcgcagcgagaacaacccaccgccatcaaggtggagaagagcgaggaggacgccgaggcggaggccatggccgaggtggcctcggcgctgcgcgccgtcggcgacaagttcctccgcatggaggagcggaggctggagatctctctccagatagagaaggagcggatggagtctgagatgaagcgcacccagacgctgctcgacgcccagcagctgttcgtcgaggccttcctcggcaagcagcagcaccaccaccaccaccacaagaaggccaaggtgatctccgccgccgctgccgcagcaacagccgccatggatgaggattgatctactccatgttgttggtatggcctactatgtgtttagtaatgtttacttctcattgttaactgctggtgttgacttgtgataattctactagctgttgtttgtgtttgggagggtgattaaagtagtcaggtgtaggatatggagtgggggagtgaggaggaggattaggagtgagtgctcagttaagctgcctgtaatcagttcagtgatcttgtgcttgagttgctgctgctgaagctgccttgtccaaatacttctgtagtagcatattattgtcaggtttttactcaatcagtgtcctgtgtcatgttctatgttttgatgatcctaagccttggagtatgtgacagtaacttgaagaagccttgcactgtagtaacatgtttttctccatgaatcaaattaatggctggtttaagggtactatgatagcttatcagttgtcatggacatctggacagctgaaaacaacactctggatgcatcaaagagggtatagcgaaatgtgccggtttcttcgcgcttcttgctcttttgcactcagaacaagactgaagagtatcctgcacttaagcttctaatttattcttttgttagtcaagtcttcttgaaaacaaaaaggaacttcgactagccttctgtcaaagttaaatacaaaacgaagcagaagagagtgctgacatcggtcctattattttaattgttcaaatgaaataaagaatgacaacaatctagtaggactatgtttcattaagccaacgaaattctgaggtaaggcaatgtttcattaagctgttttatttatatgctttccaactaataaatggtgtccttttgtgcgaaatcaaataaatctgtttttcaagtttaatatgtatgttttgggaccgaagtaatgagcctgatcggcacacaaatgcccgcattcagcatggggtcatagtgcgtgtggtaatgacagatctgcaagtgaattcctcagttcgcactgcaaatgtactcagacactaatggtcagttcaccaaaccatatgagcagagcaatcgtagtaaaggccaaaaacggagtcctcactagtgaaactcaatgcttgctcgtacctatggaaaatgaaggcactcatgagatgtccagaattcagccgttgtaatgatggggcaccgtctggttttcatatattataaaggatgattgtcaatatatttttactggaaactggattatccctagatacaatttgccatgtcaccatgattatacaaagggtctgatgtagacaaaccatctgtgttgaatcaggaccagacaaaagagcgcgcacgtcctgtcagtagtttggaaaataaacattccagttcttaagaaaaaaccactaacaaagtgcaaattttttcgctgaaaactaattgcaaaaggtctagcacttgataatagacgcagacttgcaacgtatcaacgtataattgttcaaacttgcatattagatatacatgcggcactccaatgaggctccaaaatcagcttcaaatttaaggttgaaaattcaaattttggccgataagtataagcataaaaaaaaaaaaaagatgccagaggccttttattattcatacattgatcatgtggtcagtttggttgtctcagaagtaagaatacatggacctgtggagagatgtgttacgaatttatgatccatttttcttcaagaaaccttgatataagatcgtcccaggtgtggaacaaatagaaatgagcattacaaaaatgataaagcaatcacacagtgcacaaccttcatcgagttaactcattcccgctgtggcacaacgaacattctgcaaaacaatatctcgaaagacagcttgacacacaactcacaaatcacagcgcaaacagaacatgtagagtaaaccagaataacagaacagcatccagccttgtaaacaaataaacagaaagaaaaacaaggaatgaagtccagcgccagccaatcaacttgctacctctgagcacaagattggcatcagttctatcaggccccgaaggcttcttttgtgatgcaagaaatcacatcttccatgttcttttgtgatgcaagaaatcacatcttccatgttcttttgtgatgcaagaaatcgcatcctacataacatgattgactgccaatatgataatgtagtaatgcgatgggaaaaaatgatacgatgagaattacttcctccgtttcacaatgtaagtcattctagcatttcccacattcatattaatgttgtctagattcattatcatcaatatgaatgtgaaaaatgctagaatgacttacattgtgaaacagatggagtaaagtttatctgacagtctgaccacccaggggtgcgactactaatcgaggcagctttgttcgaaatcaacctatcataagctcctctatggcgtacagtaagtttcaagacattttcaaaatcaagcaagatgtgccaaggtagttgttgccaaatatcaagcattgctccagcttacacaacaagcagcaatgagtatttataaatttggcccctcaaaaactacacaccagccaaaagctacataaaccataagatattggaatatcacctaacttcaagtgtctcgccatcaaagtcaaaacggagctaaggtcaatgacatatcccataacatatctcaatcttcaaacttatttaaaccagaatattagtggtgcaaaaaaaatagtaagcagcattcccacactagctgagcaaaatttccagacctaccagtgaagtgtatgtaagcatgaggcactgaattaggacatcctaattatacttattttttgtgagtagaacaccatgtggtactatctcagatttctacaaggatcatagggtaggcaaccattggttggaacaactaaaagaatgaaaacattacttatgaatgtcctattgcattcctttattcaaatccaacaatgtatacacataatcagctatccgcctgaaccttaatactagaagcatcacataatccatccatccagacaggctcatcttgcacaccttggcaccaacaaagcaatgagccaatcactaataaaacactaatcagggaatttagcgcaagcaatcgacatcaaattcaaactataactaagacaagaaaatgaaccataaccagtgaaaaattgacacagaacgtctcccaatatgcttctttaatagatccatactactaaacatccacacccacacaagcaggcagtagtaccattacatcagggtgattgagattaatttagaaaatccaaaaccattcattggctgctactcagaaagcgaaaagctttagaaaaagagaaaaaggatgagatggccgtgcaccagtaccatcccatcgccgccgccgccgccgcaggagagagctcagaagcggagcttggtgaagaaccacctgttcttgccggtcttgaagcggtcctcgaggcgcgccttggcggacttgcaggcggcgaccttcttgtccctggtggcgagcgcgtcgggccccgcggcgacctccttgaggtcgacgtcgagggtgtagcgggtgggcatgaggtgggtgaagttgacgagcttgaggaagcacttgacgcgcgacttcttcgccgtcttcttcgccgagtccttgcggatcaccttcttggggtacttggcgaggccggcgacgaggcagtggccgtaggggcggtcgcgggtgccctcctcgaacacccgcacgatcaccgccttccgccccgcgaacctcccctgcagcaggatcaccgccttcccgggcttgagaaacttcaccatggctgatatcctctgctgcgccgccgccggggaagatggagttagggttcggggagaggagaggctttttttaagctcttttatagtcgggttgcggagaggatggtttagggtttggggtggggatagaatgacgtgtttacccctaggatgcggtccgttagatgcgaatcgggcgggtttaattgatgggtagtggtggtggggccaatgtgtcagtggtaagataggtgggcgagcgtaggggcaaaatgggaagagtgggagctgggctgagatgggctttgcgctcgtgagtgccatgtaggcccagttatcagacggccggcacagcatctggcccacgtcgagacttaatgtacagaggatcacaggaattttgcatgatgttcagagatgtttttttgttttctgaatgttcttaggttttttagacttcagaacaaggcttaagataatgcatgcggcacatacaccatttagctcctaattattcttttgatagtcaagtcgtcttattgaagaaaagaaacttcgacaaagttaactactagtgaagaaatgaagcagaagagagtactgacgtcgccacgccggctctattttttttattattcaaagggaaaaaaaaagaatgaactactccaagctagatactatctcttcttgtagggccaaaattccgagctagatatcttaagctaccgccctgtacaccaacctattccaagccctgtctcgtttcttccttagcctgtcagcaatggcgaaagccagttcaagcgactgcgatgcattcagcctggggtcgcagtgcgtgcggtagcgagagctgagatcatcaagggtcaccgtcttggatccaccaatgcactctgtaacgttctgccctgtcatctccaggtgaatccctccagggtagcttccctcttgctcatggacatcgaagaaagccctcagctcgcactgcacatgtacaagaataaacacaaatggtgtcaatatgtcaaatattcatgtgtaataagtcagttgttcatcaaaccatgaatggtgaagtctcagggcttgttcagattgatgtcattttaaaccatacaattttttttactaaagttgtcaaatatgtacatccatttagtttcttgccaaactctagtaaataaataagaaaccatgctaaaacttggcaatattgtcaaattgccaaaattttggcaatgccaaaagttggtaaggtttatttttactacaatctgaacatgccctcagttcttaccctgatcgcgtcgaatgatcttgtcttgagaccacatggtgcgctgatggtgttcccatgcatgggatcactgacccaagtgacaatcaacccagcttggcggactgctctgatcatatgtgggagcttaacgcgcgtgttctcagcacccattcttgtgatgattgtcagtcttccgggcttgttgtgaggattcaaaatctcacacaatttaacaagctctgaaggttcgagcttgtcactcacctttttaacacagaaaaaattaactatgtgcatagacaactcgttttgtataacaaataacaataaccataaagtcatggctactgtacttatatttgcgatggcatggtaaacatgatatacaatgttttttttctggcggtctttcaaaaaataaatattttccccgacaaattagcatttacatctaaggctaaacagcataagaccgatgactgatgatgaactatggtactactagtaaatattgttacttgtcatttgagatggagcttaagtacctctagtagtccaatgctgatacatagtttgagagtttcagtagatatattacatattgaagatattggctgaaagtcttatacaaataagccaactttgaagaggtggattggttacctttacacctagagggttggaaataccacgaaggaattcaacatgagcaccatccagttgtcgagtcctctccccaacccaaagcatatgagcagagcaatcgtagtaaagcccagaaatggagtccaccctagtcaatgcttgctcatatggcaaatgaaggcactcatgagatgtccagaattcagccgtcgtcatgatgggatgctgaggagtcagaccagcagcaaccataaatccgatggcatcgtgaaccctctcggacagctccatatacctgctcacagaaaaaaacaaaagaggacatgatcttggtttccattgtataaaggattattatcaatgatacttactagaaatccctagctactatttgccacgtcaccatgattatattaagggtctgatgcgtacatgccatctgtactaaataatgcaattcctatgtctgttgtttggaaaataaacatttgcattcatatgaaacaaccactaatatgcgtaaagagttttgaataaaactaattgcaaaatgtctagcacttgagctaagctaacaactacctgtccccttgcgtgctgtccctcaagaagtcaagattccactgggtgactctctgcagatctgcataccctccatgagcaaatcctctcagaagattcagggtgctcgcggactggctgtaggctctaattaacctttcaggatctggtgcacgcgacttctcatcaaaaccatcgctgttaataatatcacctcgataggaaggaagtgtcactccatctatagtctcagttgggtttgatcttggctttgcaaattggccagccatccttccaacctgaaatatacattgtcaatcagtcaatctctccacctgtctatcagcacttgaatcattaaatgttaagccatcaatggtttgaagaacataaacctcaaaaagaaaactgcaaatacacttttgtttgtcaatctagattccagaatagactaagatactgaatctagcttgtcttttaaacaatatgaatgcttatggtttcatgtgtgcactggtggccacgtctgatccctgtctttcttgctgctgtaccttgtctgtcaaatattggggatggaaattggcgattgacttgttgatccgttaacttaagactcatagcatatataactgctaacaatcaaccatctatgcgactatgcctttcagggggaaaaaacagaaaactgaatggatgaatccgcgctgtgccataatttataaattataaagcctgatctttcagaacttgacagcgaagtcgacacgattatgtctacatcgaccgatcgccatctcaaagagagattgtgaagatgacagctgggaccctgcaacagcttaagcccgagtgatcagccacatcacatatattcgttctatctgaatgcgccaaaatcccaaacagtgcagcgtgtggcggacaggaaacagataattttcgatctcgaattccaatcgggtataaaatggaggaagtggattttgatctcttgaggagatatctcctcgttgcttgcttgcatgttactcaaatggttatgaaaaaatttgagaagatgtattaacgtgtgtaatatatcactccacaaattcaaattcagcttctatatctggcaacaaaattaattgtgaatatatgttaactagctgcggttctacatctcgcaacaaaattaattgtgaatatacgtaaactagctgcggtttaattaatttaatttttttacgagatcgttagggatggattggagaaggagaaatggtgagaagatgaagccatgggagtaggcgaggaggaccttgatggtgggcatctggccgccaaaggtgaggacgacggccatctggagcatgaggcgaaaggtgtcgcggatgttgttggcggcgaactctttgaagctctcggcgcagtcgccgccctgcaggaggaaggcccgccccatggcggcgtccccgagccgctcctccagcttccgcgcctccccggcgaacaccagcggcgggaacgacgccagctcgcgctccgcgccctccagcgccgccgcgtccgggtactccgggatttgcctcgccggccgcgccctccagctgcccggctcccacccgctcgtcgccgccgccgccgcgcgcaccgtgatcatcccccgccgccgccgccgacggccggtggaccgggcgtcctcgagacgcgtggtggcatggacgatcgccgcgtgcccaacggtgagagccgccatggcagagtgacacgtcatcgagtggatccgcagccggaggcaaatcactgggtatttatatgtagagccgccgtataatactccagtcactacgtataatagtcacaatttttttagactaaccaaaacgaagcaactacaaatcggccgcatgaaaaatgcagaagttgtttcatcactagacttaaaaaagtgttttaaacaattacaatatcgtctaaatttacttgaaacatttttcaatcatgcggtaaacaacaaagatacattgattgaaacattaaaaaaaatcgtgaaaatctacatgtttcaaacaaatgcaacaccattttaccccaagttgaaatatttttctagcacgtatgaaacatcaaaaatccaaaaatataccggtctagatctagcttccgcctcttaggtggtcgaatctttagcttcttctgagccgaccaaaattcgaacaaaaacatctccatggaaaagataatgggaactaaaaacccgattagtacaccaacatataatagtcacaatggtgtacacacactgaagttgtactgtacgtctatacaataaccattttatgaacatggtacaaatatgtatacgttcataagtaacaacgcacatactcatctccatatgcatacacacacattatctatagcatatccgaataactggataacgaaaccgacaaatctcgctgtttctaattgagctacactcacctcactacggtaacctcaaagctttagggcctttttaaatcacagtaatgaaaaaacggaggaatatgaaaaacataggattctgacaggaatgaaagtgtaaaacaaaggattgcaaaacgcaggaaaaagaatgaccgtttgattggaccacaggaaaaacacagaaatttgaggagagataaaagactcaaaggatttcttccatgagattctatctcttgttaaaattcctctaaaacttgtatggaaagaggcatttcataggaatttcatagggttcattcctttaattcaaaatgctttgtaggaaaaatttctataggaataaaatcctctaaaattcctatgaatttcctttcaatcaaagggggccttaaagttttatttgattagaatattgaacagattatcgttttgattatagagagaataaattatttaagaaataaatttaacaaatatcttaaaatagaaaaatattttgagaagcgcaaataatatgtttaaataatccaaagacaaggaagtgtagcacaaataatccaattacataattcaatgaataaactgggaaaatgaccatgcaaactgaatagtccttgccaaatgatcacacgaaactgcaaacaaataattattttttttctttattatttacgctgcaggaaaatccggtgcagagtatacacggcagaaaatgcatcagaatacgcatatcatttggtctggcgatcacgtatattccggatcatatttacagctgcagcacaacgaccatggatgcatatggatcatggatggtcagtaggtgtcatactcatcggcggcctcctcttcgtcgtcgctcttcagctcggcgagctccgcgagcagcgccgggtcggcggcggccatgtcgccggggaccttggcctcctggatgatccgcatgatctcctcgacggcctgcgtcggaggggcggcgtccgtgtccttgtagtcggccttctccctctccgatatctcctttggcagattcttcagaaaccacgtgtgcttctttatctcagggatcgtgatcctctgaacatcaaaagttcagggatgcaaaaactcgagttagttaaattcagagggaatccatctcgttaattaattagagacatagtttgagcattagaacatataattgagatcatataggccgcattacaatgagtaagattacaggtagaatctgagtatgatttaaggttaattttcccttcggagtaatctaaagtttggtctagtttggcaacttgggatctcacttaaactgggaggtaaagtgtgtgaaattaagtacctttgaaggatcggcaacaaatatttgagatagaaggcgcctgcagtcggaagacaccctcacgtagtccgggatggagtattgcacgccaagaattctctgtcaagtggaacaaggcatgcatattcagagtttcagactcaccattgaagcaaggtgtagaaaaggcttggatgatgaacagagggaaatggagcacttacgctgatcgttttgcggaaattcctcggatcacctggatcttcaaacgggtatgaaccgacaagcatcacgtacagtgtcacaccacaggaccaaacgtctgctacctgggtaaggagacgcattacctcagatcatgcagagatgcaattctatgatgcgatgttccaggaacttcagtagcgtcctaacattactgaaaacgtaaagcttatgctgttcggtttgttttgcactcaatgtaagtatttcagctgcaatggatcacttttagctaacgtctaaatgctcaattgctacggttccatgatgctagaaaagaaaaaacaatagtgatagatactgctatctatctttactttacagccaaattcagattgcaaaacatagaaatgagaaataacttgccttgccatcatattcttttcttgaaagaacttctggcgctatgtatgctggagtaccaactgtagacttcggcttcgaatgcagcaaagcagactgaaaatcaaagaagccaagttgttcagtactccagtttgattctaccaagaaggcaagaacaattcaatctatttctagtaaagtactctgagatgtagaacagaactagtagcatccatgttagcacctttgagtaaccaaagtcacaaatcttcacacgaggtgttgggcttccatccaggagggtgttctcaagtttaagatcacggtggcaaatttcctgcattttgcagaagcagttaatgaccacttaacttaatgagcttacgatgtgcctgttacgtctgcagaatttcaacaagcaaaacataccagagaatgacagtagctgacacctgatattagctgctggaagaagtaccttgcctattgacatgaatcaattattgagcacagatggtttgcaaaacgggaagattagctcacaagaagacaagtagggcctgaaagcaacctcgtcttcgctgaatcgccctgcggtgcagatttgttcaaagagttctccaccagcagcatactccatgacaatggctaggtgtgtgggtgtcaaacaaacctgctcttgatcgacacacaaaacaagaaatcgttatagcagttgaatttacttcgatcttaagacgatacactacttactaattgtatggtaagtaatcagccagggtaagctttgtgcttgatagatgtataaacccaaaaccttatcattttactttctacagtagcagtggagatcagctccatctagtttgactgtttgactgactgataatcagtgaagctgccgaacgaactgatgagtgaaaagaaaatctgaattacctccttaaaccgaatgatattgggatgccggagcgacctatgattgatgatctccctctgcacattttcatcaatctgcacacagagcaaaccaaccatccatgcatcatcaatcaatcaaactaaaagctaagactcgtcatgcatctggaacaacgagttgctgaaaacatcaactcgcacacaccatcaaattatcaatcagtccgacgcaagaaactgcgaaataaatcacaaaaggagagaagagaagacagagacagaggcagcatcagaccttcttgcccctctcgatgtacttgacggcgacgagctccttgctcctcttgtccctgaccagcctggccaccccgaagttgccggccccgagctccttcaacgcctcgtacctctcctccattggccccctcgaaacccaaacccaaagaggagaagtcgccgcggttcgagaccgaagccgaccacccaaccaacccaatcagaggcgagctaacctccaaccaaaccagaccaaatccgaagaagggaggcggcgaggtggagggatatgaaattctcttcgtcgccgtcaccggaaagcgacgagggtctcttggtcggacttgaagccgaagcgaagcagcgacggcgacggcgaggtgcgcgacacgtggcccccacgagtgccgtcgcttgtcacgtgggccccacgcgtcagctcagctaatcggcgggcggggtaggagtggggcccgtggattaggtggcgtgtcctgtgaatacgacgtggccgtttcgtcgctccgggttgccacgtggctccatgtacgtattatatggaggcccacgctcagaagagggcggtgtccagaaacatggagctgggcttttcttttccaaagatgctgggccggttttctaaagtgcaaaccatgggctgcacgataaattaattgattaatcagttttagctagtaatcgttagcaaagacgttggttaacttggttttcttgctagtttcgtagggatttcaaatggttatgagcagtcgttcaaaaaaaaaagatgattatgagccaagcaaaccatgggactactatcaattcgaagcatccgctcgagaatcttccatcgaagatttggaacaatgttgaatttcttcgatgtgacataaacaatctgcctggtcgtggttcactactgtggtagtagtactattagattactctaattattgcgcgtggctgaggtaaaccatgacacattagtgctggaattgttgcatgtgaccgagaggtaagattagcgcaagttggcttgcaatttctttgcgaaatcgtatgatctgctaatattccgtgtggctctgccccttctcgctgattggagttgcgcttagccgtcgtaatagtcattttctttttcttggtttttttttgtcttttcttctttttcttggcataagccagtctgtctgattgcgttatgtaaacaaatatttttttttaatatattgacttaattgttttgcgcgttcggaaaaaaaaatctgcgaatattcccagctgaccaaaatgggaatggacgacgacgacgaggtcctcccttcttcgcttcttccaatccatgggccgcaagtccgcaagggccgcgcgcacgtgggcgcggtgcgggtcttctttcccaaaagaagtcgggggaaagcgaggcgcaacggactcggggcccacctatcgcgtaggtagtaggactaggaggaggcatagcccgtctcgtctcgacacccctccgaccccgacgcgtcgcgcaccaaacccccccgcccccaaccccgacctcctcccgtgctccgcgctccgatccgccgccgccgccgcgcgcgcgccgccgggggagtgcgccggcgtgtggtggtgggtgtgtaagggtaggtggaggggtgggtgatgcgagatcggccgcggcggcggtagagggggtgtgtgtgctcggctactccggtgggtcgggtctgggcggggtgcgcgtggggatggggtgcttccagtcgacggcgaggcgtccgcgcccggggtacgaggaccccgtcggcctcgcctccgagaccgcctgtgagttgttgttgctgtacttgccacttgaggagtactctacagtactgtatttcatttcatttcatcaagtagttcatctgatttatgcaatcgatgggcgtactggaaattctgagttagttgttttggatgtgtagttagcgtaagtgaggtggaggctttgttcgagctgttcaagagcattagtggttctgtgatcgacgatgggctcatcaataaggtgaacatctaactgtttcttgggggtatctcaccatattggcatcatggcatgtgtgattatgagcatcctgatacatttactaatctgcttttatagcttgttgtggaattacaaaattagaccttgccgcattcgaatatatctactgttccgtctttcatcaccatattggcatcatgtcatgtgtgattatgagcatcctgatacatttactatctgcttttgtagcttgttgtggaatgacaaaattaaaccttgccacatttgaatatatctccatgtactgttccgtctttcgctggatatgagaggaggtgctctcatatcggaatttattaagaggggagtgaggctcgaacctgggtcggctagcccacaacttgtggtgctagccagaagacccccacgcctttctcactgttccgtctttcaggtttcagctgcacaaattatgtggtggatgccattttctgtgaatcgttttgctatgctggcagttctattcattcatctttgaagtgagcatgaatctttgttgtacacaccccgatcctttattcctcttgtaccgctcattgtattatgtgtttgccttctaaattgttgaattttctgtgtatcaaaatgtgatttttttcctcaaagtttaataggaaaaaacttgttcctgatataaaccatctggctactatcacagtataacaacacaatgatagttcaaagtttgagtcactttcttcctgccttgtcaatattgatttgccgtgctataaagctagacataatgcgtttctcttgcatcttcacttttgttttttgcatcttcttgttgcgtcttgcgtggcgaagaagttcattaactgctatctgagaagccatacaggttcatgcacatctgctagttctcatgaactataatcttgacgtcatcagtagctaaattcacggtatgaaattagggactacctatctaacgttcgacataaaatccccccaaaaatatgccgtaactacaacacaataatagtgtaattgctgttagaatttcaatggttactctcattgagaagaggatggcactcgagatggggcaattttctggttttcttcattcactaaacacaaaagccatatcctcccaaagaggattggatacatatttatagctgcttgtagcagccatgcagccatgctagtctaagagggtgctgtcagcatcccaacaaactgtcctagagcagagcatcccaacaaactgtcctagagcatctcaacaaactgctgtcctaactgtcctagagcatccaaactgaaagtagagatgctgtcctagaaagctgaaaaacaggaaaaaaggcaccacaagaccaagaccaaccagccaagacttattcctacattctccccctaagtcttgtgcgccgtcttgtgggagagttgagccatcccgatccgggagcaaagctcaaggaacttgatcctcccaaggggtttggtgagcaaatccgcaagctggtccttggtgttgatgtagctcgccttgatgctcccttcctccaagtagcttcggatgaaatggtacctcactcggatgtgcttgctccgttcgtgaaaaacggggttttttgccagggccagagcggacttgctatccaccctgagctccaccgctccagtatctctgccgaggagatcactaagcagtcgagcaagccagagcgcctgggtcgaagcggcggatgccgccatgtactcggcctcgcagctggacagggccaccacctgctgcttgattgactgccagctaacgaggcactcgccgaggaagaagagaatcccgctcgtgctcttgctggtgtcgatgtcgccggcgtggtcgctgtcgctgtacccgacgaagtgtgccttgccaggacacctcgggtagtagagaccgtggtcgagagtccccgcaacgtagcggatgatcctcttcacagcctgctggtgctccgtcgtcggtcgctgcatgaaccgactgacgtagccgacggagaaggccaagtccggccgtgtgtgggtgaggtagcgaaggctccccacaagacgtcggtactgtgtagcatccacctcctccgctgtgctgtcgcggctcagcttcagtctctcctccatcggagtgagagctgggttgcaatcggtgagcccagccagctcaacgacgcgcttggcgtaggcggtctgtcgaagcgtgatcccggagttgtcctggtgcacttcgatccccaggtagaaggagagaggccccagatcactcatctggaaggtggccttcatctcctccttgaacgccgcgacctctgcatccttggtgccggtgatcactaagtcgtcgacgtagacacccaccagcaaggcatttcctccattgccccgccggtagatggccgcctcgtgcgggctttgctcgaagcccatccccttgagcgtggaatccaacttggcattccacgccctcggtgcctgccgcaagccgtagagggccttgtgcaggcgtagcaccttgccctccttgccggggatcacaaatcccggcggctggtgcacgtagacctcctccttcaagtcgccgtttagaaacgccgacttgacgtccatgtgatggacgccccagccttcctgagcagccagcgcaagaaggagtcgcacggactccatccgtgccacgggagcgaaggcatcgtcgtagtcgatcccctcctgctgcacgaaaccgcgtgccaccaagcgagccttgtgcttgacgatggctccggcttcatccctcttcagcttgaacacccacttaagggtgatcgcgcggtgaccacgagggaggtcagcaagctcccaggtgcggttctcctgaaccgcgtccatctccgactgcatcgcggcacgccatgccgcgtgtttctcggcctctgcaaaagaccgaggctcaccgtcgtcgcacgcaaggtgcaactgcgcctccaggttgcgaggcaccagtcccggcaccggctggtcgccgagaagatcctccatcgtacggtaccgtagctgctcgccgtcatggtacgcgtcgatgcgctccccgtcgtgggagagcggagtaacgaactccaccgggctgcgctcaacacgagctggcgtcggagtagacgtgcccggaggagtggctgttggtgctggagcgtgtggggacaccggctggggtggtgtcgacgacgagctcgtcgtagtcgaagtcgtggcccgagggtgtgttggtgttggagtcggtggaggctcggggactggggtagacacgctcggtgaagaagagctgcctactcccccagctccctcgaagtggacgtactcgatggtgaagtcgtcgtacgtcggagtcgaaccatcatccaccgccttgtcccatacccaccctcgcccttcgtcgaacacaacatcgcgcgtaatgcgcacacgctgtgtctccgggtcgaggatgcggtaggccttcgagccctccgcgtagccgatgaacacccctggggtgctcctgtcgtcgagcttgccgatgtggccaagctccttggcgaacgcgaggcagccgaagacccgcaggtgggagaccgccggcttgcgcccatgccaagcctcgtacggtgtcctgccatcgagggccttggtaggcgagcggttgaggatgtaggcggccgtcaccaccgcctccccccagaagatggccggcatccccctctgcttgaggagggcccgagccatccccacaaccgtctggttgcgccgctcgacgacgccgttctgctgtgggctgtacggcgcggtgtagtggcgctgaatgccctcatcagcgcagtacgacgcgaattcagccgccgtgaattcgccgccgttgtcggtgcgcagcacgcgcagcttgcggccgcactccgcctctgctgcagcctgcgcatgcctgatggcgtccgcagcctctcccttgctgccgaggaccatcacccacatgtagcgggagaggtcgtcgacgagcagcaggaaataacgtcgtcctcctggtgtggccggtgtcactgggccacacaagtccccgtgcacgagcccgagccgctccttggctcggaagctcgtctgctggggaaaggggagccgccgctgctttgtcaccacgcagacgtcgcagagctgctccacgtggtcaaggcacggcatgcctcgcaccatctccttggcactgagctgcttcagggcctcaaagtggaggtgcccgaagcgctcgtgccactgccacgcctcgtcgtcccgacgagcggcgaggcaaactggatgtgcgacttgcgcgctgaggatgtagagtcgattagtgcctctggttaccttggcaagaaggcgacgacggcgatcccaaatcctcatgagtccgtcctcgaccaacacgcgtgagccgttctcatccagctgtcccacgctgatgatagaattcctcaacgcggggatgtagtagactccggtgagcagcctgtgctcaccggacttggcggtgaaggtgacggagccaacacccttgatctccacgccggaggcgtccccgaacttgacggtgcctcggacgctggagtcgaactcggtgaagaactcccgtcggccggtcatgtgatgggtggcgccggtgtcgaggtaccacccatcagccttgtcgttgctggagccgtcgcagagggagacgagtaccttcggctcatcaaggtggaggaaagccgctgcggccggtgccgctggaggtagctcgatgcttgcgtgagctaggagcagagccgactcttcctcctccacccgtgcgacgtgggcctggccgcgtcgtggctgtcgacagtctttggcccaatggccaagcttgccacagttgcggcaggtgtcgtctcgtgccggcttgtggttgccggtggcaacgccctgggcgcctctgcgggcgccaccctcggcacgtcttcgcgcccaccgtagctggacacctccccgcgccttgcgcggcttacggccgcctgtcggggaagatgactcccccttcctcccgtcaccctgagaggcctcccactgctcccgagtgagatggagcttcccgccgatggtgatgggccccgagagaggccgtggctcatcaccatcgacgaccttgaggcgacctaacgcctcctcgatcgacatcgtggagaggtccagcagagattcaatcgagcgagcgatctgcctgtacttctcagggacgcagcggaagagcttctcgacagctctctcctcgtcgtaggtgtcgtcgccgtactgcaccattttttgcaagagagtgttgagacggagagcaaagtcatcaacatcctcacctggcttgaaggccaggttctcccactccttgcggagtgcctgcagtgtggacttgcgggcgcggtcgctgccgatgcgtgccgcagcgatggcgtcccaggcctccttggcagtccgtttctgggaaagcgagaactgcatctcgggcggaactgcagcgatgagggcatccagtgcccgccgatcctcgtcgtagtcgacgtcaccgtaccggactgcctcccacatgtgccgcacctggagcctcaccctcatcaccgcggcccactcgatgtagttggttttggtgagggtaggccacccaccgccgggaccaaaatccctgaccaccgtctggacgccgtggtgaccatggcgccggtcaggggagagggagccgtgccgcctgcgagggccgcgtgcgggctccgggctgccgccggcacgcccgcgcccgtctgggttcccgtcggcgggcgcgcggtcccttgggccgccgccgccgccgtggaggtgggctgctgcccaccgctctgctcgctcccgtgcccttcctcttgccagctcctcaagctccctgtcagcggtgatgtcgccggcgatggagccgttgatgctgctgcgcaaggtctcaacctctacctccgccgcacgtgccgcatcttccgccgcctccgcctccgcctccgccctggctgctgccaactccgctgccgccagtctggccgccctcgctgctgctgcagcggtctgagccgttgctcgcctgcgctcttttgctgcggcgagctcggcgtcctgctgacgccgagtgctcgaggcgaccgaacgctgagaccgagcgtcggacatggcgcacctccggggggctgctgtgtggagagggggaagggaaaggggaaggaggagcaaccggtgctgctgctgctgctggctgagagctcaaccgagcttgggaaggggtggaacaagagatgtttagcctacaggaaagtgtggctctgataccagatgttagaatttcaatggttactctcattgagaagaggatggcactcgagatggggcaattttttggttttcttcattcactaaacacaaaagccatatcctcccaaagaggattggatacatatttatagctgcttgtagcagccatgcagccatgctagtctaagagggtgctgtcagcatcccaacaaactgtcctagagcagagcatcccaacaaactgtcctagagcatctcaacaaactgctgtcctaactgtcctagagcatccaaactgaaagtagagatgctgtcctagaaagctgaaaaacaggaaaaaaggcaccacaagaccaagaccaaccagccaagacttattcctacaattgcaacgtaaccagcatgtaattacaatataactagggtgtaagtggtatgtaaatacaccatagctcagtggggaagtgcgcacgcatgatatccttgcgcctggggttcgatacccagcagctacagcatgcggaattttttcccccttcctagcacgaatctcagagcacatcgtacgaccccaaaactgacagatttgtccaaaaaaatatgtcgaaagttattttgcgattccgatgaaattattataattaatacctgacatcattttgctatgcaggaagagttccaacttgcattgtttaaaaacaaaaggaaggaaaatcttttcgctaatcgggtatccatctccttatcaaccattctcacttaggttctgttagtaaatattctgagtgctttcaggcacaaccttattctatcacttgaaatttacacagaatggaccttgcagatatttgacctttttgatgtgaagaaaaggggggtcatcgactttggtgactttgttcgagctttaaatgtatttcatccaaacatcccaatggaagagaaaattgattgtaagttattgccattctgttttatctcaacttcgttgataccataatttcacttcctaaatgattgaccccttggacagtttccttcaagctatatgatatggacaacactgggtttattgaacgaaaggaggtaatgtcttactatttctgggcctatgattctgcatatgccaactgttttctgattcggaatttaataaaatggttatgccaaagatatgtattggtggtaatccagtggtttgtaagcaaacttctttacctctgaagtaacatatttacgacatgctttaacatacatcctattgttcgttggtaactaaaatttctattcttattctcttgtacaggtaaaacagatgttgattgctcttctaggtgaatcagaaatgagattatctgatgagattattgagacaatccttgacaaggtttggacatttgattaaaaaaatgtagttaaaatgtacgtaattctggtgtcttatgacagagttaagacttacaatgacttatgtggttaatggcagacgttttcagatgctgatactaatcaggatgggagaatagatagaacagagtgggagaattttgtctcaaggaatccctctttattgaagataatgactcttccgtacctcaagtgagtataacagagaatagaaatatggacacattttactgctactatgtttatcttccatgctctaagaaattagtggtgctgttccaatttccaaagcttaggcctatgccatctaagaaaagataagatagactgaacttttgtaagctacgacactcacacctcaagtgagtattgcagagaatacttatatggaagcggtttactgctactatctttatctcccatattcaaagaagttaatggtgtcattctaatttccaaagcttgactgaggtctgtgccatctaagataagatagacaaatgaactttcgcgatctatgactctttcgttcctcaagcgagtatgacagaaaatagaaatatgtatgtgttttactgctgctatgtttatctccaatactatagaaattattggtgccactccgattaccaaagactttagcctatgctagctaaaaaaagataagatagacaaagaactttcacaatctaggcatgtgtggaattagaggagggttgggtggggcgtaaattgggtaaggtatgcataattcatcaacttctaaatgtgactcatgttaaatagtgctatatagttgccatgagacatttatttatcgcagtaataaattgtttgacctatatttctatttcagtcatctaaaacttgcaaaaagagatcaactatgtaaatctctgtagatatttggtttcagtgtggtagattgctagactacttacaaacattcttgcactttccatgaacatttgacatgctgcagataacatcatttctaaacattgttgcttgcatttttcagggacataacaaccacatttcccagttttgtattcaattctgaggttgatgatctcgtcacatgatcgtgtttctgttaccggtgtacagttaacaaaaacaaaaggagttgatttatgagtgaaagaggcagaacattcgcaggtgctattatcatacaaggaatataattgcgcagcagcttggaagcgtataacttcattgatgatgtcgtcgcacaggatattagcgttgttgttttagtgttgttgattagattcggaatgtaacatttgtatgtttgggtttgcagttttcaggtctttgccaactataacatcttatccttgtccccgtagagatatacagtatttacctagttttccaaacatgagtggaaaatcttctgtctatctggaaccaccctttgtgttgttctgtatagtactgtctcttttttgttttaaccatgatgatggcttctcgtagagtgttgcggaaagttaaaaaagggggaaaaggtaaaaaaaatgcatggtagttgggctttcttggcccatgaagcaaagtatgtgggcctaacctgagcccagcaggagcagccgacaccgaccgggaggaaatcccgaaaacacccccggcctccacgacagaaagaggcggggttaaaaatatctgcgccgagttggggcgtcatttttgcgggaaacccccgggctcttttcgtaattacagcggccgcccacccacctcacgcacgcacacgggctccctctctcgctctcgctgtcctcctcttccccgcctcgtcaccactccgatctcttcacctcgatcctgcgccaaaccctagccccgcccgcgagcgccgccctcgccggctcgccctcagggggttgcgagagagcggaggctgtggcaggggcgcgccgccgtaggtagggtatgagcggcgcgtacagggatcgggggttcggcggcgcggcggcggagatggaccggaagcgcatcaaggacgtgctcgagaagcacctggacaggtcgtccccgtccacatccaggggggcggcggtggccaaggagagggaccgcctcgccgccgcaggggggaagctgcccgcgccgctcggcaaggccgggaaggtctccgatggtggtaaggatctggtggtttgtttgttccgcgcgaggggttgtgtgctgtttgttttgacggtggttggggttggtggcgtctggtgctacattgcctcaggtctttgcctgctttggttagatgatgatgcagcttctgtttgtttctcgggtagaatcttagggtgaaatttggtgcgctgtcgtgataacgtaggcttctgtatactttctccgatggatgaaatgggatgtaagagtctggatgttcaccgcattaactggagctgaagtaagcgaagttctacatttctgtttgaacttcacgtgaataccatcccacgtactgcattaattgatgttatgacttaaatatgttcacgaaacatcggttagttctaaacaatgttttaaaaagcggtatgtagttttgtgcggtcaccccatattgtagcacttatgcggcatagtcagacgcttatgcggtataatcgaccacttgtacggctaagcggtacaaggttggggcacctgttccttgtatgtggcgaccttctttttagatgctggttctagaagcagtaacaattactaaataaataaacgtgcactggaagtttatgagaagccggtcaaagtagggtcttaatgcagtcaaagcatgcaatggtgaaagaatcagatgacagaagctacaataaacgtaggcaagtatgggttagggcaccttatgatatagaattcttaggcaagttggtttttgcgaggcattagggtaactggccacatggaatggaattttggactggtagttattctaccatggcagtggctgtttaattaggtatgcatgagacacaattagagcaatgtatttttgttgcagtggcaattaatgcgatgagttaaagaggtagcgaagagtttgagacgcgtgaatgccattttgcatacagtcgtcttaacaggataatattgaatttatcgaatgtttagcagccccctttatatgttgatgtactgtaacataggactgaactggcaacggcatccatatgtagccctaacaaatctcagaagagaaaactaacatgtccaattgaaggaccttctatatgagatgacccaatgtcttgaatagtttcagtcatattgtattgtttgtttgtctttggggccagtggagatctgaagaatttctctatctgtgagactaacatgatattgaaggcaaagagcaattgctaaaagcattaacatgatgtcatgatgttatattagtgccttgataggttactgctttatgaggaactcgtttggcatgaaaaatcctccatttgcttccttactttattggtttttgtctctgtagaacatttattttgctttcagatgtcaattactctattggaattttgggcatgtcattagctgtaatatatacagtgttgaaataactttcagctgtgtagtgacaaatgataaaaactcgacccaaggggagagacatcccgaaggcattacacttaaggtcgaagaaaaggccctgaaagccggctcttgcttgtacaagggctccattgccacaagccgtatcttaacccatactttagggaccacacaccgagggtccttttgtttgtgagaaccagggttgaaaccctggttgacaacttcacaactggaggacttgctgccgtgctataagcatgttctcaaaaacttgaccaacctagggggaactaggtgccttttttatttaagaagaaataggcacctgaattcgcttcgatgaggacttgaacttgggcggtctgggcatcaatgtcctcgaccaactgataatgtctttatacatttcacagctcatgttgaaccaaaaaaggggcataattgcaagcttacagttatatctgtagccagtgggcagcggtaattaattgtagtttttgagtgatcagtttccataataagaaccgggaggaaccaaatgtgatggcatagcacttggggagttggggtataggcagcattgattgatctcaactcttttgtttccatttgtgtcatacattccagtttgaccgatgtttgcacgtgtagagccgtcatgatctgatcacacaggaagactctctttttgtttgaattgaaaagggaactattccagtgcctccactgatgactcactgaacatgctgcttcactttgaccattttgtttgtcaatttcgcttgatatgcaaccagggcggtaacacacctattgtgtggttgatgtgaacagaaactggtacatcataatagcaccaaaagaagaggatagattgcacaatagataagtagagcaccagcaagcagaagattgaacctaggactagcatcttagtactccaacaacaccttctttaatgagttatgaaggagggggtaggaggttactttgacttggaaaccatagaaactcttggggatgttatatcaaactacactgaacttagttttacagtgatatgaatgtttgtgcagtgatatgaatgtttctttaatttctctgtgcatcgatatgaatgtttgtggtttttcaatctgtaagaaaactgcttgcttttattatacacttgaaattcataatattgtttggcagggtattacttgtgactattgctttactgcagtaactgcaattattaatatgtaattttttaatcatcattaggtgcctctaatcccttttttcttttgggtgcagcagaagaatttgaaactgacagtgaagattcagatgtcagtggttctgagggagaggacacatcttggatttcatggttctgcagtttgcgcggcaatgagttcttctgtgagatcgatgatgattatatacaggatgatttcaacctttgtggtctgagcaatcaggtgccatattatgactatgcacttgatcttatcttagacatcgagtcttctaatggtgagattatttttctcttaagaaagctactaattcattatttgcagtaaaatacactgttcatataccatttatgaatgtcactagctgcaacctatatttttcataccactttgtatcctaacatacttttttatgttcatcaatctcattttctaaaggagccatttccaataacctatttataaacattccacagttcaaagtctgaaacatgtattgtatacacatacaccttctaagtcagaccatttgtatacaggtgatgtgttcactgaggagcaaaatgaattaattgagtcatctgcagagatgctgtatggattaattcatgcaagatatatcttaaccagcaagggtctggctgcaatggtaatctgctagcagtttgaccatatttgataggctatgcttgcttccttgactacttgaatactaaattattctgcttttgccttctgcagttggagaagttcaagaactatgactttggaagatgcccccgggtatactgttgtggccaaccctgtcttcctgcagggcaatcagatattcctaggtctagcacagtgaagatatactgtccaaaatgtgaagatttacattatccaagatccaagtaccaaggcagtatccttttgattgtttgtcttagatgtgttttatatgaactgctttttttcttaataaattgtactcatatatggagttaaaaacgaggtgatatctgatagggcataaattagaaattgtgatttcctaagcagaatcagacttattattcgcaacagctaaagcaaagcacaacacgaacataggcagaattatgaatacatgacccatttgtgctgctctctaaaacacatcctttaaaaaatcaaactactgagtttttatgccacctgtaatggatttcaccactctcagtttctccaagttataggttggtttttaggcagcacttgaaaaggggctctgtgtagaggattctcattcaaacatggttttcctttattttttttatgcgactcatacaatttgattagatttgtttggaacataaccatgggtaaacaaacattgattttgtgctatcatgaatattgtgttactatttttcttgcacttgtatctcctttactttgctaagacattgacggagcgtactttgggacaacattcccacatctcttcctgatgacatatccacacttgaagccacaaaagccatctcagcagtatgttccaaaagtttttggcttcaaacttcacaagcagtcatgacaaacttgtacggtaagctgctgcttgtttttacctagtttttagggagagaacattgtggcccgaaattattgcggtctgttgatgtgagaacatgtgagcttgaatctcgctgtaattgccgagcaactgtatctgtttttgtactgttaattctgtgatcctaggttgtctcactgtatcaaattatgttaatccgcatgcttttcgggttatattatatggattttccccccagacttcggactttactctcactgggtaacatcgtgacactagtaagcaaaaaattattcggtatttgcttaatgattgatcgcttcttgggttgcttcttcttgcaaccttttttttctcaaagttttgtctactgggcattcttttattcatccagtatattttcataaccatggcatctacatttgtctactatttgttcccgtgccttttgtttcacacgtgttgccatcaacttgttcttcgatttttctgggttattattaccaccttagttttagtcatactgctatatggtgccttcttttgttagcactggaatatactgtaactaaaatattctgattcctgacaccctgaaagcttgaatattaatcattaatcattaaacacacgtaggatcatgtcgttgttgtggtcatgtggataagcatgccgatctgaatcgacttatcagcatctcgcggcgtttttccccccctgcgtctctgtcgagccgacgacgagattacacatttcatgcgtgcatacatgcgccatgtcctttgttttgacgtggtgacgctcccagtatggcagtgtgcaccgaattttcacccaaattgtctgtagattatttagatcgcggtcagcaacacaatcatttgagagtgagagaatgcccaagaatatccttgggaagaacatgtggatatttgtatgatacaattcgatcagttttctgcgaaattttattgtgccttgtagaactttgaaagacctttttttggaattgaacaaggtctagatcaaaatgatgaggatcaactacttgggaaaagtggtcaaggacccacttttctagggtctaattctaactctggccattagtccttggttttccttgttgctgcacagagagagagagagagagagagagagagagagagagagagattagacagacagatccaaggtaagcagagccgcaagcgaagcacacggaaataggaggggaggcggctgcttgcaacttgtagctgcctgtcgtcgtcctcgtctacttccgatccttgtgctggtcctctccgcacaccactcttcatgcactgcttatgtatctataaaccacaagcaaaaagaaaaaaaaagttctaacaatactttgttagctgctgagtgccattattagagtgttaaaacatactattactaactgtggaatggtgggcgcccaagattgctagtgtgtgccttatcctcttggtcgttccttttgattataaaaaaaatgtacatatttcaggactgttcgatatgttgccaaaatcaaccttgttaaaacgccaaattttgatatatgttgacgttacatttttttttgcagtgttggatgtgttggtttatagcttcgtcatattttaatagagtagcatgggtagtatgtttagtttattatcctatatacccacctctctcatctttcaatgtttattgactccaagcatttggtctctctctcaaggttatattaccttgtttatgcaagcaaaagtaaataaattactagttaacttagttatatcttcatttgatcctattttaatgcttatgaacgttaaagctataaaactacacgagcaaaataataaatttgctcattaatcagcaaaaacaacaaatgacattaaattagagctaagggcgacaactacaactacaagtggagcaagacaaagacatttaaacaagaaaaaaacatttaattttcctagtcacccttatttaaataacttcaagaagacgacatgtcgtatagtgctactctacacaaatgattgttccaatttaaataatcattttcttttttagggtaaaataatcattttctatcacaggtttaaacagaatcaacttgttgtgggaaattcaaattcaaattcaatttgaattatgttaaaagctagaacaaagggggaaaaaatcacaatcaattcgtagttttcagaggagaattgaatttgaataaattcgtttaaaaaacatcgaacaagaggggaaaaagaaccagcgggaactcagggaggaggagaacaaacaagagaggaaaaaaaaagaaaaaaagagagagagagagagagacccggaaaaatcggtgcagaaaagagagaaaagcgcgaggcggctgcccccacccccacccacgcctccgcctcgccacgcacccccaccccatgtcgccttctccctcgccggcgaagcaacccccaatcccggccgaattgatcccaattagatgcaccaccaccaccacctccccgtcgtcgcccccgccgccgcatcaccggacgcggccgccgccgaccctcccccctcctcggatcccaaccacctcgggccccctcccgccctccgcatccacatcccctccagcccccaccatgcgctcccctccacccctcacaagcgccccgtcatgacctcctcctcggcctcgtccaccccgaccaggccgtccccgtcgccgtcgccgttcgcgccgccgcggcaccgccggaaggtcgcccccgccgcggcgtcgcccgcgcccgccgcggcggcggcggcggcgaggcacctcctccgctgcctccacctccgcctccgcctcctcctcctcctctccctcccgaccctctacttcctctccccatccccggccatcctcccgcgctccctcctcgccgacttcctctccgccgccgccttctcctgcgcgctcctcctcctcctctgcctctccctcccgcgcctccccttcccgctccccttccccctcccgctccgccgcccgcgccgatcccccatcctctggtccatcggctcctcgccctccgcctccgcctccgcccccaccaccggccatttcgtccaggtctacagcaacggcgatgtctacgagggccagttcaaccgcggccgctgcaccggcagcggcgtctactactactacatgagtggcaggtacgagggggactggatcgacggcaagtacgacggctatggcgtcgagacctgggccaggggaagccggtacaggggccagtaccggcaagggcttaggcacgggcacggcgtatacaggttctacaccggggatgtgtacgccggagaatggtccaatgggcagagccatgggtatggcgtgcacacctgcgaggatggcagccgctacattggggaattcaagaggggtgtcaagcatggacttggccactaccatttcaggtgtgggactgaacttatatatttcatttgctgctgcctgctagagaatttgtcattgttgtgaaattagctgttgcaactagttaagagcatgtttatgatccatcattggtcagtcaaatagatatggatgttgcaaaatgtttagtggtaatgtcaaattaggcaaatgcatgattgtttaaccacagtatatgataagagtgaaattagcatggttttggtgttttgcaccagcgattgctaaattattcccatccttgtggatttgtgtatccaaacaagtatcttgtaattggttataacttataacacagttttatcttcgaaccttatctgcttataccagtaagttaggtgttgcttaaattttagatcttgtgaagttgagcagaacgttagattctctattatctatgtagttgtctactatgttgctttatatgcactgaattttagagcttttcctaaccctagtagataatgtattaaatgtgaatgcttcatttgatcaaagggaatgacttccattagcttattgtttacaagggagagatgaaatgttgggctggtagtggtaccttcttctgaaagatccaacttggaatttacttttgccatttatggtagattctgaaaaagttgtaattatcactagggtatagcctccaacgaccctgtatttttttaccctctgccctgctcatgaatcagaatataaggtgttcctttatgttctcagcctatatcattaggtaggaaatcaatttggtgaagcagagcagattaccaactatagagataaaagttagagctgtagggaaaactgatacttttaccacctcagtctactaatacacatcattttttgttatcacttatcagaaagcaagcttttttttacacttaatgcatgcctatattcttctagaagacgtttttaaagttaaaacaagtgatgatttgcctgtttatgctagtctagctgtgttttgtgagcatgcttagctgtcctcctgttccatttcttcctggattgttgatatgctgttagaagctgatctcgtgcaaatttgcactggtcaagctgagcactagttatttcacatgtggaatactggatgtctaatttgatccattgcattttgcttattccattagtttccatttttggttctttccagccatatatctctcatctctctgttgtattatatctgtcttgattgtttgacttcctaccataatcccatgtgtatccaagtagtgaattagtgataatctgaaatggaaaacagggtcctctcctctgttggtttagcttctggcatatagctcttctaaagctaaatctgtttctcgttgttggggatcattctgtatttgttgattagggtaattgttggttcattcttagttgtagcttcaatctaaatatctaatgcaagcagtcttttggtatcgctaatactaatatgattgatgttctcttttatttatgctgcatcgtttaaccgtgcgggatttggccatccattctctgttattagttatctagatttatgtccgtaatgcttattgatttatgtctgattggttacgagctatattagtcatcgttgacagtgtcatgtcatgacgggctgtttggatttggaaatcctactttgttgtcctgtgtcagggacgaatattaaaaatccatatatatactatacctagtcttttcacttccatctaccaaattaaaacttgatggtgtattcatttttttttttgcaaagtttatgagatagcatgatatattgtgtgtgatgtatgttagttgtaccagtctactacatatttgagcaccactatctgtttgtatatttccttatctttcccttgtttacagtttcccgtgtgaaactttgttcttctctacggattcattttaataaaagctgtatgtttagatttccacatagcccataggccatagatgcattgttgcagtttagcctgattcactagtgctctatatatctatttatacgatgcagcatcctgtacaagtttattgggttgacctttgaactaacattttgttaacttgtgtcaaggaatggcgatacctatgctggggagtactttgctgatagaatgcatggcttcggagtctacagttttgccaatggtcacagatacgagggagcttggcatgagggtagaaggcaaggattaggcatgtatactttcaggaatggagagacacaagcaggccattggcaaaatggagttcttgacaccttgagcacccaaaacattatccctgggtcccctatagctgtgaaccattccaaggtcctcaatgcagtgcaggtaatgttcctgaacactattacgccattagctgtcagaaagtttctctggccatttttgcttagtacaattctactctctaagttctgattatgttgcactatcaggaggcgagaagagctgcagagagggcctatgacgtcccaagagtcgacgataaggtgaacagggccgttgcttcagcaaataaagcagccaatgcagccagggtggctgctgtgaaggctgcacaaaagcgcatgccaaataatggcaatgatctaccgttgtcagtagtgtgagaaggaaagccaacataaggttggcacgaagctgcttcgcgatgtcatcgcgttgttaccaattcgcccgacacaaccttccgcttccctacagggggaagttgctccaccccatcgggccgtggcgataccctgagtgactgccgttgcagcagagcttcggaaccagagttttccgccattccctccatacatcttttgtggtgtcttttgcgacgcagcagaactcctgcgcagagagagagagcttcctgttgtcgaaggcaactgatcgaggtcagtagggttctcgtgctttcttttttttctcttcttcagtgtaatactcatcctatgtttagagatacgatgatgtacacacccccaacatcaggagacaaaatctctgttgccttttgtctcttggctttaagcatgtatagaacctacatattccacggtgccggccgtgctggttggaggaaccgcatgccgcccccgccattgtctgtactactttgtacctgaacgcataaagataaccatgaccttgaatgaatggaatgcctcctgttgttttcgtggttgatgtgtaactgcacattggattatactattaccattagtaggtataggaatatatgccaaaatccattatcatttgtggggactggaaacacgagctaccaaataattgtggattgatcaacaagcatttgcatcttgaaggaaattattggcgcacccaaagcacaattcatagcatacgatgctgcttgctgtttaattaaagcatacaaactgaaccgaatagtgattactccaagaataaattggcattacaaattcaaaccaaatgctgctcagctaagtaacaattagaaaaatcagagatgagaaacggcgatgataccggattactcagccgtccgtcaggagtcaaatgccgcgttcaaaaatttacgtaagcgatctgtatcatcagcgacagctttggtacagttcaatcagagccgtcgatgactcgatcgacggtaggatgccgcgtccttcccgaagaaggcttcacctgccgcgtcttgcgggctcgcaaatacacgacgcgtctcaacgactccaccacgagccgagccgagccaacgaagaaatcgttgccaaccaaatccacccgccgattcgcctcccccctcctcgccggcggcggcgaccccgcggcggcggagagatgatgatgctgatcgactgctcgggctgccggacgccgctgcagctgccgcacggggcgccctgcatccgctgcgccatctgcggggccgtcacctacgtcgccgccgccgcgccgccaccggcccacggcgaccccgcccgcggcgccgcggggccgggggcggtggcgccccagcaccaggcgccggggtgggggccgcctcccccgcccgcgcacgggcggaagcgcgccgtgatctgcgggatctcctacaagttctcgcgccacgagctcaagggttgcatcaacgacgccaagtgcatgcgccacctcctcacgacgcgcttccacttccccgacgactccatcatcatgctcaccggtaactacccgatattacctccctattggttgaattctggttcgggtatcctcaatttcggggtttgattgatcccccaccccaccaatagtggcctgcgtgtgaagagattgttctggagcgaatttcagggctagggtatgatcgaatcaaggagctgtgggtggctttgcattttgatgaattttctgctcgctttttattttactgttgcgatgaataggcaggggcaaatgatgaggaattgagaactgtatttttttcgttggcgatatcaaaatgtaatttaaatttattcctgcctcaataaactacgtatggtttcaatttgaagataaagctggtttggtttgatccatcacactctttagggctgatataagctaatgttgttgtgagtcatgggctcatgttttcgcaaattatggttttactaactaaatggaatctagtaggatgcaaatgctagactgaaaacatttaagacaggaaaagggcaaagtatttttttgtcttatattatctttctggtatatgaaatttgttttctgatgatctgttgaaactgatcataacccaatactattggtttatttcttgtcttgcagaagaacaaactgacccttacaagattccaacaaagcacaacataaggatggccatgtattggcttgtacaaggttgccagcctggagactcattggtattccattattctggtcacggagcacaacaaagaaactacagcggagatgaagttgatggaatggatgaaaccctctgcccattggattttgagacacagggaatgattgtggatgatgaaataaatactgctcttgtcagaccacttactcctggagttaaacttcatgcactgatagatgcttgtcacagtgggactgcacttgatttgcctttcctctgcagaatgaacaggttcgcttatcttgtgcaagctcttttttttttggcacttgaatgataagtacatggacttaacctaatggcaatcttattatcctatcttcactacaaactatgtttgcaagaaagatgctatttacttctgaaccaatttgatttgaatgccatgtttgtctgattatgtttcagctgatgatgatatgattttggagcttgctcaaatattctattgaaatgcagtttgaggacagcattcaattattttttttgtctcatgatgattatattctgtcatcctgctcaaatatttttactggaatgtaatttgagggtagagccagtgaactatgtttcttagtcaattatgtcaatacaagtagttaccctcttgggactgtcatttgttggaaacagttttggtgtggtactgttcaccatccgtttattttcacaacttactgctaatttgcccatagtatgtccatcaaaatgttgtttatcctaggacaggaatgtgctgtttagagactatgctgttttattcagttggttttgttttggattccttggttgtagtgtttactttacaaacatagatctgtagatcttatgatggaaatatgttcagctaatatccctggtcttctttggtacaggagtgggcaatatgtatgggaagatcatcgacctcgatctggtgtctggaagggcactagtggcggcgagtgtatttcatttagtggttgtgacgatgatcagacatctgcagatacttcagtaaatttttgaattcattccttctctgttagcatcctaggctgtcattccttattctcttcgaagttaatatatgcttaaaagatagctttggcaaggactctgattgcagatcatgcctgttctgttactgttctattggtcagttgtgttctattctgtttaacccaatttataggtattaacatttgattcatttgcacttgttccaatcaggctttgtcaaagatcacttcaactggcgctatgacattttgctttatccaagcaattgagcgtgggcagggcaccacctatgggagtatcctgacctccatgcgttcgacaatacgcagtacaggtgattcaatgggcagcggaggtggtgctgtaacatcgctaatcacaatgcttcttacaggaggcagcgttagtagtggcggcttgaagcaggtaaattctggagtttgacatattcctctctatctagtgattatttaaatcctatttccgtgggtacaatacaaaaacacacagaacatgttcttttggttgtatacaatttccattcccttttcagattgtcaacaatactaactgcttttctctaatctgcaggatccacagctaactgcaaacgagccattcgatgtgtatgcgaagcccttttctctatgacacgatcctggtattctccaccgcgtctatgattatatcactagtccccgtataaattatcatgatgtaaatttcactgttgaaagggctccatttcataaatagagctaacatgttgcatgtattgttgctcattacattgttcacgccctttggaatgtgatttgtaccttggtcacattgttccttgatcaagaccatattatgctcagtgcaatatgcacgggttaatgagattgtagcatatgtgtttctttctttctttctttcttttcgttctccttttcttctctcttgtccttagatttgaaaagtccggatgcaggttttggctgttgcgtcctgcttatatatgtcgtagtttgactctgtaaagtacgcgtgaaaggttgatttttcagggaaaagaagaaaaaaatccgcaggtttgatttggtcgccgtctgccggcccaatgtatccaacataaacctgcataaagttcaaacacaaaagttcaaaaacgtcggcccaatccttaccttattatctgctactttgaacaaatagaacccaaattgtttgctgctgcaaacgagctatttccttgcaaagttgcaaaattattctcagctaacaaagcttattacatggtgggcagtttacacataaaaagctgccaaattggagtacagtgctttgaaatatgacaaaaaaaacttatatggcctaaatatgaactagacatgatgcctgctcagttgctgactataaaactctgcaacctgcagactccccgcataatcatatatacacttccctttcccggtgcacgtagcaccgtacctatacacaataatggcggcgccacgaagctcgcctccatactacacgacggcggcggcggcggccgcctcggcctccggcgccgccctcttctcgaggaacccgacgtagaggtccgactgctcggtgtcgcagctgggcagcgccgcccgctcgccgccgtcggccatggccctgacgaacgacacgaactggcgccagttgtcgccgtcgaacagcttcttgttcatgcgcaggtacgtgaacgcgcccagcccggcgctcgccgcggtggccaccacctgcgcgaacgccgcctcgtcgtaccgctccagcgcgttctcgccggcgagccccacgcgcgccgcgcgcgccgcggaccgcacctgccgcaccagctgctccggcgagcacccggcgtgctccggctgctgctcgtcccgcatctccatgcacgtgaagttgagcaccgcgccgcgccgcgccagcatcgccgcgacgggcgcgtacccgtcgcggcgccgcgtgttgtagtaccccgccgtgagctccgcggcgtgcgaccgcgtccggtagtgccagtggatgccggcgaccttggccgagagcgcggcgccggtgccgcggaagacggcctcggcggcggccaggacgcggtcgccgtgctccagcagcatcccggagtaccacccgaggaagaagtcgccgtactcggtgcaccacgtgccgtctcgccggaagaaccccgtctcctccgggaactgcttgtactcgccggcgtcgtgcggcccgcccctcccccactcctcgtgccccgccgccgccgccgcctgctgcagcgacgccctcatgtactgcacaccaatcaaccaaaccattcaccgttaatcccactcacaaatcacatttcacccataatttgataatacttttgcgcgttcgcgaaaaaataatttggtaattccaatcacaaatcacatttcaccgataatttgataggttaacgtaaagaaagagtaccttgtcatagcattggaactcgccgatgccagggaaacgccatgttccattggcctcaggatacgaaggatacctcagctcaccacaaggccccaatcctacttggatctcctgcaatttttcacaacgaaatcaagatcaaacaaattgcttggatcgattaagcaaggatgtggatggagatcgatgcagggttaatggttaatcatattaccaattcgaaatcgctaaaaaaaactgtcgcaagtttttttttttgacaaaacaatttcaaatgcaactatagtatagttgtagtgtaattacaatgtaattaccacaatgtaattaccacgatggtgttgccgaggtagccgcagaatgtgtcgcggaagctgcgcatgtagtcggagtagacctggatgggcgtcctgcccttgagcaccggcagcgtgtcgcagccgagcgagatgtactccggattccgacgacccgacctgtccgtgtacacgatgtccgggttcgacttcatctcctccaacacccatcccggcaacgggatactgcatcaacatcagcaaaatcacatatgagcataaaccataaaacactaatcataattaatccaatgaaactgtcacagaaatcatatgaactgttagaactcgattttgatctctttgttgagttgattttggaattaattagtggtggcaaaagcaggtgtttgttggttagcagtagcccggttgcagttgggaggaatcttttgatccttttccttcttccaactcctgtgacagcttcgtatctgttgtgttctttagctatcgcttttacgctttttcccccttcctacttggataattttgattgcttattgcttcagaaaaatacacgtatattctttgcgtgcaagagaccaacaaagaatgaaaaacccctaaaataaaacattttttttctaatcaaataaaatctgaaccatttcctcaagataagcagatcatttggctatatatagaacatagaatagaaccaaactaaaaagtttttcctaatcaaataagctttcccttaagctaagcaaatacaatacaatctgaaacattttttttaagctaaccagatggatcatggattggctagaacagagaacaacagttgcagttgcagagcactctaggttaaatacgtgatccaaattttaagcccacagtatattctgattagttttctagtaggactcagtgtctttcttttattttctatatatacttttgtaagttgtacgagaaggtgtgaagttctcattgttcttcctctacgtttataatcaacgactctacggtaaacattgccggtcggcacctatggtttttttaccgaaagagttttccacgtaaaattcatgtctccgttgtacatctatttttataacactccgagtccaagaaattaagaacaaaaaaaatggaggaaattagtttaggaggtgaggttgggtaggcttacttgcaggagtcgccgacgttgccgccgcactggtggaaggacatgaccatctggaggcggaggccggcgcgctccaccatgcggacgagctcgccgtagccctcccagtcgtaccgccggggcccctcccgctccaccaccccccaccacacgtccaccatcaccccctccaccccgccgctccgcagcgccgccaggctcgccgccagcgcccgcgcccgcgccaccttcccccccgcccccaccgtctccagcggcagcatcacgtacaccgccgtccccttcccccgccgctgcccctgcccgcccccgcccccgtggtgcagcagcgtcgccgcctccggtgacgccatctcctccatcgtcgcgtgctccaccggcgccgccctggcgagccgcagcctgccgccgctccccggcgccggcatggggacgacgcagcacggcggcgcgtcctcgcgcttggaggacgggtcgagcggcgacaggaacgacgtggatgaacgcagcgtcaacgccatggacttgatctcgagctcgagcttctccggagaggaagataattaagtagataagaggtgcttaacaactaaccaagattgattcgatcggagatgaggaattgaattgaattgaattcaagaagagaagctttgatttctttcttgcttggatttgaagagaatgaaatgaatttgggagggaagagtcgctgcgggtatatatagaggaaatctcaactatgcgtgtgatggcgacgtgcttatcgtcacttaaccaagtgatcaatgctgattaggattgtaaagctaaactaataatctttcctcctctggcactctcacaagtaaagcaagtagtagcattgcatcagtatgcatgtgatttttgtatatatttttttctctctagtgtgcatgcttcctggttggagattatgggggaggattagatcagcagcaatggccttatccattatttttggaactaaaaagtaataaagatttcaattaatttttcgtcgttttgagcaggcacaagcagctgatcgttgagtgttgtatacgcttccattgctctgttgtactgagtactgtcaagtgacacctgttcaattacaagctacttctagataggtgggtaattatagaatcaaactaaggcgataatctctactaatccacgtagttagccagatggatcgagctgggtgagacggcgacaacgtagcggtcaaatcaaaggggtgcagtggaagaagattcagtacacgtacgcgtacgcttttacacttggctgcgaagagagagaagggagaacggataagtcttacgggtgaaacggggcgtgtaaacggaacggatatgtggacggcacgtcagcgaggatggaccaacgtgaggtgctgacgtggcaagcattgccatggaggacagtgcgcttgtgaggctgctggtgggccatggctgatgttggtgacatgacatgtgtgtgctagtagcgttttctagatcgagactccacaagaaatttgtgtggtctccgcttgttgctgggtttggtccgtcggaatttggagttggacaaaaatgcagtaaaaatgcgaggaatttaatttactgtggtggtatcatcttccggggtagttggtgtttggtgcgtggtcggtgtggagggtttgcgacttgtcggctaaaatccaaacttgggtgactcactgcggtgtctgcatttctcgtcgagatgggcgaatcagccgtcgtacacggatcgatcggcatccacccatgagaatcacgcacgctcctgtcggttaaccacacatcgatctgtcgtacttggtagtgtaacgtcctacttcctccatttcataatataaaactttctagcattatctatgttcgtatagatgatgttagcattttaacattataaaacagagggagtactgtagtagtagtatagtactccgtatatcgctaacgctaattatatattccgtcacttgcgaatctcgtgcttaacgcacggtcaactttcaatacgtacgattctcctttgcctgcatgacaatcaaacgggataaattactgacatatcctatgtggagcagcgtcacctcacgcgtgttaacatacggagtggtatggtagtaaacatgcaacgcatggtttaattagctaaatcgactgtacatagccttgtttagttccaaactttttcttcaaacttttaacttttccatcacataaaaattttcctacacataaattttaacttttccatcacatcgtttcaatttcaatcaaacttttaattttagcgtggattaaacacacccatagatagacaagtagaggagaatggtgtagcaaggtgaggtggtggtgacgcggccgcgtgtaggcaccaagtgaaacgcgtggacggcgtgccgcgcttatccgtctcgtccccagcatcatagtctccgccccacgttcacgggacgggacccagccgtgcgctttttcttggctgcttcttctaccgcgcacaggcacagcgcaggtggtgacctttttgctttttgggtccctcctccttccaagtttgtggctctcctttgcacgctctggctacttttgttgccatgtgtgatgtgtttgcctagtgcctattggtttggtttggtttctctcgtccctttcctcttgtgtcgtgtcgtgatgccgtgatggtttgttgttgtgcctgttgagaataaattgaagagaagaaaatcgatcaatgctcgctcgcccacaaattcgtcaagcatatgcttttgtgcgtgacagataaatagataattcggagcaattttgctacatattccctccattttataatgtaagttattctagcattgcccatatatagatgttgtatatgaatgtaggtaatgctagaacgacttacattataaaacggaggaagtatttatcaataaattttctcacaaaaatttgacatatgtaattatatatttataacaatgtagtgtaattgcattataatttgcatgtaactacttcctccgtcccacaatataagggattttgagtttttccgtcccacaatataagggattttgagtttttaattgtaacgtttgaccactcgtcttattcaaattttttttgtaaatataaaaaacgaaaagttgtgcttaaagtactgtaaataataaagtaaatcacaaataaaataaataataatttcaaaaaaattgaataagacgagtggtcaaacgttgcaaacaaaaactcaaaatcccttatattatgggacgaagggagtacaatgtaactttcatatagatttgaaccgttagatttatttcaagattcgtgcatgtgaggaaggaaaaaaaatcacaacgcatgcatatgtgatagcattcggtcaaactacctctatttcgaggaaatagcgtgttacggagagaattttaaaagttacattgttatatgcaaattatattataattatacaacgattatattataattacgtctgtcaaatttttaaaagaaaaattatcaacaacggtatagatagtcttctgcaacgtgaactctactgttgccaacgtatttgatatcgaagtaaagaacaggaacttgagctcagattttttttactctaaaagttcaggtgctgcaaattagaccttccaataggataaggacccattgattacctacgattgattataaactgtaacggtttattaataatagaaaataatttataaataaaacttatatatacttgttcttagataatattaaaagctaatgctaaaaaaaccctacgttaaagaaatatcaaaaccaacttcaaaattaaaatttaaaattcaaatttggacaacaacttataaatcataggaaaaaaaaccgtcggaacctgaaccgtccagctgtcccaagaaaaaggccttccatcctcagctcctcttgccttttttttttcagaaatatctctctcgcaataccctatattatttgatatttcctccttctgtatgaagtattcatacgcagcaatgcgtacagatgcagagcaccggtcggctttcagtttcagggaagtagccttggccttcacgggaccgcgagtatatatcgccatctttggcctttggtgttcttggcttcatctccctctcctccatagtaagtggaccaccggccggttgccggctacggagacgcatggatcgatccatcgaaacagcgagacgatgatatgtgtgatcgatcgatggatgcgtcttccaggagtggatcagcggatcgatctatctgatcctgaaatgttaattcctaatccatccacgtagctaggggtgcaagactgcaagttagggaacgacggtgaatgatggatggatggataaactacagataggaacacttggctgtcaagatcagacggcgtgtgcgtgcttatccaggtgaggttttgcttaaaaaaaatctagcttggtccaggggagagcaacatggtaacatggcatgtgatggaatctaccattttcttgtagtaccaaactgttccagaacacattgaaacaacccatctgcttgtaagagacaggtggagctgaattttgcccggccaagattttctgaagtgccccgcaaaaaaataaagattttctgaagtgcctagacgaactggttttcagttgtggagatcgatgatgtttcataaatgcgagtccacttagtactcaactaccgactttgaaatgcgaaacaattctttcattcaggctgtgtttgttccattcaaactttcaaaaattctatcacatcaaatgattagacatatgcatgaagtattaattatagacaaaaaaaatccaactacacagtttatatgtaaattacgagactgtcgagggaagtccctcgatagcgggaggtcgtgagacccttgaacggctgcccgttcaatcggatgtgaccggtaacaggccggtcacagactggtcacgtccgattgacgtgggtcagctaggcagcactgcacgtctgcccttaccgcattaaatgcggtgagggacagttggggcgctgcgcattgatggctgttcagcctgggcccccttcccactcactccccccgccacatggcagctgggcgagggcctcagggcaaggtagcgggagagcccgaggggcacgacgtggcaccccaaggccccccggccgcttctgtgactcacgatgtgcgggagtagggccaggctgtagagccacgcggctagatggaaaggtaactttccctcacttcgcataccccgggcccatatctccgacaaagacgaatattttgtgcctaattacgccatgatttaataagacgatgctatagtaaacatttgctaatgacaaattaattaggcttaatagatttgtctcgtagtttacatacaaaatctgtaatttattttgttattagtctatatttaatactttaaatgtatgtccgtatacttcaaaatttttttttgaaaaggagctaaacacggcctcagtcagactaaactgaacacaaataaaagaaaagacaactcatctattcattcaacgaaaaaatatgtcagtccaagtaagtcaatgaaaaagcttctcactccaatcagttagttaatctgttagttaatcttactaactagtaaatacaaggagctaaaaaccctacccctcttgattgaccaccatggtctgcagctcccagctcgtgtctttctttacccttccactttccttcatcctagtgatgaacgagcaatataaaactagctggaatcttcgaaagttatgtattggaaaagaagggagcacataccgtaggaacaagccttaagaaaaaaaaaacatgtaccaattttacaatttcattagtgcggacggttccttaagaaaacaaccagaatgacatttattcagtgctgcagaaccaggctatgcgcccaaccgcttacatgctttttatttagtgctgaataaaagtacaaccgattttacatgtacaaaatttacaaccccttttctgctggttgacaagcagacggattgtttggtacaagtgctcgacgtacaagctttgaccccaagggtctgacaaaggtagaagcagaatgatggattacaaatgggagcaaatgtaaacctgaaactctcatttcggacacatcttgcacgaaaatgctggatctgtcctgctcctgactcctttcttacacgcatgtatacgcacctatgttatgtacatcactttacatgtgtctagtgtctacactaatgcatggcatgtttgcctctcatctcaggacctctccaatgcttgctgggcataagactctgataccttcttaggttttagctcacactcttcttttggccgccgcatcgccatgaattgcagtgacttgctctgaacttggtaaacatagcatccccatgggtaggcatctgacgaagcccatacaatttgctcctcgtatactgcatcttccgcaaatctctcactaacacagaaggcagagtcgagagggggctcctcaaaagcagatacagccacgcatccgagagctacgtatccttcaggtggccgtggaaaccatattgatacaggattcctgtaatcctcaccacagtttctccaaacctattatgccaggaaaacaatgaacagaagtgcacatcccaactctagaaaatctatatgtaattaaataaaagagaccatataacattataatagctccctttttaaaatatatgacgtcgttaacacaaacgtttgacaatttgtcttgtttattttttttgatttgacgataaatcaagttacaataaaataaatgataattaaatactttttagttaagacgactggatctcaaaaggttaatggcgtcatatattataaacagagagagtatatttttctttgtttagaaatatatttttagcggaagctcaaaattaaataaagtaacaagggagaaaatatctcattaaacactgaccaggtcatagccaagtggcagagcgaaatttccacccacatttttgtagacagcagcaacatgtggtggatgaatgccaacatgagcaatatctccgattgagacatacctaaaattaagttgttaaatatttgcagcaatcatcaaaataggataactttattcgaaggaaagcataaaaacaggtaaattagagggacataagtctcatttcaacatttcatacccactagggcagagaggcctccagatactaaacacccttccatcatctgcaacctggaaccaaaaccacggtttattttaaacaacacatatcatgaatatagaagaacaaaagatcaggaagattatcttttaatcataaggtaaaagtagctaatttacctgctttgaaagtagtttgcatctgcttcgaatttcttgttcactgctccacatgttctggaagttaactgtatcgttaatgagtcgctcctcaacattacttgctgctccccttgggcttagcaaaggcctagcaaaactgtggaactccctcatatcttcatcaaatgcgaaatatacatcgtgctggcccccaggaacctattttggtttggatcagaagtatgagttcagttgtttttgttttttgtttttttgcaaaagcgcgcgcacgtgcgtgtgtgtgtgtgtgtgagagagagagaggaccttcaagggtacaactttcatatctgcctggtgagatctccacatctttcgaattgaagaacaaagtagaagagcctgaggttcatgctcctcatcaacgttgcactttataagccttacaaagttttcagatctcctaaaattcttcagatgtatgattacgtgagaaggcctttgatacccagcttttgccagctccaatgcaagcacatcttcccaaggaacgtcccaaagtattttcgaaggcttcttatccattttatctagatccacgcactacacaaaaagaacactgggatttagtaaaataaatagaagcagtttactatgagaatcagacagaaagaggcctcacctgaagcagtatcactcgtttgtttgttaccaaagcaaccttctgattttgtacgataaaatgatcttcatagtaatctgaccatgcatactttgaaggttcccgaaataaatctgtgcatgcaaaatatctgctagcctctgctaggtaaagggccatctggacaattgaatgctcaaattaagtgtatagcatcaacaatattcattgactgaagtaaaaccagtactatgaaacaaaaactatcgctccttgaaacagttatcagaaggctagcacataatgttaaccatcattttctactgcagcatacttgcagaacctactatgcaactgtttatcaagaaaaacaaatacatctgtcgtgggtggaggctacaggcctagtcggaactgttatgggctggcctaattcgcactatcatgtgctgcagccactcaataaggcggaaatgccactcacatggcaaaaagaaagacagaagtgatgtagcataaaggctactgttagatataaacatttaggagttgcattgtagacaactagaaggaatttgtactagagataagaagcacaatctactgcttaaaagttgttaagaggtagaagccagccttaaaaaggctgctggccagactaagaataacgaaacatgggatataaagttcttttaggtctcgtcttcccttaatgtctcttacatatctttttctcctccctaccaagcaccctcattctgatatatccataacaatatttttttgcgaggatttacataacacaattgacggtgaaaggaaactattttgaggtagaggtatttttagagcatcattttcaggaatagctgtaagtttcagcagaacagggtgttcaacatacttaagtggcaactctattactctgtgcaccatttcgcaaattttacatatctataatacaatttcttaaaaacaaataagggaaa

SEQ ID NO: 5967 - DNA, 16641 bp, Oryza sativa
gctgttgtcgtcgtcggcgatggcggtggcggcggaggcggcggcgatctcccgcagcgcctcctccatggcggccttggcgtcggcgagcttcatctggacgcgctcctcccgccagagctcggcgacgcgcagcatccggcgctcgtcgtcgacctcctccagcgcgcgctccacctccgcgcgcatctcgcccacctccccgcgcatcctcctgcactccgcctccgccgccccgcgccgccgcctctcctcctccagctccacggcgagcacctcgctcaccgcctccgccttccgccgcatccgccgctccacctccagctccaccctcagctccctcacctccacctccaccgccgccgccgccccgccgccaccgcagcgataccactccaccatgtcatcctccacctccacctccatgccgatcataggatgccgagacgaagcgctcgaggaggcgtggcggcgcggcaacaagtagggagggcttgtgatcgacaaagctagtggtagtgcgccatgattggggcgcggagggggaagattcctggggcttgtctccgccaccgccaccaccaccaccaccaccactttgatttctcacctacgccatggagctttttggcgaggtcgggatggaatattttagtcggcatgagtggctccagcctccaccgcgtggccggcatggtcgccggctttgtgagctgtaaaagcgacgagctagctagccctaagccctagcccggcggcggccggacgaggagggagatggagatggtcaagtcgtcgatcacatgcgcggatcccgattccgatgccgccatgatggcgggctcatgctccatctctcctgtcctgctattgcaacgccgccatgaatgattcttgaaactttgccaaattgcaatgcattgaacgatcgttaattaggccgtgtttagttgttttggccaaaatttttttttactcacagggacacatatttaagagaaaatcccctatatatccatgaaagttcacctaatctcttctatacccctgaattttgcttaatcccttacatacccctgaattttagtttggatcccttccatatcctttccgctagttgaccgttaaattcttttgaaaaagtccattttgacctttgctataaagaaacataatgaattaatgaagtatattgttggaatgtaaaaatttattggataagactattatatttatgaatatgtgatgcactatattattggtaacaaatttacttttacatatgatataaaaagtaaaagttcttttatgtagcatatgtgttttcatagtaatacaacagatttgtttattactccagaacacatatgataaaaaaaatcttttaataactaataaattaatattaattttttatgtcatatctaaaagtatatttatcgcaaataatatggtgcataactatctcataaacataatagtctcatataacaaatttatatgctccaacaatatactatgttaatttatatgcttctttataccaaagggcaaaatggactttttcataagaatttaacggtcaactaacggaaagggcatggaagggatacaaactaaaattcaggggtatgtaaggaattgagcaaaattcacaggtacagaagggattaggtgaactttcaatgatacacaggggattttctccatatttaaaggattaaacttagactaataacaaaacatattccgcatgtaaactgcgagatgaatctattaatcctaattaatccgtcattatcaaatgtttattatatcatcacattgttaaataatggtgtaattagactcaaaagattcgtctcgtaatttatagtcggactgtgcaattggtttttttcgtccacatttgatgctccatatatgtgtctaaatatttaatgtgacggaaaagttagaaattcgaagaaaaaaagttggaatctaaacatgacctaattaattaattcggaattgattttctgctgcaattgtgcaggcaattactccatgaattgatttttgtgtgttgctgctcgatggatggatcgatctgttctttcgtgcgtggatcgatgtgatttgtcaggattgcgtggtacgcgaggtcgtagtaaatggctttcactgacgctttcgtaacgggcactggatgaatcgccatgaatcagcaacatccgtgatctgatgccaatcaatgctgctgcctgtacgagttgctggcttgctgcagtgcagtgaaatgcaaaacccggtggactttttgacaggccaaactgggccggaagaaaggcccattataatgagctacggatttgggccatttggtccggcccattaatactaggcctgtatagatacatacactgcccatcaatactttcgttggagcgtgttttattttgggccttttatatcatttttggttgtggttccaaaacttgaaattaaagagggcagcgaccgccgaaccaatgctttcatggcgccgccggtgccagcgaggcctccgccgcttccctcgtcggcgacgaccggcctcgtgcactcgttggtacgtcaccgcttgctctctcgatcatacttgcatactggtccatggcacgcatggcgcgtcgctttctatctctacctagagatactggtacttggatcctatatttataatttcaccgcattatgtttgttgtaaaccaatgcgcctattagtggatcatcggatccgttccccgtcccttgtacagcagtagagacatgagaagatgtagaacacttgtggcgcttttctttatcattaagaacattacagaagtagacaatgtacacatgtgtgggatgaagtcctctattcatcatagatctaatctcaaatacaagcccgtcatagatgtctcatactgcccctctatatacaagggtcttaggagggatatattttatctctactccgatttggattggtcaaaaaaaacttatctcctagaaatttgtttcacaatagtgttcactttcttgtatttggatcctacttagttccacactgcatgccatacctcgaggcaggcgggtttctttaacaatgcagaacactgatatcctttttatatatttcgataagatgttgtatggaaatcatatgcatagatttgcctaaaaatttactattatggactcatgatattatgaatttctttcttttttctaatgttttgcaaccagaattagcaatcaaagcctcattttgaagaccttattgctcacagaaatgatcgagtgagcatgcatcatcattggttttgtcatgcacatggccatagcccataggcgtagagcccatcacaagccacaccacatcattagctctgttccatatagaacatcatcatacaatgcatgaccagagtaaaaaaaaaggaaaaaaaaaactgtgatcttgcctgccactatcatgtctcttccaagttcttatcctctctcgtgtaacaatagaagcacccacttataggtgccatggtattgtctggtccaaaacacccaattaacacctacacttgcaaaaggttcagctacatacaaaaccagacacacttctttatcaccagattctctatccagcatgagagtgtgttttttggacccttgccctagcccacaaatcatctcacaacttgggcatgaaacagcagtggggacccaaccagagttcacaaaattgatcggttttcatgaaatcgtcagcggtcattttgtggaaaccgatcggttttagttgtttttttctagcattaactgaaagtcatcggtttttttatcagttttcgtaaaccaagtttttttatcggttttttcataaaccagtgaggagcagtttttgtttgcaaaaaagaaaaggtggcacatgttgataccatatgccccaagaattctctccatgcttccagccatcaaatcaagcaatgtggtactagtatcatgcatatgccatggagatgaatgccacaaccactttttcatgccctttcacaagaaagaaagggaggagagtagttgccctttgcaaaccaacagccttgtcatgcatgatgcagctgtgtccaacaaccagcataggtccaaattgccagccttgctgctattcatctcccagccagccaagccaccatgttgttgaagaggggggcaactagttatcactgatcagatattcagatatattcagatatgccatgcaatgcaagctatggcagacaagaggggcatgcatgagtagtgacacagcatttgactaatcccttcgcggctaagttacagcaactttaaaaggcaggtcctttttacagttgttgcagacttgctggcttgatgcaggtaggaaaggaagaacagacgaaactttagaacgaaatgcatgtgcaaaagcagatatgattatgtgtcgtttcagacaaacaacaaaaagaggctgtggtgagttgtgagcatcagagcattggccaaaactccagaagtctacaatgacgttgctagatcatgttttagttaatcttggacaatgcagcacgacattaattacatgggggccaaaatgggacatcaaagattcaagacgaatgtcctccatccagacagtcagacagcacaaagatgcagggacagctccaagtctccaaccactggaaacatagctaattcagttcagaattctgacatttttttcccagaagaacaaatggttagttactatcttccatgggagaagtgcaagcataactcgccgttagatttgctaggtgaagtgaccacagcatctgtacaatgtaatcttcccttgcacttcacaggacaagcaaaagaacatcaacaatcctgagtaaaatcatttatctacaaccaaaatgaccaactcccaacaaggcaaaacatcaagggagccttctcccccatattctcatcactaattttagctatatatattgcattttccctatataaattactgaaccacccaaaaagacttaacgaacggtttcttggaaagtctggcagcgcaagcttctaccgcaccgatccagctcgcctgcagacaacgtcaagggcttcaacaactgttcctgagaaaccagctatggcttggaacattcctggcaggcctgtttggatgttgttcagtgtcattgatctagttacctccactgccttagcatgccttgtcatttcgtcctccaccttccgccgacattgggcaatctcggttttcttctctgcaagaggatcgcgggcatcgaacgaatggctttcaatgccatcgcgcccactgccaggaaggccaaggccaaccattgaataggattggtagtacttcttctcaatggctcgaagtgagttggtcttcttttccagctcctttgaatatgtctctgtccgcttttttattttcatctcctctgcctgcttagtgtagatgacatggacaacattcacgaagctcttgatagcctccgaagccgaagcatctggaagccggtccagtgcttgcttccactcatcacagaaggtggtgagttcacgagagatcagcgaggtgtaagcctcttgtgggatattactgtccacttggaagagtgtgagcttcagccagccatagagggcacgtatataatcacgttgatacttgatgagacggttgaagtttgagtgccatgctgagacagcagcctcaagatcacgggtggcaagccggtgaagatcagatgttgactcagccatggaattgtctaccagaccacggacttgctgaacaatttcattctggatctcatggaaatggttcattgatctccacatgctcaacagcctgcatatcaatattcagatacaatttaaatacttgcacacaatgtcgcaaaatctggtatcatagatgtcagaacagggaacaagtcttacgcgaagcaaagctcgacaagctgtggtgcaagctcattgtcacgcaccctgacaatggctgaggatgtggtagttgcggcctgtgaagtcacgatgatcaacgattgcagcttgtttatggaggccttggtcttatccagcttggtactatccctccctctgtactccaggctctgcagagtagaaagcttcttctcgtgctcaatcttaacgctctctctagcctgaagcagtaaaaagttaatacatatgggaatagtttcaataaagtttcataaactgcttagagaatagaagcatttagtagacaccggacagtaagaatccattatgttctagattgcagaaataaaaagaacattggttagtctcactcaattatcgaatagatatggtataagtctcatgcctaccaagggtaatgcccctaaaggcctaaacatctctggactctggtgctttagacatagatacgctaaatctacctttggcattatgaggtatatttatgtgcagtaaagacaatttcttgaggatctaaaccttcacccacaaagccacaaagaatctcaaaggacaggagtagtttagatataaaaagagcataaaggaagggtatatgaaggtgtggttgagagatcaatggccatgtattgtgcctgcttcctttactgaaagtagtgaaaaattatcaaccaaatgctacagctgtttcagaatccagggtaggcaagtgcaggacctctgtaaagacgctttatgcaatagaatcagattcttctaccacatttgctgaacaaaaggcgggctgctcaaaacaccaatttcaaatgaggtgaagcttcacctaatcgattagaagctacaccagaagtgttaaagttagcctcaattcatccttgattatttgactgctaggtaggcctatgctgcaatgccaagtgcaacagttcatgcattctattctagcatccaacaagggtggctactagaagattacacctcattaaacttgcattgctgctaaagttgtgcagtgacctaaattatcggttagtccactactatgctctagcaaatatatatagctggataattttcaagtggagccaagtgaatagtttgaagatgcttcaccgacaacgaatgattgaggcgtgcaacaaaaaatgtcacagcaaacaaacacctcaattttagtggtgtgctcatctattaagtataaccactaaccagcagtcaagaatggcattgtaatcaagcgtcgatgagcagaattaccttgacctcctgatagagctttttctcccaggccaaaagacgctccagtgtcgacccatggctcttcccttccattgactccatctctaacgcattggtgtccaacttgtagcgaacagccaatggtggctttgaagtccatgtcgacgacagcgacgatagcaagctgttcgagtggtacaccgtctctgcaaaagaagaagtcaaattaagtgaaattgttaagcaattgcttgcgttttttcactaaaaatgtacattgccacaccaattcaaaccacattatagtttttgttcaagcataatatgtctgctatgaatctctgattacttttgagctgccggaagttgcggtccagctgcgcgcggctagcctccaggagctccgagacgccattgccggcctcggccgccttgacaaagtactcctcgatggcggccacgatctccgccagcgtgcggtggcggatcaccatccgcatctcggcggccgccgtgaccgtggaggaggagtccccggcctccgacctctcgtccctcctcctcagcggcagtggcagcggcgcggcggcgtactccgacggcgccgtgccgccgtactccgatctggccgcgaagccgcactccgatctgttccccatttccccctcctccgatctggtctccgaggtggtcgtcgacgcgtagtggtcgtcgtcgtcctcccatccgccgcaatgcatctcctcctccctctcgtcgtcgtcgtcgtcgacctcgtcctcttccttgaggtggtgggggtggaggtagccccgggccttctcctcctcctcgagctcgcggaggcggttggcctcctcgaggtcggccttgcggcggtcgaagaactcggagtccggcggcgacggcgggtagaagttctcccagtcccacgccgacgacgacgacggcgtccccaccaccggcttccggaacgacgaccgcgccgggctggcgacgctggagtcggacaggatgtgcggcaccttgaggcgacgcggcccgccgcggggagccctcaccgccacgggaggaggcggctgatgcgactgcgtgggcggtggcgccggcggcgcctgctggtgcttggggagcagcggcgtcggtggcgggagcgaggacgaccccgtggatgacgtcgacggcggcgtcggcgtcggcgccagcgcgggcgcgaccgtggtgaggagcaccggcgcggtgtggtgcgacacggcgagcgacgggtggccctgcgcgaagcgggagagcgcggcggcggtgaggcggagggagcggaggtagtcggcgtgcgccgacgccagctgctgccgcgacgccaccgcctccttcatgtgccgccgccgctccttgcaccgccgcaccgtgtcctcctgctccaccttcgacgccgtgcaccccatcgccccccacccgcgacgcgagcgcgcgcgcgcgcttcccctcctctccgattcgatctaacgccctctccgattcgccgtcgtctccctcctcgctgcggcgagagagagagagaggagttggctgctctactcgagtgggaggagtgagctgcagctgctgcttcgctttgctttgctctctattctcgcttcagttgtgtgtggtttttggttttattttttttttctcgccctttcgctttcgtgtttcctggcccggtagccgtgtggggggtgggggccatggcgagtaattttgatttttttttttgaaggttgtgactacacagtttgaggtaaactggtttttgaagcctttttgtttttttgggaggttcttgaagcttttttttagctaaaaaaggtttttgaagcctttttagctgcttcgctcaccatgaaacaccacaaatgtgcgatcataactgttttttttctctatcaaacttatgacacaacatgttttccctttttgcttttaaaaggatatcttatataatagacatatcacagggaaggttttattggtgcttttcagcttgtcaaacattgcgttgtaagaggctttctgtttaacccgttatgtatgttaggcattgttttttccaacttatttactggaatattaaaactgattattttgcttcgtgattaaaaggaacatgttttcttaagaaaaagcattttctactgtttagataacttgttttggttatttgttaagtattatctaaaaaaagttatttgttaagtttatttcataaaatatgcatttacatttataatcaagtggatgtttgcaataataatctgcttaataatctaaatcaaacatgtgatttttttctgaagttttctaccaagtttcctctaagcaatcccaacagttattatcagatctagtggctctgacgaacggagaggaaccaacggtacatacttgctcatcagaattggtccaacccaatacagtgaacaataatgaaggactactacgttgcacactgtcagaacacaacatcgtcagagaaaaaggctcaacttggagaaagatgagtccaaaagacaccctctgctctaaccaccatcacaaacgtgatttaaccggtaaagaaaagatcaaatgagtaaattaacagagagatcaaagtgatcaacttacttaattaccggcatctaatgatacccctgccattgctaatctcctccatttgattactgccattagtacacccggtgttttttctcgcctacttttatgcagttgcaggtaggattattccaggaaaacgccgtgcttaacgtgttaacgacggtggcttcttctgaagaagaaggctgagcaagtgcagtgcagtgcagtactctgcagtggccacacttcgaagcacgatcttggtcggttcccttctttaatcgccgtgtcggcgcctttcactgtttattaacgcacgatgccgttaacttttcatataacacaaccattcattttatttaaaaatttaataaaaaaagtgtaaaataatatgttgatgttgtagttcctttgatgataaaataaatcacagcaaaataaataatatctactttttaataaaataaatgatcaaacataacgttaaatgttaacggtgccataatacattatgaaaagagagggagtattagttagcaccagtgaaaaactgtaacttagctagcctttgctaattacgatgggccgtgcagtataatccgtgtgtttcaagtcaacattggcttaggtgagtcctaattacttaattagggatccaagtatattattaactgaccatgtaggactatgcggcatccctgtccctgtggaccaccactatagagcatcttcatttgccagagcacaaatagcattctttttttttaaatcactccgtaatttgttaaagaacaaataatggaagtgtggaaaagagcagggaatgggatgaatacaaaaggcacaaattagttatgtttcaatttgcacttaaaatataagttccatcgacgaacgtgtgaaacttccaattccaaacgccgagagtgcgccggacaccccacgtgtgggcgtagaaatggtgctcccctgcacttgctgctcctcaatggctatttcacattcttttttttttccaagttggttgtttggtttacattctcttggatatgtgcctcaaaaatacctcaagatttatgcaaatataaaaaaggtttttttatacaattgggctgcagctgtgcaacaaccacagctacaacattgagcaaaattgtaaagctttagttgcgtagccagctatagtcacaactcagctaatactgaaagggtccaaacatagaagagttagtgatgtgcacataaatctcaagatacattcaaaaaacgctcatgctatgtgaagatcacgtatatgtgatattctctttccacctcacttccgtcttttacgatttgagttggtgacgtgcacataaatctcaagatacattccaacgacgctagtgctatgtgaaaggccacgtatatgtgatattctctttccacctcatttccgtcttttgcatattgcaaactctatcaatagcatccttggagcctcgtatgcacatctctactcttattttttttagaagcctcccacatctctactctatagcataagctttatctatccttcaagatgagtttgttttcgatcacaacctttttagcttgcatgtacgtgtcaccttatgtgtgtcgatccatctatctagccagcaagatctctgcttttatgcctttgacatgttataaagtggtgacgatatatagtaagcagtccaagaaaccatatataaaagtatgcactttgcatttgtagttttgtatgtgtagtgggcagaagagacggaatcacggaagctgcgccggtggtttcaggctttcagcctacctgcattgcccctgtactgtaacaccagaaagtgctttgtgctggagagattctgggttgcaaaagttcagaatagaaataagaaatctgatttggcgatttatattcttgcgagattctttgggctggattggaagagtataggctggcattttgggccgtcttggttagattcatggtagtctgatgctgaagcttcatgtcatctatttgggccgaatgatactgagttcttttggtaggcctggcaattttattcagaaaaaaaaaagagacatactttttttttttgggggggggggggggacgttcattctggctcccaagatcggatctaatttgtatccctcgaccgtaaagctggatagaacgaattcttcaactgttaaaataataaacagtacaaaattactcctaggacattgaaggtggtcctcgacattcgtgtcatctatttgggctgaataatactgatggaaccatcgtttcacggaacggcatatttgtaaacgaaaaataatttgtaaataaaacttttatatgcgtgttcttagcaatttaaaagcaatggcggaaaaataaagttcgataaaaaaaatctcaaaattagctccaaatttaatattgaaaatttaaattttggctgataagcataagcataagcgaaaagatgaggccctgagttcttttggttggcctggcccttgctatattttacaactgctgcaattttatttagaaaataaaaaaaaggccttatgcatttcatgttcattttatcagccttgcccatttcagcccaccctaaggaggagggagagagggagaacagatcagtgcgtcagatgatatctgtcatcctgaaaatcgaagttttccggtgtgcgtgtgtgttcataattcaaatgaacatgttcagggtagtatcgtacttgggatcttcttgaaataaaacggatgtctattcaatcgaaattgagaatagaataatcatctttattaagattccatgttcaacatctgaacggggatcttctcatcctgagccatgtctcagtcggctggcgtgcctatgagggaggcaaattcgtttcctttattttactgatttaattgtatatcaccgcaaggaaattcaccgtaactgttagaatcttgcatcatttataaatctacgggctgttcagcacaagtgttgtttgccaaactttggaagcttattaatatgctgaagcaaacgccagaatattttgccaatcattatgacaagttgtttgcagtgagattgtgagggtaaaagtcttccgaacaaaacaaaataaggaccatggatgatatgcccgacacgtacaagcaaagcatgcgtctaaaattggagtacacatatatagtcgaggtcctgacgtgctttgaatggcgcgactaggaggacccttgattctcgttgcgtacgtcttgaaaatattggaagcttcacagcatcgccaagcagtacacgacctttccatgaagcacctgtacagtctttgttctgcgttccaggataccttgtgataccagtacctcacgacaacaaatcattttcgatcgttagatctaacaatacacgttatgtttagatctaacgatccgcgaaacgatttggtaccatgagataccgttacctcgagttatttttgttagatcggagcaaatctcatcgtttacacattaacttattaaaacgctgctaaaatttaaaatgtaaattttaattttgaagttggttttgatgttttttaagccgttacggcttattacaaatcatgggtaaccgatggggtcctatgtagtagtgtcaaaacccttttaaatatagttcatttctatggagttgtgataaacagaaaaagaaaaacctgcttgtcagtatcacttcttgcatatccttgttcccaactacacgcacctatctagtactagatacctccacataaaaaagaaaaaaagtaactcttttctagtttgaaagaaatgcacacttactataccattttcataagagaaaaacatgcgagagctagcaaaattaacaagatgtagtaaaattctctggttaaacaagcaacaaactaattaatgttgcgttgttcgacagaaatttaggagtaaactctacttcaaataacattttattatcgatgtttcgtttatcaccttttaaccaatattttcattttaaattgtgtatttttacattggtgacacttcggaccatcgttaactattttatccatctacatacaacttgtcgtatgcaaaacacataatcttacatatggatgtgagatttcattgaagagtacgaatcaacgtactcgaaattgttcatatgattgagaagagagtcgaggtgatctaaatggaaataaggtaaaagtacttggtataaaatgttacatcgataataagatgtgacccaaagagaaatttactccaattttaatatccctgatgctattgcacttgattagcttgcgattttcgtaactgtggggttaagaattttttagcttgtctctgttaatcaaccaatcacctcatggtttcttccaaaaatctcagtcacatatttatccgttggatcaatccaatgccatatacctttgtttcttcaacctctcctgacggtgctttccaaccaagaactcaccacggccatgaacgttcaaatcatgctttgatttctgtcgccgacgacgagcttccaccgccatgcgtgctattcttccccggcgacggtagacggctagacgcagtcgaaccaattaaactacgatcggatttaacgactgacaacttttgtatttgacctatctcgtttaatttattgatgctctattcatatattaagcaaacctcttcatattcttagataggagtagatagatagacttaacgactgcacaaaatacaggggcaaaaacaaaagaatcgactcgatcagggtaatcttgctatgaaattttcaacaccactgtaagctagaatctaagattgcttatctagctagtcggtacttttacttactagtcagtttgacttcaaagatgcaagaatttattaagcacataaattgcttaacacaataaacgtaacgcaacaggacaagctatatagattaattagttaattaattaattgagctagcgtcaggcaggtgagcaaatgagaccagcagctttggttgattgattctttgaccaccctggcgtagcaatttgattcttgccatttccagccagccactctcacagtgtcatctccgacttgtccatagactgcaaaagaacacatactcctactacatatgcatgatgctagcctgtatgactttggaccggctagcctgactaatttgtatattgctgttgagcgttaactcgatactgtacatgtcgttagctgaccggtaaagaatcaccaagttaattaattaaatatagctagctagtagtgttactgatacaaatttaagtgactctttttaaagtaattgtttgttaatatttgaagactagttgcgtataactctagctggctggtatatatgtacttagggtgtgttcgctactccagtttcctaaagtgcacagtaaacacgaaaaacgaagcggtccattagcacgtgattaattaagtatttgctatttttttaaaaaaatggattaatttgatttttgtaagcaactttcgtatagaaacttttttaaaaaaacgcaccgtttagtagtttgaaaagagtgcgtgcggaaaacgagggagatgggttgggaaaaagggtttgcaaacacacccttaattactagtgaagaatgtttgcaagaacaaaatttaaagcaactttgaattgtaatccaaataatatttgaatttttaaagtttgacttttaagaacaagtttaggtagattcttcttcttctcttgttaggaaaaacacacatgcatgtacactaaaggagagttggaagttatgaagaaaaacataattttatcctaaaatcaaactaaaaaaattaaactaagctttgattatgcgtggaagttagggagtcaagtctacactctatatagactcggattgaacggcaccgtggactcctattgtctatactcaccgccgtgcaccgttgtactccctccattttttaatagatgacaccgttgactttttctcacatgtttgatcattcgtcttattcaaaaaatttatacaaatgtataagctataaatcacacttaaaatactataagtgataaaacaactcgtaacaaaataaactataattacgtaaattttttgaataagacgaatagtcaaacatgtgagaaaaagtcaacggtattatctattaaaaaacaaaggttatatatatatatatatatatacactctatatgcaagatgaagattcctggaaacgttctaattaaccaaggtagtagctaatcacgggttaattagagacatcgtcagttatagctaggttacaaacccatggatgacgcatatatagtcgtctttttgttttgactgtccatgtatccaactgtaaatgcaatgggatgtttacgttggaccattggaagtttggaacaaagccctgcatgcctatgtgactattgctgagttcgttaggcccgtagaacacgtgcgggaagcgtgctgtctcatctgaacgggtgcaaattaaaatggattattattcactggattgtctatttaattatagggacgaataaatattttgatggataagcttaaaaagatacgtactcgtgatctaaataattcatcagaaaaaaaaaattctatttcaagacagtgtgaaataaatatactccctccgtttcaaaatgtttgacactgttgactttttagtatgtgtttgaccattcgtcttatttaaaaaatt

SEQ ID NO: 5968 - DNA, 55334 bp, Oryza sativa
tcgtattattgcatgattaattaagtattaacttttttttttgaaaaatagattaatatgtttttttaaaacaactttcatatagaaagtttttgcatgaatcacaccatttagcagtttgaaaaacgtgcgcgcggaaaacgagagaggtgggttgggaaaatgggggaaggacacagcctagtgttttaactaactcagaattcttattggcttgtatggctgtacattggtatctaatgtgcaatagaaggttgagtcccaatatattcattaacgtgcatggttatcctgcatgggctattcattagtacaggttcttgtggactgcaaatctgtctgtaacaagatacaacttacagctgtaaaaataccactgtaccagttaattaactactcaatatatgtaaccattaactgtgaagcccattttgacctttccaccttgtttcaggataaaactgagctattttgatttacatgcatgaacaaaccttttagttagtttaacccatcttcttaattctccaggatatgacagattatttgaagggttgcaagtttcttccaaagcttaacaatgagataccaagtgaaagaaatgctacgtataaacaaagattcagcagcctggaaaatctagtattgattatggtaagatgaacacgtaattgttgctatttgacatactctgggttgggtacttgtatgtggtgtagatggaatatgctgtgtgcagtccttgttaactttatatatatagcattatgcattcaaacgatcatatcgaacaagataatgaattaaaagttgttctacacaaaaacaaaagaaaacaaatagaacatctatttattttttgaaggcacaatacatctatttatgatcgcgatgtgtaaaacaatatgcttttagtaagctacataaaccttttagttcattaagtcacacatgcattttgtctcgtgttttgtataaatgttgttgatttatataatcttactgaactcaaatgccatttatgcatgcccaaagcaaatggatttaagttgcaacacattcagcttagtttttgtatctcaaatagctgatttttaagataaaggattacaagaaacatgaaaccatactggaccaatccatctgctgatacccttttgaactgctaaacagtttgaggacgacgcagtgttaataccccgggaaacggcatggttcgggtactatcccgatggcgccttcagtccagtgcagccacctcaaaaggtatatgtatatcttgagttgttgtacagaagacatagcatgctttttgttttaaactactgttatttaggggtgtgtattaagtaaggccatttttgtgtgatagacaaagttgtacacggaggactggatcggcttgaaggctttggaggaggctgggcgtgttaagttcgtatcagtgccaggaggtcacctgagcatctccagaagtgacacgaagaagtacatagtgccatacttgaaaccggacggatcatccaggttcggcattcgtcgcatcttgtcggattgattcacgagaagaaggcgttccgagtgaccagttctaacgtcacatggacatggattgtatgtaagctctgaattgtggacttaattgttgatgccatgtaaataccttggtaaaggtaatggggtaatggaatacgtcgtgtactgtagggcaggtggttagcgtacctgaactgcagaactggcgatgctagaattgtgctgcctattagcaaaacgcaattgtgggcttttatgtagcagacctcactaggaaaaagtccaattcgacaatctcgtatatagttcggatttaattcaacaacagaaacagctataatgattcctccagttaggcttcctccaatggtgccttgtaagctatctcataacatgtccacatcatcatgtatcctatgtggaggaaagagaaggcaaaaaatcaatccatctatctcctattcccacgcctatctcgctcagttaccgatgccgtatgagcctgtgcaagagatagcagtcgactcttccacaccaaaatcagatctcgtgctcccttcccccaaatcgccccgccgcacctcccgcccacccccgcacgctgcaccccgttcccgcacgatcccgcgcgctgcaattcgctcccccaccccctggcgcgccaatttgctctcccccgcgcaaatcctccagccacccgcgcgccaatccttcccttgcaccctccctcctcttttcttctccagtgtgtgaaatcttcctcggcggcgtcgacgtatccgtttccacgagcacaacgacgaatccactcctcttgccaatgacgacgagctgtagagcaggatgagctgccggtccaaacgacaagtagctccgcggccgccgccaccgtcgtcgtcgccgccgccgccgccgccgtcgggatctacgactgcctctgggtgcttcgatgctgcctcgtctgccttctttcaggccagtactgcaatggctcctcctctaggaggccaaccaggtactgtaccgtacactcaaacctgatggggattgcagtggctctgccttgcttgcttcctggatgttagagtagaacaataagctgatgatgctctcaacgatgtgcagggttgtggaacggatctttgccacacaccaactcctttgaccctgcatcctcagattggtaagaaaccaatttgcttgtgtgttgtttctgcaagaaacaagcaaattcctttttgttgagactatttagattgtagaattaataatgttttagcacagataggaaatgtgttgtttcttcctcgctcatagtcatgattttggctcctgatatttcagtggtatggatatacatccacctggtggtttcctaagcatgttacaaagtggtcaacagccattagtcccacctcatgttttgttcccagcaacatggccacctatgccacctatggcaccaacaactaattcaggcactatcatcaacttagatgatggtgacgatgttaggactgctaagcgtcttacatgggcatcagatgaggacttgcggttggtgagtaaaattttagacaacttgcagggatttgtaccatcattctgaaactttactaacacataatgctaaatgtaggtgagtgcatggctgtaccactctaatgatccgatcaatggaaatggcaagaagaatgagagctactagggagatgtagttgaattatacaacagcactacacctattaaccggaaaagggaagtaaagcatctcaaagatcgatggcaaaggattaagagatgggtgggatttttctgcgcctcctggaagaaggctgcattagtttatactagtggatattcagatgatcagttgagagactttgctaatcagttttatgtggatgactatcctaacgaaggtccattcacagttttgcactgttggaaggttcttcgtgatgaacccaagtggcatgctgttttggaggagcttgaaaagccacacaagcggagcttggatgatggaagtgacacactatcacaaaaagatatcggagaaaaggagcgcccaatggggaggaatgaagctaagaaacaacgcaatggcaaaggcaaaggcaaaggcaaggatgatgatgacagtttacatgaagatatgaagaagtacatggatgttcaagctgcagctagcaaacgacatgaagagtttttagggactcagcaccgtatttcagatgcaaaagttgaagtagcaaggcttaggagagaggctgtcttgacggaatcatatcaaaaattgatgagcatggacactagtcaaatgactgatgagataagctgagcacgtgatgggtctcaagatgttgagggagaaactgcttggtgatataatctaaggtattttctgtcaatcaccatgcactttattgttagtcaatgttcaacaaatgaccatgtattgtaatatgtattcttagtcaatgtaccacaaataaccatgcattgtaatctgtattattagtcaatgtaccacaaataaccataaattataatctgtattcttagtcaatgtaccacaaattaatctgtaccatgtgactatatattgctctgttatattcagtctagcaaaacaatccagcactgtcctcctctgttccttctatccagtactattcttcctattctattctgcctcatttgttccttccatccagtccaacacttcctcatctgttccttccatccagtaaaacatgtcggatgagtttgacaattccatagacccagccgagatttacactacagatatgttcatggcagagcatagtgtccttaactcttttgccgggcggatcgacagaaggattaaggccagactagaaggaggtacatctaggcgtacaagtggtccaaggaagtacatcaataggaaccatgaaggagcccatgatcaactatttgctgattattttgctgaagatcctctctactctgctgcaacattccgtagaaggttccggatgagaaggcatgtgttcctacacattgtggatgaactaggcaagtggtcttcctattttacacatagagtagattgtactggatgccttgggcactcaccattgcagaagtgcactgcagcgatccgtatgcttgcatatgggactgctgctgacactcttgatgagtacttgaaggttccccagagtactgctctagagtgcttagaaaattttgtggaaggtgtcgtcgaggtatttagtagtaggtacctgcgtcgtcccacggctgaggatctcgagcgtttgctccaagttggagagtctcgtggattccctgggatgttgggaagcattgactgcatgcactggcgatggaaaaattgcccaaccgcatggaagggacaatatacccgaggtgaccaaaagtatccaactattatccttgaggctgtagcttcatatgaccttcatatttggcatgcattctttggtattcctgggtccaacaatgacattaatgtgctcaatcagtcccctctgtttattgaagcaataaaaggtgaagctccccaaatccaatttattgtcaatgggacacaatacaacacgggatattatcttgctgatggaatttatccggaatgggcagcctttgtaaagtctataagatctcctcaactagagaagcacaagctgtttgcaagggaacaagaagggaaacggaaagatattgagcgtgcttttggggtgttgcaagctcgcttcaacatcgtgcatcgtccagcacgatcatggagccaaaaagttcttcgaaaaatcatgcaagcttgtgtaattctccacaacatgatagtggaagacgagggagaaatggcagaagatcctattgacttgaatgctgccccaggaacatcaattgttcttccaccagaagttcatgcagggagtaatgatcacccaagcttcagcgatgtgcggcgaagaaatgcttctatccgagccaaaccaatccatagccagcttaaaaatgacttaattgagcatatttggcaacggtttcaaactaggcaaaataattcagtataatgtaagctctagtgtacaatttcattgtaattttatcttagactgactgtatttatcactttcacttactgtacatgtttttctctctaccaggggcgaacagattcgatgtcttttacttgtttttgtggctgcggtccagcttttggtgatcttgttcaaggaatgggataagcacttctggttgctgtccagcttttggtggttgtcgaactcttctatcacttctgtgacgtgatgcagtcttttttttcccttcagtttgctcttttccgcattgtactaaagtgccatgatatggctatgatgttatctagttactgttgtggaccgtgagttggaagaattgcacttcattgttatatactctaagtcgacgttgtgctatttatctatattcacactatgctgagatgttcatttttaatcgacagatcttttgaatagcatcacatgaaggaccatagagatattgtgtagtttatcaccatgtcatttactacccatgctgccataaaagcaagaagagataaccttagagagttcattagagaaactatctcttgttctatctcttagatgtgtacgatttatgagctagcagttgtctcaacctttgaaggaggccttactaaaataagtgcagtgcagaatgactcagtagtcaggatggtatgtgacgccgacgtagcaactagtcataatttttttataaaataaagtaaggctcccatgtcatcctccccctctcttcctcatcccttgctgctcgtacagtgccaccgtccagccacgccctcctctcatgccggcactgctgtttctgcctcctccgttgtccttgttgccgtcaccgtccattgcgaagaacgccagctttggtgtgtgccccgttgatgtgcatgcatgtgtggttctcagagtacgacaaaccgagtacgcgtgctaggccgagatggcgacgatggagccgaagaggatcccgacgaacgatgcatggagaacccccccccccaccccttccggagggggggggtgggggttcctgtcaatcgtcgacgcatgtacgtactccatgccgaggccggggaatgcagaagagatcgtaggtgtcgagtgaagaaccccatgccgaagaagaagacgatgttgggtttgatggcaccacagactgtcgacgaagggaccgatcaaggtgatgtcaatggaaggtttgcacggcgggaaaaaaacacgccggcagcgatggtgcctgccatctccggcgacgcccaccaccgttgccctctcctcgcacagtatcttgtgtggcgccgctgacgtacggtagagagtagtacaactacctttgttggtaaaaagaactacgaggcatgcatgttcccgtgcgtccgcgcttctcaaactgttaaacggtatatcttttacagcaattttctgtagaaaaattgctttaaaaatcatactaactcatttttcttgctttaaaaatcacacttaattaatcgtgcagctccatttttcttgctggaggtgagggttcccatccctcacccaagtactccactaagcaccagttttcactgtacaccttgcaaattccagaaacataaactttatatagtaatcagtacatttacaaagttacagcgcaggtggagcagcctagtctggcaccaccacacctcattaatcaacaaataaacttactgtataccgcatgaaggtcctgaattcccatcgccggtgacatttcaaagttacttttacacaccaaatgaataaaagaaaattgcacacgccccccacgtcgcaaacaaaaaaggcaagaaaaactactctatgggttcccctcatggagaggcatgaagcgactccccaaccctcccgattgcctcgttcatgtttactcagctcacagctctctttaggtgattctacctacatcccgaaacaaacagcctgcacatgccgagtggtaatgtgacacaagctttgaaagccaaaacattaccttgggccgcaattttgcgatgttttgaacaggctgagaaggctgctgaagaaatgccttgttggaagattagcataagctccactgctgtgctttcatgttgaagtccctgtctgatggtgttccaaatttctgaggacaattcttgcaaagactttggcttcgatagaagcggtcgtggctgctgctgctgcgcgcaagactcgagctgcccctgctttctgcaggagacccgcatggtgcactgcgtgccgacctccagggattgtgaactgcattatgttgggagtattctcattagatctataagtatgttttgctggatggtaaaatcattttgcatcaaatagaagagcagatggaagtcctcttgtgtgaatgtctgagtattttgtgtgcgcacgtgtgtttgagagataaaaacacaaatacatgcaagcatgatattaatcatgaggtatggttcctcttcttagaacagatcaatggtgctcaactttcataatgtcttgtgcatgcggaatagccaaggaatacgttggttctcaatagataggggtcttcagaatattaagatggtacggaaggaaacaaacctgaagaagggcaaaggcagcacaagcgcgaagaattgatgcaggattccggagcatggcaacaaatctagcgatctcggcaccactgaagggaagtaaaggactatattagtactacattcctcttagctacattgctaccaagacaggtccaaaataagatgaacgggacaagcatgaatccggtttaaaatgttccacatgctctgcctaaagaatagccagctaaacttcaggaatagtaaaactttagtgaaagaataaagccaaacctgcatctcaggtgtccagcttcttgtataaacactgcatcagcaatctgagatagtgctgctgaggctgaggaggtggaagccgtagtgaaaacttgtgggtccgaaaatgtcagaacaaaagtctgtatatgcttcaaagccattctcctagctccctcaacattaacactcttggaactgccctctgatgacgtcccaaccaatgcaacctcatccattctgtcatttgagaaaattcagttttagactttgcaaatttcttattaagataatattgcacatcagcaatggcctatgcactacacgttttttgtcaagcaaaacacagtccgattatacaagtaatctgctagccatgctagtatgctgcgaaagataaagccaagtacatcacattgtgatactgtgttagcatctacagttaactgcttttcaagtaagtagtacaaggaaatgggaactatttaatataaaaatataactattaaatacagaaagaatataattcttaatagcaacaacaataaaaataatgctgtcaagtttcaatgcaaaagaaaccaattcaaatactgctgcaaaaaaataaatcttatttgccaaaaaaatgccatgtgcttgcacaatttaatacgacagtaggaaagttagcaggggatgcacaccaacaataggctgatctacaatggtaagttaactttttaattcctcagaagtggtttttaccaatcattgaatacagacgctctctctctctctctctcagagagaatatgtggagcccttaaagtatcaatgtatcactcatggatgttattcttcaataaggagagtaaggagttaaggtaactatagtcagacattactaagaaaacaattaacagaagcaatatatacaaaccaacttaaacggagcttgtaggctcatagctacaaacagaatgtcaaatgagccctaaacttgcaatctaagttgctgctgaaaaataagcaacttggtgattaattgaagtcaccaaactcttttataaaccaatgcatatttttctgtgtgtgtagaataactaatcgtcataataaggctcgaagcactgtgtatattgcattcaagacaaaggtatatcacaaagaacatgaatagatagaattatgaagataacactactggatcaatcggcattctagaataactgtgtgctgttagcctgctggtagagtttaaagtccttatacaaatcaaaattgaatgaaatacaccataattcaaaagcaaacagataaaataatcggtttgaaaaacaacataccttccatcgaacatataagcaagggctagcgcagacatgaaacgtgccatttttgaccctgatgatgagcaaagccgcactagaataggaaccccaccttcttcaacaatacagagagcattaccagaatagaaagcaagattccatagtgcccctgcagctgtctcgtgaacatcctgaataaacagaaagtcgtcatatctagagtaaggaatagcattcattcccaatgacagataaaacatttattcccaacgatagatataacaatctacagtaactgtcaatgccaacgttccttgttttatccataattttatttttttttcaaaaaaaacttacacccgttaccatattaaaaagagagagaaaaactaccctctttatcaaacaatgggctgggctgtgcactctaacaaacaaacagaataaattgacgtgagatcaaagtactatcaaaccattagagaacaaataaattgcatgcctgcagcaggcagcaggacaatattaatactcaaataaatgatgttttccccatcagaatatgttctctcaagcaattggaataatattatataaactggaataacattatataaacagtggcacagccaggattttcctaggcatggttagaaaacaatggcatgaagcaacaaattaagttgaaatggattaaggatgtttaaatctgataagataaatgaatgtttttagtcacttggacatataagttgcatacatgtgcgtatatgttagtaaaagcatatacttgatcttgtgcccaaaataaataaataaataaataaaatcagggtacaaatatatccccatgaatcatcgccactggatataaagttgactaaaaaagtttaatacatatactacattgaactcctgaaaggcatgtacaaaaagaataacacgacgagtggtagcttcataaaaccagaacattaggtaaaagcacaagctgaaggtggcgcactaaccatgaaattacttataatcaagtagctacttcaacaaactcgtctgtttgttcatggacaatactagtcaaacgtatctcaagatatgacagactacggcatggagcaactaatatttccaggtgccaggcagaaggtctatcataaagaaaaaaagtgatttggagtccctaagtaacagaatgtattcgcacatcaatatatgatgtatcagacataaagaatatacaattgtaaatgaaacttacttcaacatctgattgtgccagtgtgagcaaaggtgcgacaccaccctcctgtccaattgccatactgaaaaaggcaaataaaagttgtcaacaagaatgttggagaaaggaataacaagcgatagatggaggaaattatctggtacggaaagacgagagatgcagttctctttattgcagcaagtctgtaaaaaaggccaactagggagagagagagagagagagagagaattgattacaagttgcgacctaaaaggggcgctcctcattcatttacaggcagttatcagacactcgcctcacactgtgcctacacttaccctccagacaaaaatttcatccatcgcttgcacatatgatctggaattcatcagcactaattttccagtagctatattattaacccaaaacagaccacaccctgctactaccatctaacaccagggtcaccaaaaaagtctatggaaataggaggcaatctacaaaaaaaatggttaaagtggatcgtgtgctaagataatgcaattcaaaataagcatgcagtgcaaaccatccaccatctatatccatcaagccatcaagagctttgaagttgagtgcgagattgaagtgttcaagtgtggtcctgaatttagcgcaggcacagctgtcattaaggctgtgttctttccccttctttcccaactcacctcccccttttttcgcgcgcacgcttttcaaactgctaaaaggtgtgtttttcacaaaaagttttctataggaaagttgctttaaaaaatcatattaatccatttttcaagttttttaggctaatacttaattaatcatgcattaatgggcaacactgttttacatgtggggaggtggagttcccaactccacctcctgaactcagcctaagtgtaagtgtgtaactaactttgatatcagcatattttcatcatgtgtgaagctatctgatatgaatgttaggaaatatagaaactcaggaccaatctaggcataccacaatgtgcaatttttaacaattgctgtgcatgacatctaaaagtgaactgtgaacggattcaaatttgacttaggagagtaagtgtttttttaaattattaatacacttttcttgattgacactaagctagctttcactaattccaaaaaaaaaagtgcattactaagtttaagtgtttatggacaatcaacttgtacacttcatcagctaggcatgtcacaaagaatatcttaaaaataggtcaatctggtagttggtgcaagttcagttcatgagcaagcatatgaagttacctgttagcttctgaaacagatagtccccataatgcgccagcagctctctcctgaaggccttccgaagcattcaaacattcttgtgcaagtgaaacctaaaatatgaaagccatctatgtgaaaaatataaacagcttatttaagtctatttatgaaaagatgggaggagcacacacaaatgatctttaaaacattgtgtcctagaaccagttccacgggtaaacatagaagatttattattatttagttgatagtcggtataacacagtactaataaacatattcaagagaatatgttcaatcagaattaatcaaataactagaggtttctacagaccaatatttttattcagaactgctatatgaaaaactttatagagggattgcatctatttactgaactagatgtactgcttaatacaatgttgatcaaaggatgcaaagctgtgttaaagcacaaatggggcacgtaccaaagcttcaacgccacccgcagcagcaatgccttcacggtttctatcatcaaatgacagattccacagagcaccagcagcttcttgtctaattaaatgcacaggaatcacaatattaaattaggataatataaagtataatttaatggcaaaatcaggcgttgcaacttaaaacagcacatcagctagaagtataccttacaccctcattttgagagcttgttagctgcactaatgcctcaagagcccctgcttcctgacccacagcggcattattattgttgttatctccatgtgcggctaagttagctaatgcccttgcagcctacatgaacaacagtgatagtattagaaagtaaatgcagtacatatacagtgattgtgagcatgtaaaagacaaagcactaggtagcaagttagatggagcatttatttgtagagcttaaaacgcagcaaactgctactataagaaaatagcaattttaagtggctccacgacaaatccaattgttttaaagcagatatagattgtgcaagttgagaataaactgtatcttggaattacatgtacatggtaagagtccagtcagcatcccgacaaatcatttgagataagtatggcaggtacagactttcctttcttataggaaattgggaatccacgtggctcatgccatgagattgagcgatctgataaatataaaaaatcatccaagtccatgcatgaaaagttgcacccagtgcttaatcaatgaagtaggcgtgaaccaagagatcctcatttggcaggataaagttcaatatgcaagcataaaataaagatagcatgtgcacaggtcatcccgttttgtctttatcgtgcttcctattttgtagatcttgtaccgttagttgtattatcagagctagcaaaaaaagctatggtataactagctgactagaacgaatgcgtacaagcatgacgacatgatgtacccgctcacctgttctaggacaccctcaagtttacatgatcgagcaagcatgaccaaagcatggacaccaccagcctttgcaacttccatgctacacttgtcatcagcagctaggtttgcaagtgccccagcagcacgttcctaaagaaaaagagcaaccgttataaaaaatttattatccagaaaaggatagcaagcagcattgaaattactgaaaattgagaagtatcaaagatacatacaagaactccatcagtcccagcaggccagcggagtatgagatcgaccaaagcctttataccaccagctgctgcaatggctgcctgaaaaagaataatcaatatattgttagtaccagcaacacatcagacattgcaatcagagtattcagcatccaaggagtgacaaccttgtgctcctcacccacggagagattccaaaggccaccagcagcttcttcagcaacaagccgattcattgacctggccaaattggttagtattgtgatacctccctcgtctgcaactgcctttgcaaccttggcattcaccgataagttggcaatagcctgaagtcacattaacaactgtaagaaaatggtaataccaaacatagtagatatcggcaattagatccagggattcagctaaaatggacatcattacctttgctgcttctgactgtgcactctcccttgaacaccttgcaaggtccagtagcattggaatgcccccaacacgcatcactgcctctgatcttgcagcatccacattcgcgctctcgtcatcaataaccacaaacgtagcaagtgtggtagctgcacgctcctgtacatcctcctgagagctcttcaccaaactcagcagcatatctgcgccctgctgcagccagaagtcatccattccttgcgggttggactccgctatccgtagaagtgtctgcgacaggatccactcgagccagctcatcatatcaccaagtgcattgtctttgcccttccagttacattcattgaacacctcattctccttcacaaccttatcaggaaaaagtgagacgaccgatttgaaaatgtggcttgtaatggtgagtacaagcttgcccttggagttgctaaatgctccaggattgtgtgcctgttcctcctcaacagatttgcagttaagcgtgcatataagcttgagggttttggagtgggagatgagcctagagatggcacttggtgagacatcggtgcgggacacatcaacggcaacaagggagggcagctgagcccaggaggtggatgctgtagcccatttcaggttgtgacatccagcgacggagaggaaccggagggataggatgccggcgatggcggcctcatctacggatccgcagtcgaggaaggcgacgtcttctaggagggggcagtagcgcgcgagcgctccgatggcgtccgcgtcggcatcgcggagacccgagaggcgcaggcggcggaggcgcgagcagcagaaggctacttggcggagggcgtcgctggagatgcgttcgagtgggtcgggcccgatctggaggctctcgagggcctcgtgccgcgccgcgaggacggcgagcgtggcgtccgtgaggccgcggcagccgtcggccaccacctcccggagcccccgcgcgcggaggcccgaggctgccgccgccgcctcgtgcccccgcagccgcagccgccgcaggctcccgcaccgcgacgagagcgacgacgccacctcggcgtcgcaccggtgcgcgcggaggtcgagcgcgctccacaggcacggcgacgcccccaggtccctccacgtcctgcacgcggccgccatgctcgcccggtcgcggtagttcagtcgcccgaacagctgcagcaccgtgtcatccggcagcgtcctccagtccaccacgcagctcccgctcccgccaccgccaccccccctcgccgccaccgccacccccaaacccccccgccgccgactcgacgacgagcagctcaccagctccctctcctcatccgccgccacatccttacccttcccaccgtccttgcacagccggcggcgcacccggcgcgtcatccccacccctcacgccgccgggatcgagtagggttcggtgccactcgagccccaattcgggggagggggatccgattcgcgggcacgcggatgcaggaggaggagggcggtggtggtagctccgattcgcgcgcggcggcggatcgtgcgggggtgggtggatcggctcgctcgctcgcgcgaggcgagctagcttccctgccctttcctcctcctctgcggtgcggtgacggcaaggggagaactggaaggggtgggcaatttatatatagcgtatgcgggtacgcgtatgcgtattccgggctccaaaatacggcgacctgggctacggagtatacggtaatacggtatatatatatagcggtagtagcagtacgcacgtaacgtcaaggcaaggtaaagctggtttatgtacatcctgcagcttttgatcagctcgagagaggagtttttactgtgtttcagaagaatgtaaataaatttgatcagaagagaatcgtacttttggaattggaatccgagtaggaaaggcaacttcactgcattgtagctaaaaaatgggttgggaacttgggatgttcaaaaggattttgacgacttcatgcacaggccatattagcattcaacgctggaaaacggatattacacgttaaatggagtaaagattccacgtttactgacatctacaaaaaaacaatctagccagtttcaaggagcgtagggtgtgtagcaaagatggtttaagaatatcagatgcagcctacaacgacagcgtctctatgtgttttaaagcggaaagaaacatgtgtcttccctcccattgttagagcaaggcatacaaagctcacattcatcttctgagctatcatcagatcgatcagcaacttcagaacaagctgttacccaggtacatctatcgatatgatacaaatgtagatccactgattaaaagctgcacatcccattgttagagcaaggcctgcaagttcattcatcttctgaggtaacatcagattgatcagcctcttcttcctctggcaaaggagagacaattgcggcacagcagaaagaatcacggtccttcaggaggaggcaagttccatctgagttccatttcaagtccacaacccgaaagtttggcaacggaacgttgacgcagcatgcaccagatggtgtccacatgtacaggtgcggactctccgtgcagaaaacaaggcgtgggcaattagggtcccaagcggcagcacggattggatctttctgaacaagaacagcagcaagatcaaggcggcagatatcccatatccaaagagcagttggcatattgtcattccgagtgaagaaatagtgactgtcgctgctccatgacagcatacctgcacatgaattgcaaggtgagattagttcagctacagagaaaaaagaacccttaatagtagaatatgaaatgttaacaatgcagtttatactgaaccatattctactagaaattcatgaatggccaacacaaatcacgcaaggggattttagtacttagaagggttatcgataatgtttatagtaggaaccattatcacagtttacaaaatgaattagagatctactgcacatcagatacagaatgtgtaatagtaactacagtagttcacaagttcatgacactggtcacaagtgtattaggcattaggaaaaagaccaacatcctgatccatatgcatgagaaataggagcaactaaccaattccctgcttggggttgggcttgtctgtaacgggtttctgtgaaggcaaagtgattggagcatccatcacagcatacttaactcgagaacctccctctgtcccattttctgaccacaaaaaaagatcagtctccaaaactaaacataaggttagcgctggccctaacacaaggcatcataaaacatgccaaataatttatcaaaaaaggaggaacaagatgcgatataaaagtatcgttagtaatctcaccagcaccattgccttgcatgttacgggagaatccttcacttaggcataactctgacatgtcaagctgccatggatcatccacttcctgtgacattttgtagttacaatcagataccatgaacagaaaaacactagatctgctaagatgtcaattagtgatagatatcagtaggcttaccttaaatatagcagcattagtaggatttcgaatagatgctgcgtgtgagaactcagcaaaagttttccatgtcaggtggttcaaagtccgaactgcttgatcatagctgccaactgctaaaaactgtccacatggtgaccacgcaacagttttcacacctaatccactttcatatgctaagtacttgaacaggcacctcccatccggtgaatatatcagaacctgtgacaatcatgttcttaggattatcagtttaaatccaaaaactgctaacaacaacataagagtagaacaagagattagtatccgttgagatgaaccctatattttatctaaagcagaaaaaaaaaacatagctctataaaaacagactgggatgaacccttaagagtacaataagaaattagttcagctacagagaaaggagaactattaatagtagaatataaaataagttcagctacacagaaaagagaacccttaagagtagataagagattagtttcgctgcagagagaaatgactcaatgagctcttgaacaggatattggttaagaaataaccctgtatgttttgggggagtcatgacccaatataccaactgattgatcattaaagtccaactaataaccagatccgtcaatgtaatcaaatatcaaccgagaaacttgagtaaaccagaataagcaaaaaaaaattgttataagtgccatttgaagaaaaggtggtgtggtttgccatacatgcaagataaagtaattcacaaccagtgcccatctaaattctgaagtaaataagtgaccctaccaacaaaaagtattaacaagttatatgcatatataatgacatacagtaaatgatgatgattttcaaaagtaagcaaataaaacaacaatgggagtacaatgaagagatgcaccttgtattccagaagtgaatcccagaccacaatagcactatcatctggtgaccactcaacacctgccaagtctaccgtgtcaacagcaaagacactcattatctcccaggaatggcatgacagcaaatttacataatccttgcagtcacgcctagtacagattgcagcgaacttcccgtctttagtaaaagaaacacctctggaggcatgctttggccactgtacatgtatgcatgctgtatttacaagagaccaaacagtcagacggagctgaaactctgatgttgttagtatatgacgactgtcagggctccagcgagcatatgcaatcccagcagggccctcatcaatcttgcaggtccagtcaggctggctcagtgaccaagcctgcaccatgggtcgcttgtaaagtccacatagaatatactctgaatccggtgcccagtccagaaagcttatcttgtccacacatgaaaacaactgcaccacctgcataaattaaagcaaaccatacattgttgtcaattgtattctctagatatgactagcagttcttatataaatctccccagaaacagcatgcactcattagccactatacgataccatttggtattaacatttctttggtccagccatactgccaattactcatgaaccctggctacagatcaggcaaaacaaggaacatttcatattttctgtgaattagaaggctcaaattttagctataccagatgacaataccccctatcacaaattcagcaactactccagaaggcccaaaacttttaagcctgcattccaattcccaagcactaagtgtgtgcacccaatatgatgcccattggatgtcagtacatactaggagatgattgtgaattggtaatctctctcctacacagtttcaacagttattacatagaatatatggccgacagattgtcttattaatacaatatattcctagagttatactgttcacaaatatgcaaaagatttgtggggttatataatagtacaatgtattcaggcatttattgctgtgatatgattaaaggtatgttaaagggtcagtgttcaccaaggcactatcagatagtggatcagtacagtccttgcccgcccagccagatacaaagctagaaatgagggaggggccagcaagaaggccaaaccaagggagcagagagttgagcatccgcagtacaagtagcggcgccaattagccaattacagtgatggggctgaaaaattcaggctgagtggaggcaaaatctggtgcctgaaagatgtacttctcacctcagatctggccaacttaaagtagaacaacagacaacataacctgagaggtggcatgcagacatggtggtggaggatgacgatgccatggctgcacccctacttgctcgctcagtctcagtctcctatgccagaatgtaatgtaatgccgctgctctgtgtgcatgttgtgacgggggtgggggtgggggtggggggggatagcctattttgtcgcttttgagaaaacattaaatgctaggcctaggccttaagcttgcctactcccttgtacgtagtccgtatacgtactagggcaatgccagctaccccaaattgtctattgcctccacctttgccccattatctactttctcataggtacttcctctcctctaaatcattccccttcccttcccactcagcatctccctatcacagggcccgtcgtgcccaccatgcatgtctccataccttcttagatcatcgagaaggatagcaagtctatgatgtcaagctctaccttagacttcctacagccaccctaggcaagctgacctcctagcgcacctattttggcaaaatcgtggtaggagggtgctgcctaaaactagaaatttccatgtcaatcacaccaaataaagaaatattttcactgtttagttggtgagcctatattatacatatctggcttatcgaatatagatatcatatctacagaagtatttgaacaatgagtaggctgatgattttaatcgtaggtattaaaggcacagtacaacatatagtctcattatcactctcctcaaacataaacatgcatatcatggtatctagtccgcacaattgagcaggtaatctagctagcttggtactgatttcgtccatccagtacaaacctaccctgaaccctaggctacggatcgggcaaaactaggcgcaattcctgaaccagaacactcaaaattgagcccagcggtagatggcatttcccccaaccccagattcagcgactactccagaaggcacaaaccctaaacccgcattccagttccggaccactaaaacaggatcaagcgggggaggaaggaggtgaggggggggaatggcgcggataccttgagggagacgacgtcccggacgacgaggcggtagtcgacggcgacggcgaggtagcggccgtcgggggagaagcagcacggccccgtctgcttgtacgcctccgtgaactccatcccttcgccttccccttgtcacgcggcggcgggcgggcgggcccggcgccggatcgggcggcggaagcgagaccggggggctctcgccggcgtcgaggtgggggagaagaatgcaaatctactcgcctgaaatttttttttcccttgctattttggacgccccgtggttggaatttgaaattgtttggagggtagagatgataagtgggaacgtatgtacgcgcgccaccgcctaacgagtgggaacgtttgtctgtgcccgtagagcggagcagcggtaggctcctccaggctccagtgcacccgatcgttgtcgttgatacggtgagaatcgtgtaatcccaccttaaaatttttcagcatgtcatatcgaatgtttgaacatctatataaagtagtattaaatataaacgctaaaaaataactaattacacatagtgcgactaatttgcgagatgaatttttaagactaatggctccatgatttgacaatattgtgctatagtaaacgtttgctaatgacggattaattaggcttaataaatttctctcgcagtttactaaacggcttgtttggtaactcgagggaaggggattgggagtttacacgagggaattgatgatgagattaagataggaatttgatttttaatcccaatatcttgtttggtaaaggtgatggaaattaatagggagtttaggagattaggtcattaataaaaaaaggatggctgagattcgtttaaacaacgtaaaggaggaattccctcccaattacctgtccctactcaagtattgaaaaggagggagttccttcctcaattctccatccccatcccactaaaattctcatgcctcccatccaaacaaaaacacttaatagcatcatctctctaaactcccaatccctgctaaaaactccctccaaccaaacaggccgtaagggattatgtaattagtttttttattagtgcccgaacaccccatacgacaccctatataatactcgatgtgacacgccaaaactttacacccatgaatctaaacacccccatactcctacatgagttgtaaaaaaaaagattattacttactatacaattttctttcatgtatttatatattttgtaatttgatcaattattcaaatgtttcaaatgactgtgttgtatggtgtgatttttggagaaaaaaatgcaatttacattcttgataaatcattcaaaggttaaaaaataattgaggtgatgtggtttcatgaaataaaaagataattagtattaactatatttagtagatatgaactttataggtatatacgatactttgtttgtcgatgttttttagccttctatccacgattttaaatgtatacagtttattacccctttgtttcataaaagtacatataattttagaccggcaatgttttagtttcatcggtcctgtcttatatcaaacttatatgaatattaaagaaaaagaaaggacaacatattacttaagcatattacgttcaccatgtaaattccattcataataatcaaacaactaaaagatatcaatgatctaatcaaagcaattattagtcaaaacagccaaatacttaaaaaaaagctaattattcttccattggtaagaaaacagtcggaatcagcagcatctcttcagaactaaccggtaattgaccatatttatcatttaaactactcagtatcaacattaatacgataaaaaaattagaaaaaacaaaatttaaaaatagacaaaaacggtacgatcggaaatagtaccccttaaacagaaacgacgtctggtcgatcgagaatttccgtgaccattttcatccctaggtaagtgacataagcatcgacagcgaagtgtctataataactcattgatctcaagatacgtcgacccattatttgaaggaaatcagataaatatatgcgcgtatttataggagttagcgtgcgcgtgtttatataaaaccatgagtcataccatgttatttgaaaaataaattatgaaaagggaggggctatagaggacccatgtagaacgtgacaatgtcagccaaggatatagaaaggctgcatccatcttccagcccaggaacacagtcgcaactcttaatctcaaaagtccaaaaaacacccttgtagtcttcttagccagtggcaataagcccaagacccaacggcgggctgacggctcacaattcccatcctgccgccggcggctaccgcgggcggtgctcgactcgacctcgatggcgagctcgcgggagcggaggcttccgccgccggcgtaccggatggagaaccccttcagcgtgaaggtgctccaggtcttcaccgggcttcggcgtcggctgcggcgtcggcatcggcgtcggccgccccatctacctaggtatagcaaagcttccgaagctaagtgattccgccgtttcctggatagtttgggtctggggattgggatggacatcgatccggtcggccatgagtcggtgggtttcgcatttcgtcgagcggctgagggttgtgattattgcccgcccctggcttgtggccatttcgtcgaacagttcgtgtcgtgtgtcaccgcacatagttccattgcttgaactgtggataagatagtagatgataaaaatgggatgtttgctggtgcataggaatacagtttacttttagttaagtctactagtctgtcgaactgacactggtattgtgcacttcccctcttcacagactacagaccacagttactgccccatactgccatactatagggcatttagggctcgatgattaatttcaatgactttaagtagttggcttctgtcttgatggataggtgtcataccggggcttaatcaagttatgaccgcaacaaggggcgcaacggatgccttttcaggcgtaacaaggcatgttaattccgctgtaagtaaagataatccttgtgtaaccacgaataattaggtgccaatcacgttagtaggatacttttgacttatgttaatctaattatgtattttggacttgtctcgatctaattctgctgtttttcttccttatttttgtgctctagctaaggaagtcagggttaaagaacattgaagcaggcattggctgtggagttggtataggccacggttttggaataggtacatattgcagcttttccatgtagttagtcctctaaattttcttttggtgctgtcctagtaggaactattgtcagtcaaggtcatcttttgtgcttgatatcctcatatcttgagcatatctttcctgtttattacttttgcagtgatcacgccattttttttaacatttgtattatcagaaaccaaaacatgtgttcttgctaggcggtggcaatgtcatgctttattcatagtttcttttttatacagcaatcagattaaatttaggcacctggtgaattggtgatactttgattcttttgtatgttttttattttcattgactgctgcagcagatctatcagttcatctaatctagtccaaaaatgaagtgataattgaggggactcatttaatagaaccacatttcatactttcgcacctagcatactagcacactccctaaataggatccatggaaatatctataatatctgcaacgcttccaggtcattgtttttgttagtagaaatcatcagctgccaagcctctgctattttactcttatttatattctatatcaaatgctacacatctgttaaatatttttcttgcataagcatgcaaacttgtttgatctgaagctgaaccattaagtatctcaatactcaggaattgcattgaagccacaagtaattcatggaattcagtcaaccgttggagtacaaacctaaactttgatcacctgaatttttctttgtttccctttttggtgtatgaattctaagggaactttttctctaggaacttatgtctaagttcacttctaggctgaaggataccccaactttgtcatctgcaccaaatatggctggttctgtgcctagcaatggacaagctcccaatggtgtgtccattgatctaaaggctaagaccacgaaaagtaatttccaccatacaagtaatgaaacatcacaagtaaaaccagctcctgggttgcaaagccagcatggaatgcaaccagatatgactgaaagtcggactgaaaaggttgttgccaactttctacagtctcccctgttccaggatgaaaccaagatggacatcagagatgtggtatgcactaaaacattacctcaaatatctaacctgcactatatatattgcacaattatgggttgcccctatgcctctcgctgctaaaatttgcttagtcagacatgttattcatggactttgaacactcttttctttgttctttttgcaggctagaaattcacatgggatggataatgtgctggaattggtgagtccagttatacctagtgtttcttatgctatactccataatcccactcttgcttggttgttccatcctcattctttgaatttgatatgttctactcacgccatcccatacagcccccttaacatgaagcgcctctaatagtctaatatttttaacaagtaatgtagcattaaaacatgatttcacaagtaaagttctataacagaattttgtcttgcatttgttttaaaacttagttctgtatagtgtacagaatggtccacggttgtctttctacctatgtttatgccttcactgctgtctgctaactgagcttttcatttctgacccagttgctgaagcaccaaagaattattgacgaactgcgggacgagaacgacaagctccgtcaaatgctcatagaagaactcaaggtttcaccttccaagttacaattagatcataaaaatggagtgaaggcctacaacccatgctcggactgctttgattgccggaggcgaagtcgaaaaacaagaagatgataatggaattgcaggattgcattttggctattttcgcaatcctttgcaatttcttggattcttcagtagctaaatagttcatcggattagctttcgacataatatcctcagcagaagatccactcttgttgttcaggccagttatgttacctatctcctgaacattcgtgaacacttgatccaattgatgcgttacttctgtgctgaacatgcgcagactgatagcatcacagcagtacgtgattttagttctctctttggattctattcaatgcagtcaaatctaaaatcattagtagatgcaaaactattaaggtttaaaatataaaatttatattagtagattatctgtgaaaaactcttttatatagttatattttaaatattttttataaatataactttttatagcataaccgtatagtttgagaaatcaatgacaaaacatttgtaccggaggcggtaatacctttttcttttctgccgaagtagagagttttctttcctttttttttttgtgataggagttgagagttgagacgtgccaggtggagttctactgcagcaacgggggaggctgcttttctgtgtacgctggtgtttgggccgtagcaattacaagcccgagagagggaaaaccgcgcgggaaacgccacgtgctcagatccacccgctccccaaaactcccacccccccgcaccaaaatttttcccgcctcccgcccaccaccaacccacaaaatcgcacaactccaaggtccaaatcgcaaaaaaccaacccctcctcaagtgagaaaccaactccaaggaccaaatcgcaaaaacaccaccccctcctcaagaacaaggtagtagtagtgtactagtgttccccccattctctctcccattccccaaatcctccgcggcggcggcgcctcctcctcccatgccttccgagcactagcgcggcagatccgatccgagccccctccgccctatctccgatggactccaaggctgccggctcgtcggagatcgagcgggcgtggcacctcctcaccgtggtcatccgcctcggccggcccgccgccgcctccgacgtcgcgcgcttcgcgaccgccgacgacgtcgagcggctgtgccgcatccccgggtcgccgcttcggctctccgggggcgtcgtggcggcttccgagacggccttcgtggcgttcctgaggtacgtggggttggatgttccgccgccgagggtgagcccgagggcgcccgatgatgtgatgaggtggttgcggaggcgggtgcccgttacgtacgagcgcaagcggaaggcgtcagatgcggggcgcttcgtcgcgaggaagcgtctcctggcggctcccgatgcaggttactttgcttgtttttctgtactgatgttggtttatgcggagccatcagtagtgtggttttgaactccatttgggaaaattttgtacagatttgccggaacacgagctgcggcagtcgcagcaactgatcgtgcaaagctgtgctccagttgctactggagaggtgtgctatctctttcaaccttcaagtttttctagtcgcagaaatatcatggtgcagtaacacaatgcataactgctctagtagctttgctgtagataatgcagggaaaattaggttatcacactgagggcttgttcggttaatccccacgagtacaggattaattccatacctaatcccctccgaagccccttgtggagggattagccaaacaaggcctgaatctgctgtcctacatttctgatttactttttgctcgataattaattacaattggggcttggtctgctccttctgtggacatttctcactgcaaatgacgagagagatttctttagttgactatttgactattttggtcactaggttgatgctacctattgaattgacctgcaatgttctcagtgattttatgaaataagctatgcagtccaatgctttgatacacatatttttatggacatatcatactctcaaaatggatgaccccatgaaagataattctcttgaatatgtctcaagtttgtatgttagtcttgatcttgaccctccaagtagttaaaactttcattattagtagaattcacctattacttcatttttctcttctttctgtgtcttgcctcaggtacatcaggaggctacccaagaattgcaagacaggcttcctagtctcaacatatttactgctcagcgttcctttgaagtttcaattggctctaatgtattttcagacattgaaattagcatgccttctcttccgtccaagattgaccagtttataggaggcaatgatggcagtgttcttgtgagcatggcttctgcactagtgccaaaggaggtgacagacatgtctggctgtatcaatatcttccatgctacagttgacagagagagtactaggattggtgaacctgaaggatcagcttcactttgttgttctagagtagaggaccgtgaggaactagaaaaggagtccaccctccttactatggcagttggcttagctgtgggaaagaaaaatgggattgagcaggatctgaatcttagacctagcagtcctagaaattgtagcacaaaggcaacagatgatatggaaacgttcgatgtgatttcgaaagaagctgaagctctacaatattgcagcccaaatgctcaatacccacagaagatcctaacttgtggtcaggacagtgatgctctagtagttaatgctcatgtggcaattcatgagaataagatagaagacattacattccagcctcctgaaggcaccaaaacagaagctattgtacatgaaatggtccatgaaactatgggaagtttgtgtcaaccttcttcaaacacaaaggttgaacatgcagtgttgccactacaagccccaacttatggttgcattagcaatgagaacttgaacattgctgctgaaaacagagcaagcacacatcaaaatcatgtggagccatcaacacagaacgaagtggctgtcagattatctaagaaagagcaagatagaaagattatgaagcaaagggataagggcaagaaaaaagaagcactgcccaaagaagataaggatcaagttgcagcaaaggttcaaaaggttagtttgtccacatgatgatgactcaactgttgctatttcaggttctttctatttatgaacagtttcatgcactactgatgtgttgtaaccatcatgaaccttgtatttcttttgaaaaatagcttatactgatcttcaaaaaatgatttattgaatgttgctgcttgcagggtcatacagaaccaaaaccactgcctaacttcaaaaattttgaaattgaagaagaggaaggttcaggtgagaatttctaaatattctgttaaaactttcttggtttatattgattgctgaccaatgtgaatgtttacgcatactcagggggttacgggactgtttatagggctcgaagaaaatcagatggaagactgtttgccataaaatgtgtgtacatctctttgctagtctcgatttgatgttttttcatgtggatttgttgatctataaatgtatcttctgttgttttgtcttttgacagtctcagtcatctttctataattatatggctaagatctttacaagagttaaccctgcacctgtattttttttattaacaggtcctcatgcaaatgctcattcacatcatgtttacaatgaacagaagatgttggaacgctttgggtactaataagttcatgtcctccgaaaattttataatgatatttttcttgttccatgcagtaactttaaacatatgtatcatgtttttctgctgcagaggcaagaatttcgtgattaaatatgagtgctctcttaggagtggtgatctagaatgctttgttctagaacatgttgagcacgatagaccagaggttgaaacactcatgttgtctctgatgtttatttttccttttattggctattcatattggtccatcttttgttgaatatttcttttatctctgcagaatctgagaaaagaaataggtttgtttgatttaaggtggtatgggttttgtctgttcaaagctctggcaagcttacataagcaggtctggttaaatgcatgttaccttagtcaactgctaacttgcgtttgtcaccagcttatcttggatatctgatatttctgtttccaggggatagtgcatagagatgtcaaacctggaaatttcctgttctcccgtaaactggcaaaggggtatcttattgacttcaacttggcaaatgttagtgcatatacttatctcccaatctgatgctcgccttctgttttctttatgctaattttaacattttgtgttttccctgaaaatccatgcaggaccttcaccagaagttctttcgaaacagtaagttcactttctaagtttcgaattttgttttgaatttcgatggttaattgcagtgcattgattgttatctgttctgtgttattgcctcttccagttttaggctctctgtactgaatatagctcttgaaaatttccatgccgctaataatatcctgggaaatattccactttggagcattttatcttagtgttggcatgttagcattattaaattattccaacagttagtccaaggtttggaatgattaggctatttgaggtggtaacgaatttattttttgaaaatgcattctgcttcttattaaatgcatttcaaactcttcagatttggaatgttttaagactgttgctgactgatattttggtttaattggttaggtaaatctgagacaatctcacgtgggaaggataccatatctcagcctgcactgaagtctaccccagtggttcaggccaaagaaccagttgccgattcaaagcagctccttggatccaagaggaaaagatccaacagaagcccagtgggtagtgcacctaagaatgataataaaagtaggcatggtatccaagctgctgatgtgtctggtgtaacctctgccaaggatcctacaagcacgaaaacatcattagacaggttgaagcagccaatgccctacaaagggcggaaggaattaatgaacttcttgcatgatgcaatgcaaagtcctgacaaaaatacttcgacagcacctgtttcccaaaggaagagggttgctgctcctctcggaaatgtggatcagaagctctttatactcaccccgatgcccctgtgttcgggtggtagtgctattgctggttctggcatgcttaacagcaaaggtgtgttacaaactttataccttctcactgaacccagcatcctctgagatgtttcatctatataaatatctcaatcttgcaggaaatggaaaacatcgaagagaaggtccatgtgttggaactaaaggatttcgagctccagaggttttagtctctttcaaaccatgagagcttgtctttcagctttgcgggccatgcatttatgtggtgtctttacctgcaggttctttttaggtctttccatcaaggttgtaaggttgatgtctggtcagcaggggtgacactcctgtacttcataattggcaaatcgccttttggtggagatcctgaacagtgagtttactaatgcattttgcaaagctctgattcctcaacatgttaaaggttgttgctgatgatatatcttctcaaatacaggaacatcaaggaaatagcaaagcttagaggcagcgaagaactatgggaggtggcgaaactgcacaactgtgaatcttcctacccatcggtaagtgttgataacctttgaacatcaaggaactgtgaagcttaaccaaaagtgttgataacctttgaacagctttgccgaaacagaaacagcggtgattcttagaacatttctcattgctttcaggacctattcgatgccaaatcgttgcgctcagtggatctcagggagtggtgtgcagccaatacgcgcaggccggagttcttcaagtcgatacctgactcattgtttgatcttgtagacaagtgcttatcagtcaaccccaggtgcaggatcacatcagaggatgctctgatgcacgacttctttgctccgtgccatgatctaattcggcagcacaggcttgctagaaggccagccccttctaataatctgccatgtttgcctcaagacaaatcggtcaaggcaaacgagtcgaagcgatcttcttccaccgtgccgactactgttaactctgtaagttgattgcctccaccagcaaattaaccagtgtgccaatagtcttaactattttgctccctcagatgttgatgtaaccatgtaaatactatatataccccccaaaaatatgtaagatgtcaaatgtaccaatgtttgctccagatggcagcgtgatgtactggtgttgaattcatgcacgatgatcatgtgctacttgatgtacctgtcaatgttgatagactgatagtgggtcactgacgtgtgggcccaacttttgtgggacgtgggtcactgacgcgctcctttgtgggacgtgggtcattgaagtgtgggcccaacctttgtgggacgtgggtcactgacgcgcttctctgacaaagttagatggacgtgggttactgacgtgtgggcccaacctttgtgggtcccacatatcagtgacaaagtccctctgactttatgtcagaggagactcgtccagactgataataccaaccagtagaccattttgcttcctggaatcgaatggggaaaaaaattttctccacttttgttcattattgttcacttcttttttatatatgcggtgtacatttcgtgcgtaccacacggtatacgtggtctaccattgaaccgtatacgtggtctaccattgaaccatccgcattctgcttcatcagtcaacatcattcactcgtatgtactccatctgccatgccatttcgcagcaattgcaacgctttgctcaccacgcgtcgcgcataaccctcctgatttcttatccaaaacgattttgtcaaatactaaacccaaacaaaaccaccgtctaaggggctattcactttgatgccaaaataaatcttactaaatttttacaataccaaaattttggtaaggttgataatattgccaaattttggcaagatagctattttagatgtgttcactttattgctaacgtacatgcacccaattttggtcattactatgcagttgccaaatttctaggatatttaccaaagttaagaaatcaaacagatgcacattttttttactttattaaaaaattgtatggattaaaatgacatcaaagtaaacagcccctaaggctgagttcggatggggggagatgggaacccaactcctgcgtacggaaaacagagcagtctattaacgcgtgattaattaagtattagctaatttttttcaaaaatggattaattttattttttaagcaactttcgtatagaaacttttttaaaaaaacaccgtttagcaatttaaaaaacgtgtgcgtggaaaacgagagagagggaatgggaaaaggtgcatgcgaacacagcctaaatgttgtccacttccccggctgaacggcaaccagatacaagtaaccaccacaagccgttaaccccgttgtttacctcctccttgataatctaacagcgtttaattcccttcaaacaataatattccgttggattcaaaacactaatccaatatacaggattcaaaattcaaaatggatttgctccaaaattcagaatttgtttgtatttcggatggatactgtgtggtgtgtgtgtggctgaaaccgcgaggccgccgcgagagtcgagaagcagcaacagatgcaaaaggagaagaggccgagaagggaaggcaagcgaagcaaccacaccaggcaccaaggcaccaaccaaccgcgcgtcgaagcttctgggccacgccgccacaaaagccgaagcggaaaggaaaagcctccctcgatgcctcctctcctcgcctccacctcctccacgtcccctctcctcctcgcctctcgcctccgcggaggcggcggctgcggctgcggcggcgcccctctcctccaccggacgcgccgcggcttcctcgcgccgagcaccaccaccacccagacgacgaggacgagtttcgcggcgatgagctggctcgggaagctggggctgggcgggctggggggaagcccgcgggcgtcggcggcgtcggcggcgctggcgcagggccccgatgaggaccgcccggcggccgggaacgagttcgcgcagttcggcgccgggtgcttctggggcgtggagctcgcgttccagcgcgtccccggcgtgactcgcaccgaggtgggatacagccaggggaacctccacgacccgacctacgaggacgtctgcaccggcgccacctaccacaacgaggtcgtccgcgtccactacgacgtctccgcctgcaagttcgacgacctcctcgacgtcttctgggcgcgccacgatcccaccacgcccaaccgccaggtcagccagccacagattaactcgattcacaaacctaatcgcatgatttcgtttaccgtaccttgctctatgcttaatttcgggttctttgattgagtgggtggcagggaggttcagaattggggatttcatttacgataatttcgtgagggtttagtggaattgaagaattaggctactgatattactagttcagttagtaggagtcactagacagatattctactgcaaatttttacagagaagaagaattcctcgcgagtaaggtaaatcactctatatacgaaagaaacgtgggtgctgtcgtgcacagtaagagctcaaacctgtgacaagtgcggcatagaattgactatcagtactgcggtttcttaattagcttgcaggtcacggctgaccggaattattgatgagttcctcaccaaccaaaggagcttactttggccttatgttctttacgcagttttggtttacagcaagtaccacaatcccataatcctgagcactggcagagaatagactgtcatagcgtcatggttgtgttaggctgtgggcactcagcgttgattgtcctgttcatgggaccattgggcccaatgaatcaggttctgttatattggatcaagaatttgcagcatcccagctgcagtttgcactttcatcatcaaagggccgaataccaagtggctacctgcatattaatcttgagcagtcaatgttatagtgtgggtactgttagcaagtatataccatcatattggtgttatcggttggtttgacaagcatctaattttgtagtggtgctgagtctagcatgtcttgcagtgtttgtaatgcataaccttgcacttgggcagcgctatgtaattttgcaagatcgattgcctatagtatgtatcattttgtgttcactaatttatgtataacttgcatcttgattctttagattggtggacaattgactgctaccaaggagtgccaccaaaaataacaaactaactgaaaaaaaataacttagcctgttattttgttctgttttctgaacaaaccaatgctgatttgcattagataaacttgttcctagacaattagattctatttctttcaagcatccgtttgactgtttgacataactgaagtttctgatcacatatactctgaactctttgtatgcagggtaatgatgttgggacccaatacaggtcaggtatctactactacacccctgagcaggagaaggcggcaagagaatctctggagaagcagcagaagcttctgaatcggacgattgtcactgaaattcttcctgcaaagaggttctacagggcagaggagtaccaccagcaataccttgcgaaaggcggtcgcttcgggttcaggcagtctgcggagaagggttgcaacgaccccatccgttgctacgggtgaagggcaagtttgaaccagaacgccacacaagaacagtgcttgaataaggataaataatagccagacaaaaattatgcagcataatactattttgttacctttgtttgtatcaatccatcgattgtaagagatgagctgaacctggaccatgatacttgccgctgattatgtacaaaccaccttagaaaacttgatatagtattatccttttcgatgcgggaagaaaaccactttttctgattgaattcattcaaatggcaatagccagtagcacttcaggaaatgcagtgtgctctccaattcaagatgaaagtcactcgctgagaactcagacactacagtgaggtcattgacgaaaaatgttgaaattcacctgtaaaaaggtaagttttctaatcttctcatccaaaaaaaaaaaaggtgagttttctctagcgattttttttgcaattgtgttcggagttacatgattgcagtgtggtagtggactgtagtagcattttgagttgtgatacgttctactgttatggttgctgataactgttatttttaccatcatctttttacaaatactccatccatcctcatccatcctaaaatatacaggacattggtaccatgtgatagtacgaatctatctataccaggtaagatataagtatgaattaactgttatattttattgagtggtctcatctataactgttgctatattttaaaacatatattttgttgttatattttatcgagtggcctcatctataactcttgctatatattttaaaacagagcaactaatttcgtgagaccataaatcatgatttagcacttcactacataagcaagagcatgccaggcaatgtttggttggtgcctatgctcacacaatgaaggttaggcaaggcttagctaacaatttattggcaataaccaatatcgacctagttacactaatttacgtataacctgtatcttgatccactagattggttgatgccccacgttactgacctcttagacaggtttgcttagacaggtttggtttcctaacgaagagttgcaccaaagagaacaaactaactgaaaacgaacttgttatgttcaacacaacttgttgccagcactcaaatgataaggcttcaaacaccatgcaatgcaactccacatcaaaggattaaagcaataccatatatcaagagcaactggtaaatgcatgcataacatgcaacataatgaagaaaaacttcagttcgcacagacaaaggttcttgagatgctgatctcaattctcaactataaaatagcagctaaatagcacggtagatcttcagatgccaactctccaggttcatagtgacaaggcattttagacctcatagatccatgggtgctggttgctcctccactcggcgatgccctcagggaaccacagagcaatctccttcctggcgttctcgaccgagtcgcttccgtggatgacattcctgcaaggtatgaggtcatctttagaacttggattctggatacatatttaggtctatgaacagatgagaactcaaagggataacatgagtactagtagaaaggtaaatttgaaggactctagagcaccatttggtgttctgtcgaccatacttgtccttacatactccctccattccaaattgatctacgtatagtttttctgaggttattcctaaatgatctacatatttgtgttcacttattaagtctattcgttatttgtgcattggagtaaatgaacattgatgcatgtatccatgcacacaagtatttataacccacatgcaatatcttaatttgctattgactaggaaatattggggatggtgcatacatcgagtttgttgctagagtaaatatagtatgagagagttattagtttttcttggtcttggtgtacctatgaaatatgtagatcaatgtggaatagagggagtacaaggcaatcattgtgatagtaagatgccagtcctaatgattgttttttgtttttgctggtcgaaatgatgaagtgttattgggccattgaaacattcacatggtaaaatgcactcttattcattaagaaagtatatattttttctgtggaccacgaattagacttggaaaatttggatgcaaggttaatcatggtaaaccatgtagcacatggtgctgtcccacagtggacccataaagtgatatataaaccaaaattcaatcaataagatactagtagtagaatgaatcagcacggttgcaattatttggtatgattggacagtgtatcacttggtacttcaaagtgcataaaacattgcatatggccctgtcagatgctctcaccatgcttaagctagacagaactattcaacagggagtcagtcaactaagctcccaggacagaccaatgctatatattgcacaataaaataaacaacacaccaaaatgtactttagaaacataagtaattttgaactacacaagccttcatgtgctacataagtttaggtgtttctccaaaagcatttaataccatgcctcttgggaggaaaaaaatcattttagcatctgtttctgaaaataaagcatcttagaataactgtgatgggcatctctaattatactccagtggaatttgcatttgaatctggcgcacagcaacatatgagcaaatcaaaattaagagtgagcaagcagtggaggatgcaactgaattaaaatttatcacccactgatgaatgtaaaccacagagtgaatgaacgaaacctgacctgccaatgtcgacagcgaagtcgccacggatggtgcccggctcagcggccagggggttggtggccccgacgagcttgcggccggtggagacgacctgcttgccctcccagaccatggcgacgacggggccggagacgatgtactccacgagccctccgaagaagggcttggaggacagatcggcgtagtgcttctcggcgaacgacttctccacgttgatgagcttcatggctgcatgttcagatagcatatcagcaaaaagaaaaaaaatcatcgctccccacagagcaatcgatgcataaatcatcaaacaagccactaattagacccacggagtgaggaaagatcgaagaaattaagctactcaacaacaaaacatgcttagtttcagagggagagagagaaatccttttaacacataaatagcatggcacatcgtgttgtgtagcacaaagattcaatctaatcttctcacggtgcagcgcaagcacaaatcaggatcattggcaaggtgggcatggttacctttgaggtagaatcccttcttctcgaagcggccgatgacctcgccaatctgagcaaaacaagcaaaagacaaacacattgaagctaagcactagccaacaccaaatcgatgcgaggggaagtgaaaggtaagcttacgaggcccctctggacgccgtcgggcttgatcatgatgaaggtctgctccaacgccattgctaccgaaaaaagacaagctcctcgagatttcggggtctggttttggaggtggtcggcgccgtaggttgagggagaagggaaaccctagccgtgggtgcccctcccatatataggcctcctgcactgtccggcccaaccacgtgagacaccgcatcgatctccacccaaccctagctagactcgcaaacttgggcccaaattagatctcgtgggcctccaaaacggcattcatggcctgagccatttcacccctgtctccatttcactcgacattatagagagtagtagtaggaactatactaatcacttcattcactcatctcaaagaaaaattaacaaattcttcccggtgtacattgtttgattttttttctcttccggataatgaggtgtatatgctgacagttcaacttgcattactttcggtaaatttctgcgttccgaactagtagtgaatttggaacgagggagtttcgtaggattttcacaagaaatagttcattgacaccaaaggaggctttaggttcggatcttttcagcttattagtcggattattgaaacggatggtttacttcatacttgaaaaaataagtttttttttacttggacaatttgtttaagttagttcttaaatttatttctcaaaaatatatatatatatatatatatattgttcttataataaagttcataatctgcaacaacaatatccactgtaaaataaatttaaaaaaaaaggcaatagtgtttgtgtcaatgggaatagttttgctggcattagctgactttacttgcaagtgtaccggcacaaagagaaagagaggtaggcacatcagcacatggcaaattttgccaattagcaaatgcatcggtgaagcgaaggcgacggcgtgtggaggctggagctggaggaggtgcgaccttgcaagtgcgacttccaggaagcattggcgttgccgttgcgttggttgttagcagttaggtgcgctcgtctctcacggtcgcatggtacgattggcaaatggcaactacacttccacattcttctcgaagaaatggagagaaaaaagggtataaaaccaacaaacttcttggaggtagtacggcattgcaggaccatgaataatttctgaacttgaatgaatgcagcaacgacttgattcttcagtaatttcagagatcatcagattcagtggccaaaacacagagtattctctagtcatttcttgcaaatgtattaggtatttgatcaagaactcaatattggtcaatcctctattgctacagaagaatgaatgccttaccaagaaacctctcaattccttttctcagatcgagttgagtctctctcactatctatacattctacggatgattttttttctctctcttttttttttcaaaaaattctatgccaagattgactttatcaagaacagccaggcagatctggccaattacctgttgaatcgtatgatcaattagctatagctcgtagtaagtagaagtgtttgtcacttcggcgatcttggcgccgccgccatggaccgccgcgtcggccctgcctcgacgtcgccgtcctccttcttctccaccacggccgccgtctcctcctcgccgttctccgccgccggggacggcagcgagggcccctccaggtcgtcgcggacgcggaaggaggcgtggagcacgatgaccgggacgccgacggcgagcgcggcgaggaggttggcgatggcgccggcggcggcgaggtcggcgaggacgagcgcgacgaagacgagggcgacgaggcggcggtcgaggaggcggcggagcagcgccgagttggggaacacccggaggagccccccgtagaggaggaggcccttggaggccgccatgaggaagagcatggacgccctgtgccgcggcgcgagcgacgccaggaggagcgcccactgcagcgcggcgtagtggaaccggaacgtgcggaggttgcgcacggcgcgcaccgccgcggcctccgcgtcggccgcggcgccgaacgccgacggccgcggcgcgaaccgcgccagcgcccgccgcgcccccctcgccgccgcgcacgccctgtccgccgccgcgcacgccgcccgccggatcgcgcccgcgcccgcgccggccgcgcccatatcgccgagattcgcgctgccgccgctcggatcccccgcggcgtcggcgtccttgcacggctcgctttctttatttggaggcggagtctgagacacgggaggagaggcgaggtcaagacgcggtttttaacgggtcgcgcacttccgggagacgaccggcgcgtcgcctgcgctgcgaatacgaaaagaattccggctgcatatcgccaaattttaaatttttaagctgattttgaggggttttttttatcaaaatttatttttcagtcaataattttaagtcacaaaagttttattcataaattacttctcgtttgcaaatatgcgggccgttcggccccatcttttcctcatcagctgctgctaaaatttaattttaaagttaattattttgtgaggaattttaaagtttttttcattgaagttattcttttaaattagtattcaagtcactaataacgtactccctgcgtttctaaatatttgacgctgttgactttttaaaaatatgtttaaccattcgtcttattaaaaaaaatttaagtaatcattagttcttttcctatcatttgattcattgttaaatatacttttatgtatacatatagttttacatatttcacaaaagtttttgaataaaacgaacggtcaaacatctgctaaaaagtcaatggcgttaaatatttagaaacggagggattatatgtataaaagatttatccatattttttattacgttatacattatacggcgtattatcggtatttgaccaaactatggagccttcgtcgccgtatttgcagaaaaaaaaaaaaaaaaaacggggccgtttccactagtttttccgtggaattttttgttgcgatcgccaccgacctcatggtgccatggaccatggtggtgtggttggttcttcccaaatgttcggccgagtccaccaagacaccaacatcctcttctggcgcatgctagcccagctgtttgtttcaattttttatttacacaccttaaaaaaatcttactaaagtcttaatcgtttgatttaacttacagacaataatgatttactcgcagcatgccatatgagcgtgtataataagaatttcataagaaaaactttacatatagcctttctttattttgtttcccttgatgatcttttttaaaagaaagaaatatttttgtcatattattatgttggtgttggagcctaaaaaaatatagatttgacaaagtagtaatgcatgttagtagtagcaatcagtggtcgggctctgattaggtagtattttgtttgcagactggctgactgagttggaatattcagagtttcaccgattcagtcttcagacagtaacaagcttgattactgcagagattggggaacagtgtgctaaaatcagtgaacccccacttgattgggttcctgctttcttgcccagaaaattggaagggtgtactaatcaaaagtgagtttttttttaatgatttttgctccggtgccttaacggagacatcacggtttttcgctgaacaaccggggaggtggatacatcaccaacctaataacaaagatgagagcataagggaaaaaagatgctaggtattgttctttgcttggtcgaagaacactatcagaagagtctggacatctaggaaaacgattgcttaacattcactcaataaaacattgtattaaaaataatatattcactcgagaacaacagactgtgggcttgttcttttcttcaggttagcctgcgtgcgtgcgtgtgtgtgttgtgttgcccaggttattcagagttcagacaatgagacacttttagcctgcgtgcgtgttgtgttgcccaagacgaccttttctttctcataccacaacattcagtcaaaaaacagcatagacctaggcttcctttttccccttttctctgaagaaccttataaaaatcagcctggctttacaaagtcgtttcactccaacaaagaaaacttgcaggatcattagacatatagttcctgcttactaacttctactcctctgctagtacaatacgagcttctttcagcgaaaagattgcacgatttgttggcgataaactctacaagcagatcatgtattccagaagaaggtacatacaaaattcatctagaaaaatcgtacatggagaaatctacatggatcaagttatactgggccctgcctgagcttagtaggcttctcttcgataagtgggccactttgggcctttcctgcttcccctggtattggacctgagaggccgtgtcgctgttcctttttctagctcgggcttcaatagcactaggccatgagcctagtagggttcctagtataaaatgctcaccttttctctcaacaatggaaaatggtaaccacaaactaaaattcaactgaaaatacaacaaaggagcatatgagtaggcgacagttccaagtcgaaaattcaggacaacaataaaacgtgccatgcaaagactctgtgttcttccccacctttcccaactcaccttccctcgtgttccgcacacacttttcaaactaataaacggtgtgttctttacaaaaggtttctatacgaaagttgctttaaaagtttatattaatccatttttcaaaaaaaagagacttaattaatcataagaacatacgtcgctccattttgcatgcgaggaggtgagttcccaatctcacttcccgaacacagccttatgtgagcaggcaaaaaaaagtgggatatactccatatcagcggtactccgtattaaggaggaggtgactttcgaagccaagctagttagtgcgttaagggtgtgtttagttcgtgtaaagaaaatttatgggtgtcacatcggacgtttgaccggatgttggaaggggttttcggacacgaatgaaaaactaatttcataactcgcctggaaactacgagataaatttattaagcctaattaatctgtcattatcacatgtgggttactgtagcactttatggctaatcacggactaattaggctcaaaagattcatctcgtgatttccatacaaactgtacaattagtttttttatctatatttaatgctccatgcacgtgtccaaagattcgatgtgacgtttttggacaattattttttgaaactaaacaagacctaacttatgggtctttctataggctagcatcatgtgagtgggctagttagcctgggttcaagactcacctcctccttaataccattgatatggaaattttggtaaattttgttctcagtttattgtctagatatggtaacccctcttcaaaccgtaagagagatgtggaactcgtgctgctgtcaatttttttaaaaaaaaataaagagagaggagacgaggttgtaatcacgtagggtagtagtagtagatgtatctgttcatcttgttctgagatcagacagttggaacaaatacagcgcagctaggggcagcaccacacccagcaagccaagtaatactgctgctacacttgcctcatgctgcttggaagggacagacaaaccgaaacagatcgaccacgcatgctttgctaattgctgtgctttggcgttttcgctgtaaagtctcctcctcctatatccatttctcactccctcacattgttaaacaatcaattaattaatttgacagctaatctaacaacagatgcatcactctaagatgctactactaatctccctgtggcatggataagacacagacacttgtaattcataacatgagcatatgcatgcacactgaatgagtgtcatcacagcattagatgggatcagggtgtcatgtcatgcagcttcatgctagctactagtagctatactaactttctctctatctttaacaaaaggagataattaaatccttcacttagaccggatgattagcatctgagggcgacgcaatgcagcatatgtgcatgaatcatgatcatcatcatcaggctttctgctgtgacaggacctggaaaaaaattattctagtagcttttggttttgtgtttaactatatatatggtgataaattaagccaccctgatcacatggatcagagtctggctggaccacgggatcccataaaatcggctattaaatcgcaaaagggggcaaaaaacaatagcaatattctggatgaactgccaaggtgtctctcatgtgcattcttgtgggtatattccttccctcttctactagttttcgtccaaactgttccatccatctgcatctttcttcagatcagttcacaatatacttgtactacctcattggcacaggcacattcttgtgggagaaattttggatagagaaatggagatgatgctcctgatgctgggaaagaacatcacatgcttgcatgctcctcgacgtgatgagcaacatgtaagtatatgttagtactgcagtagtgcccttgcagcatcgatcaccaaccaatctgtcgcctgcatggcagaatctgattgtctgttcctcacaaacatgtcatattctgatgcctcctagcaatctgaattactaccatattaaaattttcacccctcctgatggtgttttcaccttctgttctgacacatatgttaagatttcaagttgttcagggaaacacttgtgatatgtatatccacccatcccaccagggttcaagtcctgttgcccatgaatattacagacatactagtgggcattcaatagaatttagtaagatcagggatgtgttgtggattcccgtctctttgagcatgtgttagatggcgcatctgtcattgtgtgagtgtggtgttacgtgtgtagtgttgtgcatgcatttacatctgtcgtgtaatcgcaaaaagatttcaggttgttcaggtgtgtatgtgttcagtgtatctctgaattgatctgtgctgttgctgcatatgctgaagctgacacacatatgttcagtttcagagttcagtctgtttcgagtgttcaatgtatctctgaactgatcactgttgatgctgaatatactacgctgaagacgacactgacattttgactaactgggtgcctataatcagcacggaatacacgaggaaaaacaaaaaatgaagcgccactaatcagttaattaccgtttcaaatgatccatcattagccaatacatgcatgaatttttcgtgcggaatgcccactgctagaactgcgaaacaccctaattctcgctgaatttgtgtgcatgtatatccatccattcatcgttcggctgcctaacagctggaaaaatgactttgtgcatcttgtgagaattgcagctaaagtcaggttagctctgaaagtgctctaccctgcattcttgccaaggttaaattcttccaaccaatacacgctctcgaatcgaaccttatcactcttgtcataaattaagctgcaagaatcagatgattccacagttcagataaccctcaagaaaagaacttcacaagttcagaattcagactgacttaattcaccaggttgccgaaaattcactgcaagtactaatgcagtgcagccgtacgaacctatctgtacggtcgatacgaatttaagcaaaaatccgatccatcattataatctaaatttgagagtctgatcaaacccagatttaaactaatttttaccaggttgctcaaaattcactgcacgtactagtgcagtgcagccgacaaatccatctgtacagttgatacgaatttaaagcaaaattaaatccatctttataatctaaatttgagaatctgatcaaacccagacttaaactaatttttacctgcttgctcaaaattcactgcaaggactagtgcagtgcagccgacaaatacatctgtacagttaatgaaattttaaagcgaaattcaatttaaattcgagagagagaagaagaagaagaagaagaaagacagactaatcatgccaacttgcaagcccaaagacccaatctttccttagaaatttaatttttttttcatctctttcctcgcgttttccctccctttataaccaccaccaccatctcgtctccttcctcccgctcgcttactgctcgactcgtcgccttcctcctcgtggcgagcgatcgatgaggacgggggaggtggcggaggcggtgccgagggtggtggcgatcctgtcgtcgctgctgcagcgggtggcggagcggaacgacgcggcggcggcggcggcggcggtgggggaggaggcggcggcggtgtcggcgttccaggggctgacgaagccggcgatatccatcggagggtacctggagcggatcttccggttcgccaactgcagcccgtcgtgctacgtcgtcgcctacatctacctcgaccgcttcctccgccgccgccctgccctcgccgtcgactccttcaacgtccaccgcctcctcatcacatccgtcctcaccgccgtcaagttcgtcgacgacatgtacgtcgctgcaccaccactctctctctgtttttttttacttcctaattccccatttcacgcgaattacgcacgacaacgccaccgacagagttgcttgcttgcgatcgtcgtcgacagaattgtagattgattcaacggtggcatttgttcgtagcttctgaatttcaaattttgaaacttcaagagcaagtgtagataaaaaacgaactctttttctatcttgaaaacacaattgcataaacacttgcaccggttagattaaaaaaagttgcatattcttgtattatctagccagccaaatcaaatcgaactaaatcaacctgaaattctgagcaaagttgcataatgcagcagcagcatgatcgcataattcgaccttttttttctctttacaatcgcacaattcgactttagtagcgatgttgcttggcgaaatgtgatcgaccaatcctttttctttttcgttttttgaaccaaatgtgatcgaccaatcgatggatcgatcgatcccctttggattgattggcacacgagcactgctgcacagccccaccactgtaccacaggcatgtggtccccactcacagacctactagctaatcccctttttcacctagcaatagcattttccaactggcattggcaatagcatcaaatccaagccatcgagttggtcacaaatccaaaggacagttgtcgaattcgaggttgatgcggcggccattctactaccaaattcgccattcttaccaaagtgacagacaccttgggtgtgtgtgtgtgtgtttgtcctatctaccttctcacaggctcacattgccctcaaaacaagccactcggttttgtccgtttcgccattgacaagagctattgcttcggtgacatgctggctggcctggccatcattgatcagtggtctaaaactctgaatatgctcttcttcttgtcgtagtttggaatatgttttttttttaccgggttcgttttatctttcggttgaactggtcggtgcatacaattcaacctgatgaccgtcacaatgcgtcgtcgatgcagatgctacaacaatgcctacttcgcgagggtgggaggcatcagcttgatggagatgaattatcttgaggtggacttcctctttggcatcgccttcgacctcaatgtcacgccggctgccttcgcctcctactgcgccgtgctgcagagcgagatgacctacctggagcagccgcccgccgtcgatctccccaggctgcactgctgtccgtccgatcaggacgatgccggctgccatcacaagcagcagcagcagcagcaacaacagcagcagcatcagctcgccgtctgaatgttcaggagttcagaatcaatgagaagttcagagctcttcttttttgtcactggatgtggtgtcaatttgcctttcttttttcttttctttaatcttttttttaccgtgcttggtacataggtgttagttaattgtggttagtgaaagaattgagctttgattagataggtggatcatggttcatggatgggtcagcttcttgggatatttttttcgccattgttcgttcgatggatggatggatcatggataggtggatcagctttgggatcttgccattgtttaagtgatgctaacttgtgcgcatgtgagtcacagcacattgcatgtctcttgtttgcttcctttttttttctctcttttattttcctcttttctgaacattattcgcggcaggggcaagaaaagggtaggagagatatcatgggattgtggcgacaattgggttattggtcagaacatggcatgtttcttcaatgtttggacgaaaatgatcagctcagcatctctcatgaaaatgaaaattttcgattatatatttgatgggcatagaacctgaaaactctgaataaatgcagagagcaactgaaagttgtcagtctgaaatagtagtcagttgatggtactggcataaatgtcactggagtacaattccattaatatggaaagtccactagggcaagaaagaaccaattgtttttgttcgatctaccagaagagaagaagttccattgctttcttcatactccagagctctcctactagtttagttcgcgaaaaaaaaaaattttaggtgtcacatcgaatatttgacaggatgtcagaagaggttttcggacacgaatgaaaagactaatttcataactcgcctggaaaccgcgagacgaaattattaagcctaattaatccggcattaacatatgcgggttactgtagcacttatggctaatcatgtactaattaggcttaaaagattcgtctcgcgatttccatgcaaactatgtaattagtttttttatctatatttaatgctttatgcatgtgtccaaatattcgatatgatgtttttgggaaaaaaaatttagaactaaacaaggccttaacagcaagcaacaaacatgccagagttgcatcaggggttacaggagcagaagtaaatgagtcacaaaaaggaaaagaaaaaaaaagagaggaacacaattaaatgcaatgtcaattcacctcatgtacttgtccaaaagggccaagtagatgagagattctactacaaggagatggagagattctcatggcagcagaggcatcttgggcggtactacctctgttcacaaatataagctattttagaacaatactgagtcaagtatttttaactatgactgccagtaaaataaaataaaaatcaatgacttaagaatgatgttacagcaattagagttaaacaaactatcataatatgcaactctttttatttgaaataattatttttaaaaaatacttccattgatcaaaataacatattggtgaccatgtccaagtccaaaatcgcttatattcatggacggagagagtatatcagacaggtaattaaagggtgccattaccatgaacagtagatgcatcatgtcatatactatctatgcagatgttagtagtggagagcaaggaggaggggtgataagagaagagaagagaacgtggtgtgcatgaggtttgtagggctaaggcagtggttgtggagggcaaacactgcgtgccaacttttgagctgggggtgtaatatataatgcctttggccttaatgctgtgagctggacatgaacatggatggatgccggtcacaagaaattcggcggttgcaaatggtgatctgatgagatgaccagtgatgcagggcgaggtgaggtgaggtgaggcttaattgcagccaagtcagaaaggagaagtagtaaacgattccctctctagtctctatgctcatttgacattccaggtgaaggttatgtgcatcctaagctaatgtgctgtacttagtgatctaagctagtgcacttatactatattgtaactagcttgttcttaattgcggcaataacagcatacacaattttattacagatgtggtttgtattttgtatttttttaaatgaaaaggtcaaaataatttattttgagctattaccttatggtaagaaaattggatttgttagagtgtaatatatttgggggaagatgtgtcggtgggtaaatgtttaagctgatgaagcgtttctattggtagaaaactattatggacaaaattaaatatatgtggtgagaattggcatgtgggtactgaaccatgtgactccagaactgccaaagccaatggtatttgaacctgtgatgtgaagcctagctagctagctagcccatgcaatgtggatcagtggcctaaagaatcacaggagtaaaccatcagggacagtgatgattctttgggcatttgcttttcataaaggcttccatttgctttggttgttcccctgtgaaatggagatggattttggttgggagcttaactttatctatgtactttgatgccaatgcatgtgtgtgcctttaatcattcttgttgagttgctggtacatgtcttctgaattccatggcttccatcctttcttatcttctggaatagtgacaagtgcactaattgtggctcctatgcaatagaagtgaaaacagggatgtcatgagctcaggaccaccacaggggatttactaggggttgaagtatacagtaaaaatagtttcttttcttaacatttgaactcacaatatgaaattgatcgatgcatgatgcatgaaactcaacaatcaatttaacccgtctccagtaaatttgcacaaccttattaggtgcaaattttgtaaggataggcaggtggtaaacattacagaagccccaaaacaatgaagactgtactttttgatgttaaaccctgcagcacagttttcttgcaaagataagttgaccatcaaacaattaatgggaaaatttaaatcatgccacacaaaatttacaaaatttatgatataccaccctgacccacatgtcattaactcatgtgggtcctatacgtcattgagatacgggtggcatatctcaaattttgtaaaattagggtggcatggttccatcaaacccaacattaataccctatttgattaataccctgtctagaaacagtgacctctggcagtctaggatattgcttcctacactagttgtgtacaaccatgactactacagtaccacccagtagatcaccatcagataacatggaagctagaaacacttgcacatgatcgtacccagctcatacggggtgaccagctcagtacaagatgacaaaaggcactctatcattcatacttcggtctaccatgtgtttatttgaagtggacactattactctctatacataagacttcgctctttaaaacttgcgaagtctgggccgttagattaggatccaaagtttcacatatcctcttctctatcaatcgcacatcctcctatccggaggcatgattttgttaaacaggagagttgaacgatgtaattttaaaattttattaaaattcaaatttaatgtttttttctttagaatttgttgtcatgtgtagggcccaagcctaagctgacctacacgttgctccttctcatgctccttctatttctcaaaaatgaaagtgtataattctatatcggacatacaaaattggcattactagaattaccatatgaaatgcttttgcaacagtaaggttctttttttaaaaaaaactaacactaaggtttcttgaaccacagttttccgccttacctccctcgtttagtaaggttgccaaccttagctgttcgttttccacgcgcacgtttcctaaaccgtaacacatgtgagaatgacaagtgggccacagctgaattccaaagcctaaatgttaaggccttgttcaatcgcggcccatccaaatgagccccaaacggcaacacgagtaggcccaggaaaacgtaaaccccggcctgctagtagatctgggcccatagtgccgctcgtgtgaaatcaaacagatctcgtgctcctctcctcctcgtcgccgtctgcctcccaccacttgacaacaacaaagtctctctctcttctctctctcgcctcgacgccccaaaccctagccatggccgacccagccgctgccgccgccgccgccgagttcggggatcccgattcgccgcccgcgccggccgccgaggaggccgaggcggctgcggcggtgggggaggaggcggtcccggcggcggaggccgcggcggcgaagaggtggcccgggtggcccggggacagcgtgttcaggctcgtggtccccgtgctcaaggtcgggagcatcatcgggaggaagggggagctcatcaagcgcctcgtcgaggagaccaaggccaaggtccgcgtcctcgagggccccgtcggcgccaccgagcgcattgtgagtgccccgcgctagttagtttatcgagtgcctatgtagttctttccgttcaatttgtcgagtattttagaagctctaaatttgacattaaattgttggattgtctggtaggtaggatcttttcttagagatgttatttagtgctctgaattagagattttgtgagttagctgcttaggttgggtgtatattcagtaaaaattttgttgattgttttgctttgacttatatatgttagcctatgagttgctgcaattgttaattgcattttttgtcatgtcaaataatagagcagaggtggacaggtggtttatattattcttaaattggttaaaatttcaagccaaatttagagctgatgttgattgcgtgtagtattggtgtgtggtggtggccttattgtaattatgcttgttagggtggtcttatcctgaagttattggacttgttattgcttacgattgtaggcagttcatctctcaagatgatgggtagtgaacagatggcattcaatatgttttcctgcatttgtatctcgcctggtttggtgtgactcaaacagaacgatcttatttataatttggttcaaattgatgaaagcaataatctatcattctatctgttctctgaatgtgttcgaaattttgtattgggcactcacattagtgttgtttgcattattgtttagtcgtttgatgttatcctttggattcactaactgaatcaatcccacgcctcttggttataggttcttgtgtctgggaaagaagacccagccttggagcttcctccagctatggatgctctcatgagagtttttaagcgtgtcagtggtataacagatggagctgctgagg

SEQ ID NO: 5969 - DNA, 92822 bp, Oryza sativa
agcagctgcagagtgtgagcacgaggtcgaacaggttgcgtgcgggcggagtggcgcctgcgtctgaatgcgtagtgaggagagaggggggtttttattgcgagttccaaatgcaaacgagagttttaacttggagattataaacaactgatgatggggcctcaaacccgtcctatatatgcttcgtgtccccccgttgttgtccccacggtgtcgccgtgtttatttcaggctcgctcgttcatcatatgatttttttaaaaaaaaattccttagttgctggtataagttagaaaaaaaaactgtgtgagataaaaagcagttttatttgttgtatgtatgatgagctttagttggtccagttttagtagttgaggctaggacatcaaattggtactagtttctccaaaatttgtttatttgtcctatgaaacggggtggacgaaactttcttaaatcatgcaacctccatcgtgtagctattggtttccgtgaccaacgtttgatcgtccatcttattttaaaaaaatgattaatatttttattgttattagataataaagcatgaatagtactttatgtgtgactattttttaaaaaaaatttcatatttttttcaaatatgacgaacagtcaaacgttggtcacggaaacctataactgcaattatattggacggaggtagtacgtggtaggttaattagtaacatcgtgtgatctacatcatcttaatctatagcgagtttcttgtttaaggccttgtttagttgcgaaaattttttgggtttggttatcacatcagatataagaacatacatttgaagtattaaacatagtctaataataaaataattacagattccgccagaaaactgcgtggcgaatttattaagtctaattaatccatcattagcaaatatttactgtagcaccacattgtcaaatcatggcgcaattatgcttaaaagatttgtctcgcaatttacacgcaatctgtataattggttttttttcctgtatttaatactgtatgtatgtgtccgaacattcgatgtgagcgtgaaaattttgttttggaaactaaacagggtctaattctcggtatgtaataagttcttatgaaccagaacacaccacatgttgtaattaaggagaaaattccgaggggttttttaggaaaggggaaaaaacgcgtgtaacacctgtgttccactttgatctacaagtaacatgggacatatatcagcatccacatccatttcacctcatatcaatgtagaaggtgatgggacgggcccatgcaaaaggaggaagaggaggactgttcagtcactgacagcttggccctcaagggatgactaatattcatggaaggcagccaaggacaccatgaggggctcctcaatgtattgttcctttcaagtgctcaagaaaccctggtgtcttgctggtgacacacccccaattaaaggcatgtcacaccagcccacaacccccccccccccccttcatgtgtgctgcatcaccccccattttacaactcatctggcttttccatgctgctgcccacattagctcctgttggcttggctctttatcttatctcatcctgcaagggatcacacaaccaaagagattctctatatcaacagctgttggtgtgatacgagccactgacatgtgagaccggacctatctgtcagtgatcactactgcagaggatgtgaaaaatgcaatgcgaacagctgaccattgcaggttctggaacaggttaggatgtgaaaatggcagcccatgcaagtggaaatcaaggcaaggggcatatcagcatatggcagtggtattggccagtgggcagtagtagtatggcattgggattggagcacatggatttggccaggggatgtgtggctgcacccaaggtctggcttttggaaggccctgctgtctcttggaagcaaaaaaaatttgtgcttgccttgcatgcagccatgctgggcttgctcccttggatgtatgtggcaagtgaaccccatctacgcataattgcattggattttcccttcattggattccagatgcatgttgttattgtttttgttggtattctcttttgtgagcaaccattcactgtttcgcttttagttccttttctccttctagagtgtacttaccactactagtttattactccctccaaagtttgtcgttaggataaaaaaattgtaggtaaaatgtatggttaatttggttgtccaaaatgtatagcatgtataatgactagagatgacaactactccgtccgtcctaaaatatataagaatttttagacggaaggactatatcctaaattcgtagtattaaaatatattttatccgtaaaaaaattattatattttagaatggatggagtaattactgccacactaactacgagctccatcgcttcacctgccactgattataaactgtaacacttaatactgactaaaaaataaaaaataatatgtgaatagatcttttatatatattcttagcgacttagaaacaatgaaaaaaaactacgataaaaaatatcaaaaataactttaaaattaagttttagaatttaaattttagtcacgactagtaagctgaagagcaaatgaaaaagctaacggtgtttccatgtcagagttgtgcgtacatccaaaagagttcaaattctgatatccacgaatcagcgttcccgccctcacgcgccggcccacacgaacttgtgtaggtagaaagcatgtgtcttcgtatcgtaagagtggatacctatacgtacactcaacccgtcaacggccttcgttttccacgggggagatcgatcaatgcatgcatattgtcgatcgatcgatcgaagcgccgccgcgcggcgcgcgtcgtcccattgcctggccctgatgcggtgaacgcgcacgcgctccggacatcggcccgcgacgcgccctccgtgttctgatgcgtcctccaccgcgcatgtgcctgccgccatgtgcgcgcgcatgcttcgtgtccgctgcacagagcgtggccgcgtcgcggcgacgatggtttgcacggtccaatgcccgggcgacagccatggcgcgagcgcgacccccggcttgctgggagggcggcaataatccatttcaactattggatccaagcgttcggttccagctgccgggacacgtagtgcactctcctcgttatctcctggtgtgtcttcttcccctcctcatcactgtggccatactacatgctactactcaattgtgtatgtagccaatcggttggagtacagactacgacagagaacggtgctctgcttcccattattttctttcaagagctaggacagtacaaaggagtacagtaggagtatgcaccccccatactactctacattcgaattcgagatggcgaccacaaccttgttttggttgcaaaaatcattcggggatgcatgcttatattagtgttgccacgtttttctccactgaaatgaaaggctcaatagatccgtgcttcaacggataaaaaatcgatcttcatatctacaagtagatatacacgatcaaaatatatacttcatttgttttcaaatagctaacactgggcacaaattttaaaactgacaactcagtctttttgttacaaaaggaattacaaatacttaaaggaataacagatcatagtatattgtatgtcttaaatataagcattatggagttagtactatcactgtgacttcagagttttttttttttttatagaactgacttcagagttgacatgagaaaaacctgacatcgtccggcgacgatggcatcaggcaatatcggcacacggcaggtttgattcgctcatcagatttcggtgcgtaccaatctgtaccatgcatacgcgttagctaggtttgcggcgtttttactcatcatcgcggtagctagctgcatatgatgcatctttggccatatctgaggtgaacagtggggatgaagctgtaccaaagcaccatgatctggctgcataaaacacatttgaatctctacactgtagtcttccgtgaggcaattaattaggtgctggagaataacgcataattaatcaaggaatgaaaaatggtgagaaaaatggcacatgtattgctggtacatcgttggcacttggcagttaggcttaagactgagttcttttcatcaacttcaaacgataacttctttgtttttcgttagcatgttttcgaacctattaaacgcataattaataaaggactgaaaaatggtgagaaacaatgttattgttactggtactagtacatcgtttgcagtggcctgtcgagtcaatttcttttgaggcaaccaagacgaaagcatcagctaaccgagtgaaaaataggcccaagacgagcacgctgaggcctatctcaaagttggtccggccgagcaagcccactgcaactctagaaatacgggccacataactaacttgcaaattttgggctgaatactgggcttccaagaggcggaatcctatttgggccggatatctgcgaacgctaaatgggccgccaaaagagccctctactattcaatgggcgggcccacgaagaaaaggttgggcccactacggaacggaagcctagggccagccggcagccgtcggatcaagatggacggcttctgtgcctcgaccagccctctcgccctcgtcgccggctgcctccgccgccgcacgccgccgccgccacctcatcgctggcccgcgccgcgccgccgcctgatgggattccgcgcgtctatatcccacgtccctcttgctgcttctcttccactcgcctccgtcgcggtgagcgagcgagcgcgagcggcgatggaggagacgaggaggaggggtggtcgaatgtgagaggcgaatccacgtcttgccgctgagaaggcggcgggagggagcaacgtcgtgagacccaccacgcggtcgctgacgggtgggcccaaccacccggccgccgccactcccgcgcccttatcatctatctgcctcgtcttctccgccccctcaagctgttcgacggaatggcgcagtgggacgcgctcgtggacgccgcgctggcgaggctggcgtccaggagcctcctgcgcgccacgcgccccatcgccctcgcgccgccgcccgcgccgccggagaccttcccctgcccaggcccgtgggaccgcgcagccgtcgagatccggctcgaccgcgcaacgctccaccaatggctggctgaaggtccaacctttttttatcatctgctttgcttccatgcatatcaaattttcatttttttattattatttcttccatgtaataactgcctttgagataagcctaaacaacatgttctagtttctttcaatatcatttttaatgggaaaggtgttatcaacaattctagttgttatcaatatagtttcgttttgcagaaactctaccaacttctcatgtatcgttttacttgattaggtggtgaggggagtggccaagaagagaaagtggacgagaaactgattcttttctccgggaatgattacatgggcctcagctcgcatcctgcaattcgccatgccgcagtgaaggtgctcctttcttgcacccatggctattgtttggtgcggaatttttttgacactctaggatttgcaccatgtttcattgaggggcaaatcctagactggcgcatgatcgatttttccttgtttgatctatggagtggactgaatcaatgcttcggtggttaactttgccaacattctggtgtatctactaggcagctgaagagtacggcatgggccctagaggatctgcgttgatttgtggatatactacctatcacaaaatggtggaggaatcgttggcagagctgaagaaaaaggaggtactgttgcgttcaaaatttaagcaaccacatgtgcccggtatacaaaataaaataaaaaacttgcagccttactagagtccttctacaggattgccttctttgtcccactggattttctgccaatatggctgtaatgacggctctgggaaacatcagctctctgttggctgctgggagaaaacctgcggaggacgaaagaatagcaattttctcagatgctctgaaccatgcttcgatcattgatgggattcgccttgttgagcgacagcaagaagtggtatcatttgtgtacaagcactgtgacatgtcccatcttgaacttttgctgtatgtttttcactttccagtcataactcataacatacaaaatgctaagcactaatttacttagttataaaccatgtttgtgattacacatgcagatccagttgctcaatggaaaagaaagttgttgtcacagataggcaagttatacatccaagtaaatttcatcatttaagaagcatttattctctgtattagtgagtagtgtaccgaactcagaagctcttttgattggtaaaatgcagcctgttcagcatggatggtgattttgctccattgcctgagcttgtcaagttgcgcagaaagtatgggtttttgttggtgatcgacgatgttagtatattatcttccctgaaatacagtatttttctggcctaatattaatcaagttatgttgcaaatttccttttcaaggcacatggaacacttgtttgtggtgagaatggtggtggtgcacctgagctgtttgaatgtgagaatgagattgacataagtgttggcaccttaagcaaggctgctggctgccagggtggttttatagcatgcaggtattctattctaaggcatgtccatattatctggcaaggaagaactgctcatagtgcatattaaactgtggaaatgaatcatagatgccttgaaataaaggacttcataaaatacctgagacaaaacctacttgataatatgtaaacagtagcggcatgctcatcacggccaacaggaaatgttagaacaaatgcttggatgacttcaaacattttccatatctgttgctgtcctgagtaacttatgggcatcggcgattatagtttaggaattacgctaagtgcttaacttttgatgttaatagatgctctggacaccacataatattatttatcagggtcttggttatgaaatttgcacttcagagcctcatgcttataaactcaataaatagaagttctcttgaattagcctctcttgataatacttcatgccataatctctgcattttggatgcatgccataatctgtctttacaatttccaatcttatgacgaataataatttgaaatttgtttgcagtacccgatggaagaggctgattcaatcgcgaggtcgttccttcatattttcaactgctttaccagtgccagtagttgcttctgtgtatggtaatactctacacattgtgttctaataatttaaaatattgatatgggaatctggtattgattgctacatatacctgtttgtgttacactgttttcacgaggaagggcatagaaaaccttctctatcacattaatccatagaaggacgaatttaaataaaacattaactaacgtaaaaattatctcattgtcaaagtaaatatcaggaattcttctaaacagaatcaattaatttcagctgccctctatgtatcaagggaggagagatggcggagatcagtgatctggaggcatgtgcagtattttgcctctttgacaaaactcaacataacaagtcccataatttccattgtagttggaagtgaaaaagcagcacttagagctggaaggttctcacttcctcccatttttgtttcttgataatatcagtagttgtgtgttctaatcttttcattttgaaactgcagggatatgctaagatctggatttcatgtcacgccaatccgaccacccacagtaccgcccaactcatgcaggttgaaaattttctgttcctagcattttccatcctaatctctattcatagacttcagcaacctaaagcatcagtgttcctagggaccatagactgtaattggattaggaaccagggtatatatgcatttttattaatgtgttttcttggtctttgctactgctctccaaagatggaatccctgctagactttttttttgaactgcttgctataatttgttgtccagatattagatggtcctagtgttcatcgacataaggtcgggcctgtttcaaccaagattaactgttttatttctttccatgaattctttgcaggttgcgaataactctcagtgcttctcattcttcggatgacatcaaaaggctggtggatgcgctgacgccgtggctccctcacaaacatgatattcagatatatgctgtggcatcaaagctctaaacaatgattcatccgagtgttcagctcatcaagcttcaagaagtaacattagctgagatcccaccggatgatatgggagaaaaggggataagttagtgctggttgacgcgattaatactgggatatctttgtattacagcacaatcaatatgaatatgaaacataactgatgaaacagtactacatcttttgccctctctaatttgactttacttaaacataaagcatcacataattagctaggtaacaacatgaatgcatagcatccactctttactgcaaatacagaaacgtatgcacaaactacaaatatcgacaaattgagagagaggggccacgctttatgcaaggaacaacatttatacaaactctaagtgatcagcagattaagagcaaacaaataaagctaaattattatggtgtattggaacaagcgtgctaaaaataatatgttatactatatatataactctctcttaatatgatgtaaacacaattagaggtgcagtaaaaatggcagcatctgctcccctgtgttattgaatattcggcttaactagttgatggatcaactcgtgcatgaaatgtctttgcaacaaatgcagcttaatctgattctccatcattccacatgcagcttactgtacaagtatttttacagtcattaagaagataacgggatgtaccatattttttaagttgatacttatctgttggtacctctcaaagacactaaaatttctattaaccaaagaagtgcaagctatgcagaaagcagaggaggtaagaataagatagtgaaacactcatccttgcatttctttctgatgcaatatgaatcttcagaaatatatatagtactccttctactagctagctagtatagttatcttgtcaccgacaccatagaatatgaatcatcagaattatatatagtgaaagccaaggagtaagttcggagaattagagactacaacttttcactaatatcaatacagtatacaggcaactacagaatgtagggcctgttcactttaatgctatttttaaccataccattttttttgataaagttacccaaaaaatatccacgtttagtttgttgccaaatttagtcaatacataaaaaatcctgccaaaattttagcaatattgtcatcttgtcaaaattttagtattgacaaaacttggtaaggtttattttagctacaatctgttcatattctacggaacactcaaaatagcatagtagatgatttactaatgggcaaaaggcgatttgaaatagcatatatacaaatgaaaacaacagcgtttaggaagggtatacagtagtacttaagaagttgagagttcatgatctcaacagaattgaagaaataaataatcacgaaatagatgtgtatttatgtgtgaagagagaaaaaccgatcaatatacaacctgatgtatgcttaattgactagagggatatgactaattagttctacactagtaatatcgtgcgcgtgcaatatacattcttcacaaatatatataatgaaaattaaacatacatttccagctcgaccgaagtgtcctgcaataaaaatacggatttgctataaatgtgccatcatgtttttcatgaaaaaatagttagcatgtatttacattgtaagtccctaaattacatatgtaagtccctaaattacatatataattacattagatttgtaatataattgcatttgacatatttttacctatgtcgtcatatttttagattgaccctaaaaatataactaatatccacattttacatgatttggattagtcatttagtatgacaattgataaaacctatccttattcaaaatataatctaaaaggttcaacatatgaagttgaagctgatatattggtggtaaaaactagtagaacctatccttgtgaaagaaggcacctgaaaacttactggatatataaaaaaaaaggtgaatagctaattaagtccctcaagtttcactgaaggctcaatttgatccttcacgttttattttgttcacatagctcctctaaatatttgttttggtttgacatcatccttgggccaacttaatatgccatatggctatttttagtcaatatttctattagaaaatgtcccttttgcccttaatttatatacaactatatactaaaagggagaaaatcaagatgaataaacaacattgcagatatacttccaattatttcaacatgtgcacatgaaacttaagcaattactattgtatacagcttgctagtacataatttattttcgttttacataatttactatacattatcttaaaaaaatcaagcatacaatttttctcttatatatgtgaatgatgagggtataagtgtcatttatcaagagagttattggttcaaggataaatttgaactaaaatgaaaacttgaaggactaatatggatagattgaaacatcaaggactaaactgaggcttagatgaaacttggaggactacttgagctattcaccctaaaaaaaatagtggtaaccatatttgcacccaacacctcccacggagagctaacgagattgaaataatattgaagaaaatccttaccttcagacaatttgttagcattggagttatcaggatccatggagtcctccaatggaatcctagacttgtctgtttcgtttatgtgaaggaatattaattaatgtatgtctggatttctagttagagaagcaaattgtttggcaatgctacagcaacctacagaagatgatttaaagatgcttctgtctaaccagaaatcaaagatagcaagtagataatatttcatatgctctatcttagcctgaatatagggctggaagaggctcccttcttttctgaacagaatgcacaattattctactcttcgtgaaacaaaaaccaaacattattatcagaatctttggagaggaatagatgtcaaccctaaaaatttagtcaattttcagactattttgtatattaaatctccgtccaagaatcaagccagtatacatagaatgacaattaattaatatgtaaattcaaacaaaaataaaacgtaaatacttacagaagaggcaccacatagaataacacagtagcagaaggtcaatcctagcgtgactttagctccactgcacaaacaaacttaattgggatataagccttggcttcttcactctaactcaactctgtaatttgactttcctgattgccaaccagaacaaacaataaagtagcagtgcagcacataattaactaggtaacaacatgcatgtatatagcatccactgttcattgcaaaattaccaaaaacgtatgcacaagctacaaacatcgatagactgatgatgaaagacacacatttattccatgagagacaagctagcaaaacatgcaattaagctctgtccaaagctctagatagggtagtatgcttggacatgcatgcctaacacacaaacatcaacagatcatacatggatcaacacttgtctctctctgagctagtatagctaaacacatacttaattaattcatgtgattatatatgataatatagctctggctgcagcttgatgatactatatcagcgtaagtgtatagcattcatgcatatgtagtagtagtattcagttcagttcagttcagttcagttgggcttggagcttggcacgtagatcctggcccagaggtgcctccccttgatcatgtacttcgccgtctgctgtccgtcgagcaccaccgggatcatcgacgggcaccggagcaccacccgtccgtacaccggcagctgccccgccgccgccttctccaccatcaccgactccacgcacggcccgtacaacctatgttgaagaagaaggtgttgttggtatgatcattcatggcgagagatcgatcgagaagaaggtgtttgatctgggtttggtttggtttacgagttgaagaagttgatgatgtcgtcctgtctgatcgggtagccgcgggagaaggtgatgaacagcgagcggtagtcctccggcaatgggatgtagccgtgctgctggtgcggctgcggcggcggcggcggcggctgctcctgctgctgcaccgggaaccatggcgaggccatcgggttcagctcggccaccggcggcggcggcggcagcatcggggccatgtggacggcgtggtggtggtactggtggtacatcggcggcggcggcggtggtggtggtgtgccgtcgagcgcgtcgagcacgtcgcgggggaggaacgcggcggcttcggcgtcgtcgtcgtcgtcggcggcggcgacggcggcggcgacgccgtcgtcgaagatgacgcggcagacgttcctgtacacgtcgctgacgccctccatgacctcgtcgcggtgcgcgtcgaagtaggcgaggccctcgacgggctcggcgaggagcgcgttggtgcaggggaggaagcggagcgccgggtcggcgtccccggcggcggcgagcgccgcgagccgccgctccgccccgcccgcgacccctcgccgccgcggcagccgcgccaggcacgccagcgcctcgtctacgaagcgcagcacgacgggggccggcagcacggcgacgcggcggacgaagtcgtggtggccgacggactcgagccacagccacagcgcgatcacccacctcatcggccccggctgctgcccgtgctcgccgaccagccgccagaacagctcccgctccatcgtgtggaacatcatcagcgcaaccgccccgctgctcgccattgccgccgcccacctcgatctcgatctcgatcgaaacgctcgctgcagctggcgatcgatcgatcgatggcgctgttaaatagctggccggattggcagctggtggctcgccggggaagcatgaggccaaggcggttgttgctgcagctacgagacaaatcaaatcaacggggagtggacacacgtcactgcacctagccgtgctcccgctccggcgagctcacgtgggaagcacgcatgcatgcatgcatggccaaaccgccaaagcacacaaaagctagttcttccacctctgcacacaaagctctgaacatcgatcatcatgcgtgatcgttcgagcttagcttaagctatcttttcaacagcatgatttggagatacatgagttaggtagaaaaagttttagaaaaacttacgaacttggataatcaatatgagctggctcgagatggaagaggctcctctaacgtaaagtcagagggacataagtcgtctctgacacgtgaggctcaccccaatagacccacacgtcagagagatatatgtccctatggtgtacgtgagaggagcttcgttggctcgagatatatctggcgtggcaacgggattacggattgttgatcatgtgtagctctgctccaaaacttttgatccaagtgattcaccagttagtaaatgttgtttgctactacccttggggatgtgtaaagctaggtggatcaatccaaacatgacataataaggacatggttatatgaatttaagttcaaaagttatgggcagctagcataacaaacctttaaaaagatcttagaaagactttttttttacgattacacgaaagacacacacgcacactacaatcaccacccgtaagtgcgtcccctaacacacgctatctaaagagacaatttgattacaccaggaagctaacagatccttgtcaaaaatgctaggagttgggaatattctatctccatatcattaagttgattattgtggtgatcattaagctatatctacttgtatatctggcgtggcaacgagatggatcatgtgtgcttgctccatggctttcaatccaagtgattcagttcgttaatgctgtctgctaccacctttggggatgtgtaaaggtagattatatcaatccaaacatgacttaacaagaccatggttcataatagtttcagttctgaagttatgacttatcagcagctagcacgagaaacctttgaaaaaggatcctagctagaaagacactttgattacacatttacacctgggagttaactgatccttttgtcgataatatatgatctggctctgcctcgaaattaacttgattgtggtgattagatagagtaaaggtgaactcactcaaatgatgatggcgaatctcctgacagaagtactgaactagtcaaccaggccagcatggatggattgttggtgaccagttgtctccaatgcatttgagagtgaggaacatgtttctgacaagggaaggggaaaaaacagtgatgagaataatcccatattgggaattgctacaacattaccaaataaagaattgaaagaaaataaactttaaaagatctaataattgccttcgcccccaaatgatagaaaaaaaaataggccgttggatggagatccgatgatccagatacatttaatcttgtaacaaccctaattactagtccacctcaattgttttttgttgccaccaccatcgatcccctacctcgccgccgccagcagcaacaagtccgttcttccccgggcacctccctctcttactatcgaacaccttcttctacttctctctgaacatcctctccaacaacgttgttttaccttttctcttgttgtattgcctttagatcaaccgctgtcgtagcatcaatcacctcgtaatcacaaagacttcctccgcctcctccctgtttctcccctcactcacccacaacctcatcttgtagagccttactctagccaacttcgccacctccaccaccgtatagcgagaaagccatgataatttgggttccgtggtgtatatatggcggagaggctgcctaaaattcacaaatgaggataagagcaatggacgaaagcaggaaaggcagccagccttttgcccttttataagcaatgacggtttgtaccgacctaatcgtatttctaaatgggcctaaacatatatttgggtctaaaatagtcgctcccgtctatcacattaaggctttatttggatgggtcgacatttctatggaccacatttatgggctgaagttttattgaatttgtcgccctgtacacaacacaatagaaaaaacttgggtttactcatattgtagccacctttcctttaaaaatgttctttatgaattttcaaaagtatttcgttttctatttattctgatgaaatttataccaaatataaagttacaacccactaaatctaaaactcgacatgcaatcatgccacaatcaattattacatatcaaagctcatgtaagcatgaacatcatctacaatctactgaattctacaaattaacaagcaagcatatcttatcatcaccactcatatcatttccacaatatttcaaagtatctatttatcatttttataatacttaaaacatatatctatcaatatattcagcatcaaagcacaatatcatttgtttgtttcatgattagtatcgtaaactctgacgtttcattattttttgcattctgcttcttgcaatacaaatcttgatcaacaatctaatattttatctattgaatttatttctctccaaatatatattagtaaaccagtttaatttgttgttaataactaatatcctttttactcctaactcgattgttgaaaaaatatattgaagattgcttcgtaattcccacagcaaagcgcgtgtggaaacacataattaaacaaaaagttgtatccacttgagccgtaggctacaacagacagatagtaaagtctctacatcaaagagcgtctaaaggtatgcatggtccatactcattttatttcaaattgtttatcattctagtaaattttatagcaaataaagagctatggcaaattacattattccccttatttatcagagtacattccaatcatttttcaaagtagtcattaactctgattactaattgtggctgcatatatagggtagggagggaagatcacatttaaagccttgggacatgagagtgactattttagttaaaaaaaatgaattgctaataatatgaaatggagggagtaattgaatatgccttttgggctgccatctgcccattgggctgtgaccatccggtttgagcccattttactgacctgtctccctgggctttgttgcgcgagcacgagccatggccgacgtgggtgggagagctcgagctccgaagatggcaacaatggcggccggcgtcgcactgcacctgcacctacaaggtgacgcggccggccgccggataagcggcgaagctgcccaagttcttctccttgggctgcttctgcttctactggtgagttcagagttcagactccaacttgggtcagatctcgtttccatgactcccatgtacccatgtattctgaatttctgatcctagctcaaaattgtttttttctctttttgtcatttcctgttttgatgaaacatgcgcatcattcaagtattataaatttataattggtgccagccgcaaatttgcggaggttggtacgaataggattgtttttttgtcctcatgtatttgtacttttgtagtcctgttgaatccactagagactgctgcttattgctgaactgccacatattgctgctaggaactcacaaattttcaggagttctactcgataaacttatcagcacattgcacatccagctttgcctctgagtgcttccagggatgaaggtgaaggcaattagagtccacaagattggtggtccagaggtaagtgtgtgttctataccaagaagaaaactccatctaatttccttttccttataattcatctcctgcaaatctaatccatttgggagtaagcagttcttcttctgatgtccaaaggtgctaacttgggaagaggtggagattggggagcccagcgagggggagatccggatcaagaacaaggctatcggtgtcaactatgtcgatatttattaccgtactgggttgcatcaagaacctctcccgtttgttcctggtacggattttagtattttaccatcatcaatgacagtgatgtgctgaatgttttcagatctggtgtatggggattctgataacaaaattccaacttactttgttaaatctaatgtcagttcatggcccggagaaaattcttggttgccatctgagcttatagagtatactggtaggctaaggaaaaattataggacatgttcatattgtagccaaaataaaccttaccaaaccaaaattttggcaatttggcaatattgtcaagttttggcaggatttcttatttatttaccagagtttggtaagaaactaaatggatgcgcatatttgacaactttaccaaaaaaaatagtatggtttaaaatggcatcaatctgaacaagcccttactctagcacttttcagtcttctatcactgttcactaactaggcaagtgagcagtgatataggacttttgaaccttgtaatttctatgtaggatttctcaaatcactacagccaatcaccatttgcatacgaagaatcagactcagtgttatgcttgaagagtcttcccctgaataaagttctttggtgttttttgtactagccaagcaccgaattatcacaagaagtgcagtttgtgacttctagaaaaattgaaaacacacaaaagaaactgtttaactaatgagtattcaatcgaatttatcagaaattatttaatggtatgccgaaaaggcaagatcgcactatccatttgcaaatgaacagtcaaacttgtcgaaaatgtgaatgatcttattcttggagcattgactttgtgttcatccaggcaaggaagcagtaggagtagtgtctgctgttggacctggggtaacaggtatcgaagttggcgatgtagtcggctatgctgatactccaatgggcacttacactgaagaacagattataccggcaacactggccattcctattccaccttcagtggaccacattactgcagcatctgttttactcaagggaatgactacatatgtccttgtgaaacaagcctttaaggtgattgttttgtgctaagctgattcagtagttcagtaccaacttccatgatttcagagacacaaaacaaaagaaaacaaaacagaaactgattttgatttcagaatgcaacttagaaacacctccatgttggtctcttgtgcagattcaggcaggccatactgtcctagtccatgctgctgcaggaggagttggctctctcctttgtcagtgggcgaatgcccttggtgccaccgttatcgggaccgtttcgacacaagagaaagcaatccaagcagccgaagacgggtgccatcatgtgatcatctacaccgaggaggatttcgtagcccaagttgctgaaatcacatcgaggaagggtgttcatgttgtttatgatgctgtcggtaaagacaccttcaaggtagcaaaaccatcctactctcattttgcaacaccttacaatcactttcaccttctttgatcttgacaaaaagcattgccatgaaaattggaattaaatgttgaatcataggcttgacatgaggtaaatcagctgcctgaaactgaatatttttttgtctgaaactctgaatgtgaagggatcaatggagtgtctgatgccgcgtggatgcatgatctcttatgggcaatgttcagggaggcctgaccctgtaccagtgagtgatctggcgtccaagtccctgatcttgggcaggccagggatgaggcactacaccgccacccgcgacgagctgctgcacgccgccggcgaggtcttcgccggcgtggcggctggcgttctgcgcgtccgcgtcaaccatgtctacccgctgcatgaggcggctcgcgcgcacgcggatctcgaggcacggagaacctctggatctgtggtgttgttgcctgccatgccagcagctgacagctgatgagagtatcctgtggcattgatgttgttagaataggtgtcgaatatactagttctatttggttacagttggacttggaattgtaataggtgttagggggtggagttagagtcaaactctgtaacccggcatctctcttaaatagagcggggggcaccacaatgtaaccatggcgactacaatgtagcgtagacacgcagggagatgatggcggcgtggccatggactcgtagcggctaggagctatattggttggggaggagcgcccataatcagagccccggggatgtaggtttcggctgaacctcgttaacaaatatcgtgtgttcctgtgtcgtcatctggcatgtcttgggtgatcaatgattgaagcgatcgggaaggttagttatcgttccgctatatcggctaacttttataacaagtggtatcagagcccaaggtttggaacctggaacaatttccatgggtcacatggtggagaggccaggtaacaagtcttcggggtcacatgggttggtgtgacgggggagattgttaggcctgaggccaggtaacaagtctttggggtcacatgggttgatgtgatgggggagattgttgggcccgatgtgtgatggaggagattgttgggtttagtcctacatcggtaattgatggtgggggagcacgacttaaaaggtgggggcggtcctcacccatcagactagtcttttgggttgtgtaggcctaggacctaaaagttgtggctccggttggacctgtggtggagcaggcccaatgtgacctgggtggcctacggttggtgggccgggctgcgcactccaacaagtggtagactaacctttataacaagtggtgagaacaatttccatgggtcacatggtaacaaagtggtatcagagcccaaggtttggatcccggaacaatttccatgggtcacatggtggacaggccaggtaacaagtattcggggtcacatgggttgatgtgatgggggagattgttgggcctgaggccaggtaacaagtcttcggggtcacatgggttgatgtgacgggggagattgtgacttaaaaggtgggggcggtcctcacccatcagactagtcttttgggttgtgtaggcccaggacctaaaatttgtggctccggtgagcctgtggtggagcagacccaatatgacctgggtggcccatggttggtgggccgggctgcgcactctaacagatgttcttgtgtaaactttgtcaaaagaaaaaagagaacacttttgttcagtgatgctaaatgtgatctagagtaaaaaattcatggatcatccagcctcatcgtttggtcgatggctgaagcttcataagctgtagaaaaatgaacggagaaatgaaatataatttataaataaaaacttatatatttgtgttttagtgaattaaaagtcaatgctagaaaataaaatactgtgatagaacatcaaaatcaactttaaaattaagtttttaaaatctaaatgttagttgcgactaataagtacaggcaaacgagatggaggtgatcatcattctgataaacctcatgctggcatgtcatttcaagcggtgaacttgaaagatttaacagtttagccaaggctgatggtactgtcagtccgacaacaagagcaatatatagcttcgctgcctttgtttaaacatgatccacaatttgcgtctgcatctgcttcactgctcagtgaagtgattggacatgatctcaatttctcccaaacaaagacatggatttgcaaaccacaaacaggaagtttggcgaatagatcaaagtgagctatttgattcgagcaattcttctacaggctatcactgtcatcagggcaaaaactgtgaggatgaaggatacattacataccaaaaaataaataaatgtatccaaacttacaaaactgaatgattaaggcacacgttatacctttctactcaaataaaaaaaacaaaaaaaacgtgggctttcagcattatatactcatgcagtcatgcatgcactggggatggaagatctcaaggattcagcttctgttgtgtaacggctctcatattgctatctacagtcgacgagtcaagtaacggtggttagttttttcaggcagtttgctcgaaggatgtgtgcagttctcctacaattggcagacattgttcttcctcattgtttctatgcttcctgctatggttgatccagcagtccccacaaatcctagtgatgcacagctacagacagattcttcaacatataacaaaatttctggtagttgaactggatcacaatccttcctcgtgtttgctatgtttttgggaataaatccagatctcacaccatgttcagcagccataagccgctctgcggtctgtgccaccagttcatcactttccttcagggtgtgcaatttatatctcccatcttttgcaatatctgcaagataggtctttgaccagtttgctggtggaagatcagtcatcatgaacatgtgaataggaccactaccctgggttttcttcatttccaacgcaacagcctttaacttctccttgagtgcagaaaatgtagctttccagtgatttttgaattgcccatctaacagccttagctgtgcgcaaagaaatggctccttgatctttttcctagcgaactccttccctgtagcaatgatctcaggggcaaaagggaggaactcaaccttctcaagtatagtctgtagccgacgatcctttggcgattcgtggatatcaaaatatgactctgatcccttgtatggtcctgagaaaagtgtcccaaatgccaacaaggaagcatcctcagcttcagaaccaggccccaaagccttgtacatatctttgcgcctcctaacgtatgatatctttttcctctttttcaagtcttcatctggttgaaatgaatcaagcgccccatcattattctcttgatatgtccagactgttgttcggcaatcgtcctggacaggatacacacagccattttcgctgccccctaaaccggacagcatcgatcggcatctatcgtaatcacctggcagcgatccaccaccagagacagcacagcacaagccagagaagcaagtcttgcgcatgtctacgccgcaccacaatgagacaaacaccctgaaatcaatcgttctaaccgtagcctttatcggcgatagatcaattatgtcacccatggatacatacctgcaagttaaacagatgaaaatagcaataaatatttggctttgtgtcgaatttaccaaatgaacatggtaatctatggtggaaaccgtgaaatttggaaattgcattactgtaacattaacaagcaaagagagtaatctaggattaaccaaccccactttgggggagtgagatttttacctccgctcccggaggagctgcatggagtggtcccagacggcggcgcggaggtcggaagcgtcggcgaccctgaacttggggcagctcccgaggacgacggcgtggtggtcgagcaccgggggcacgacgagggtgcggttgagcagcgcggcggcgacggcggcattccggagctcgcccacctggttgctgaacccgctgtgcggcgcgtaccaaagaaacctctccccttccagctccggcgaccgcccacatcttctgccccctcctccgccaccgcctccgaagccggagaaggggaggatggagcggagcagcgaggagtaggccgaggagaggaggagggaggccgggatgaggagcacgaggacggccacgaggaggggcgcgtgcgaccgggcgctccgcttccgccaccgcccgcggctcgccggcaaatccatctcgccgccgccgccgccgacgccggcgaatcggatcggatcggtaagcaaagccgctcctccccatggcccacctgccagatatcacgcacactcccacgtgggcccaatatgtcagcccgctagttcaggatgggccacattaagctggcacccacctgtctgtccagagtcaacagcatgggccatgttaacttgggctttatcacgtgcagcagcaacacaaaggacaaaaaaagaagaagcccataacctacggagccaccgacatgtggggcccacttaaaacaagatattatcgcgctctcatgtgggcctaacctgtcagtcagcatgggccaccccgcccatctagacttacgtactctaagttgggcttgttaggcatgtgcagcccagaacgtaccccggggggtgggtcgctgacaggtggggcccggagaactgccgaaggcgtcagggtccagaagctcgtgacgcgtgcggcggcttgcccatgtcggcatccgccaacccctcctcgccttcttcttctccagtaataaatccacgcaaaagcctcgccgcgcaccaccacccagctctctccactccactctcgcgttcttgtggagtcgtgctccactccgggaaggaaggagtgggtgggtaggtgagtggagttggtcgatggcgattggggcgttcgtggagagcggcggcggcggcggcgggggagggggaggagggtacggcgggcgggtgacggcgtacgtggtgctgacctgcgtcgtcgccggcagcggcgggatcctcttcggctacgacctcggcatctccggttcgtgccgccgccgccgcctcgcgcggttgattacttcctcgctgtagtaaatctatctcatctgttcatctcgtctactgcttgtgagttgtgactgtgtcgtgtgctggctcgtggttgggcctgtctgcatctgcatgggccggtgttaatggctggctcgggcccagtctacgtacaagaaaaggtttgcaagcttttttgtcatgaggaattaagaagctgcatttccagctcaaaagatctcatcttccagcagtaatgcagcttctcatcaatgttgccaacactttactctttgtattccttttttttttttgtgtgtgtgtgtgtgtgtgtgtgagatggaagacgaggcttcttgttttgtgtggagagtatagataaagataagtaatgtagtttggatgatcacgcaaacattgttcaagttctcctgcttaatctgtccactgatgttgtgacttaactaccactagtacggaggaaagatcatgctgaaagctcatgtactcgatcgtgtatgaattgtggcaggtggtgtgacctcaatggactcgtttctgaagagattcttcccggatgtgtaccagaagaagcaggacaccagagtgagccactactgcgcgttcgacagcgagctcctcaccgtgttcacctcgtcactctacatcgccggcctcgtcgcgaccctcttcgcgtcgtccgtcacaaggaggtatggccgccggacgtccatgctgatcggcggcaccgtcttcatcgccggctcggtgttcggcggcgccgccgtcaatgtgttcatgctgctcatcaaccggatcctactgggaataggtctcgggttcactaatcaggtataattctcagcacatttgatttcaggtcagtaatctctgaatgaatgtgaatctagttcaagagatagtgcagagatatctgtcacacatttttagagtgcctgttatattaaagaaaataaggaactctgttaaactattgcacaattcagataaaaaaaaaacttgtactccgtatgtggcatggtactccttatgttgttttagaagtcactagtacatcaagttcatgccatcatgcacatcgtgatgctatctagagttctagacaatgtatcaaaatcataaatcttgcatgctgaacctaacaccacacacttgaaaacgaaatgcaggccatgcgtgtcgtgtgcacaaaagtcaagtcttcattgacttgggtttagagggtatagacagcgggtttatgtggatgtactttgttccaagttgataacactcgacaagaagtggagcactgacaaactacatggttgtctttataatattaaggtcttgtttgtgtatagatcattgcattgacttgacaagtcatattttcgtttttgtggccataacgagtgagtgggtcattaaaaagttaagaagtttttacagcctgttgaatctctgttttggagagggacagtgttgaaatattgtgtggagatacaacgcagagggaaagcaacaaactatgtcgtggtctaaaaacttggcgatttactgcctagataggaattagaatggcttatgagaaaaacagtgactgttcactgatccaatctcacactgtgcaagacaagggagatccggagataaagcccaatcttgcaatcaagattttcagataacatagaaaagggattccactttgtaactaaacttcattatgcacataattttccttctgatgcatactcctaatcctagactctaatttttgcatttgttctttcttaacaatagtttcctccttcccaaaggacagtggtaactgtactgacgcctttgctatgaaactatattttgcagtcaatcccactgtacctgtcagaaatggcgcctccacgataccgtggggcgatcaataacggcttcgagctctgcatcagcctcggcattctcttcgcaaatgttcttaactattgcgttgtgaaaatcacagctggatggggctggaggatatccctatccatggctgcagttcctgctgcattcctaaccatcggtgcggtcttcctcccagagacaccgagcttcataatcgaacgcgatggcgacactgacaaggcaaggatcctactccagagacttcgtggcaccacttcagtccagaaagagcttgatgacttagttgctgctagcaacctctccaggacagttcagtatccgttcaggaatatattcaagaggaaatacaggccacagcttgtcatagcactcctggtccctttcttcaaccagcttactggaatcaatgtgatgaacttctatgcaccggttatgttcaggacgattggtctgaaggagagcgcgtctctcctatcctcagtggtcaatcgactctgcgcaactttcgccaatatcatggcgatgatcgttgtcgacaggtttgggcgtagaaagctcttccttgtaggtggtattcagatgatcctttcccagcttgctgtgggtgcaatcctggctgcagagttcaaggactatggatccatggacagagagtatgcttaccttgtgttgatcaccatgtgtgtgtttgttgctggctttgcatggtcatgggggccattgacattcttggtcccaactgagatatgtccacttgagatcagatcagcagggcagagtattgttgttgcagtggtcttcctgatgacatttgtgattggacagacattccttgcagttctatgccgcatcaagtcagggacattcttcttctttgcaggatggatctgcttgatgacagtgtttgtttatttcttcctgccggagacaaagaagctgcccatggagcagatggagcaggtctggaggaagcattggttctggaagaagattgtaggggaggaggaggaaaaacaagcagagaaaacagctctccctagcatgtaaagccctatgaattggaatgtatttgaccatacaaaaaccatacaaagtgtagggttctaattagcaaatgtaagtttgtaattcttctgtctaaatgtagtgtgttgaggtggtcagttgccgtgactggctctttcagatggtaattacaaagaaatgtaacattaatgttgtaacaagggtgccattttgtttctgattccagatgaaaaggaaaaactattccatattctgcaggattaaacgtttctgctgttcacaacaggtaaagtcactccacttcagggaaagacagcaaaatcatttcttttacacagactttagataacccttttttttggggttcttggtatatgccaacttttgtagcctgcaccagaaacaaaaatgaagacttttgctaaagatgtaaaagtggcatgatgtcctggatgaccaaataattcatgacaaatggattaaaagagcccaatatctgaaagagactggccagcagccactaatgtcaccaaccacatatgtaacacttggtgcataattcaagagggagcatctcctccagaatcaggattgaaaggtacaacctcatagtaaatcctcggaatatagcatgtgcagcataagaatatatcagtgttgtgctgggtaagaaaccacatgaaccaattaggaataaataatcatgctgaaattatagcaatgcttgcaatttgcaaacgataaagctagacgcgggttgctggaataacaatccatctccaacaaaatagtacagaatataactgaatggccagctcagaccctaacagaattgaaaagctggattcatcagcactccattgagcaatctagatcaggaaagagcatagatgcataatgaactgagatcccttcaaaatgactaactaatatttttttttcttataaaagagtttacaacagtacaaccacgaagatcagcactaccattactgattttgttaacatagagtgatttatcatgtgtgccagacaaacaacagatacattcatacatagcataacttacagcacatgatacagactacggagaacggttaatcttaaaataaaaacaaaaaaacaaggaggcaaagcttattttgcctgggattcatctaaatgcagttgtgtgcagaaggagatcatgcctgtgcccttgttggtggatttgcatggaaagctgattgtctattttgacctcctaccagatttaatgaaagagaagtagacactgtctcttgattggactctcctatgctgagcttcgacatgccaacaagctcatcaacgttgattgggctctttgaatgaactggaacaggcttgacaatctcatgtgtttcttgcacaggaccatcttcatctttctgattttgccagaaaggaaccgagaattgcaaaaagggcgagaaataagctggaacaatcactggataggtcgactgcaaattatctggcatgatagcagaagcggaagagctctctgcaacggcagaagtatctgactccatagaatctacctcctcctcctccctcggtggaggtagtgctggttgatttaatacttgggtctctggttcttgacctccaggaagtggtggaaggtccatagactgtaaaaccaccaaaacacagttcagttcccccattagagtacagagaaaacagtacaacctttctaattcgaacaaggataaaagtgttctcaagtcttcatgcaatacataaataaactacacaatttgttcaaaaagataagttttagcaatatgatatctatcaccacacaaatgagcaatctcctcgtctcaatataagaatagacccaggcaggcttattatgctacatgccaatatcagcacaataatcgaaataagatcaagcaagctacctcatctggcaccatgtcaaaaaggctagaccttcttttccttctggtcatattggattggcgtataaaatatttctgagcatgactggctacttgagtaggtgttcttgagaccacgaaattacgagagattcctcgccaatcacctttgccaagcttttgcaatccaagcaaaaacctccggtgttcttcttcagtccaaggaacacctgtcaaagtcatcttaatcagaaacatggcacacagaatgtggcctgcaggcacgcaggtagcgagtaatgactggagtacaagaagctggagaactgtaatagttaagctcccatcatatactgacaaaaataccaacaaacttgggactactacacaaaataacagtactgcctatcaccaaaggaaaattatccagcccaaaaaagagcccgttcctaagaaacagggcgcacagagagaggactccaatcttaaaaagtaaaaggattctatgagattccaagagaaatgccagaacataaaagggaaagagacaaattttatgtcttttgccaccttaacaagttatgcagaaggttaacaagattaaaacattgtcaatctggcataatcctcttaacagaataaatgtcaaaagaatagcaaattgtacatttcaaggcgatttcttttatccaatttagtgcctttcattacaaattgataaaggacaaacatatacttttgacttttccaatacatttaagtcagtaggcatataagtctaaaactgcactccaagcatcaaatttggatggaagtacaagttaatgaggcaatgacaacgcagtctaccaatggcatgacctctagtaaggccgttacagtaggaactactgccacagtaaagatcaaacaatcacgtgctgctttgaagctttcacacattaacataggcatgccattaggaaggttcttgggttttgaaagctgacagcttggaagacttttcttggaccaacaccgcgaatataactacgcagtaaactagaaatcattctgaatcagaacagagctaacaacaccgtacgcaatcataggttccaatctccgatgatcgggtgtctaaacatgagaacactgagcctagttaccagccactcacaaaatccctaattcgacactgttatcctctcagaacacgtggccccatgcatccttgcagaggcaaaggatcaaattaaaaagttccacaggatcagccatcattactcgttggaacgatctggtctgattctaaattcttacttatcctagacaaatatggagctgagcatgagtttgacaaaacgtccttgtgatctcatcaaacagttggaggcatctatacgccgtccttgtaccgagagtaattaattgaagtggagtggcgtatgcatgagctaagtagtaccaaatcactcatccatgaccatcagtacaatctgcccattaaatgctttctctagcgtctgtcctacttggaagaaacaactagcagtgactgctagtagcagtactccatcaaatctcccaaatctacacgccgaagcagcaaaggaagaagaacatactagtaggaataataataaaaaaagaagcacaagaagaagaaaaacctgaggttggagaggatctagtaagtcgcatcaggccagaatggtttttgggatgattaaatcattgaaattaaggggttgggaaagaagaagaagggggggggctgacccttcttgcggtcgcgggtggcggaggaggagccctggacgaagtcgtcggaggcgtagccgtcggcggcggtgggggcggcgtcggggccgtcggcgggggaggcgccgccgctggtggatccggcggcggaggagaggagggagaggttccccatgctggcgctcttgcggatggagccatcggtgaggcgcaccccgaagatcttgaccccgcggttggggcacgtccgcgagttgtgcccgttgtggctgcagtgcgagcaccgcctcgtcatccccccctccgtccctccaccttccaaagcttcccttcccccacctatggagatcgatcgatcgatcgagtggagacggagatggtggtggtggagacgacgaggagagggaggggggagaagaggaaggggaggagaggggttaactgctgtgtggtgattggttaaggtggtcggagagaggcgagggccgtccacgtggcggatattcgggggaaggggatatacgtgagacgagggaggcaagtagcggcggcttgtgggtcacgccttctttctatccgtccacgcggttgggcttccttccttcggctgctctcctcagcctcagcctctgcttcgatcgtttcgtgtggtgactggtgaacgatccacagcaaacggcccccaacaaactctctctcgctgctagctcgtcaaactgtcgtggtctttctttcttttcttgttttttttcttttgagcgatgtcatggtctggtttaactcttctactcgtaactaaacagacgttaactaaagatgaaaaatgcacggattattctacgccaaaaagtttatggattctaaatgtgttgcttcttggtgtaccatgtaaccctaatgtgccacgggtgaacgtaaatcctgaatagttgaggattagaggtttgtctcactataactatcaataccaggttttggttgattttatcagctaaatgccagctagataaggaagataaatcacacgtatctgattcctaaagacggagagttagttttgtgaacagtagaactaattcctaaccaaattggagataaccctcgagccccaccagcgcctatataaagagatgaaaggcaaaggagaagggatgtcgtactctttgcctaaaccctaaaacttgcactagaaaggattcgtgaggtgatctcgggaagccctcggtgatgaaaaaagaagagaagaaaagaaaccgaagaagaagagaaggaagaaacaaaaggagaaaattaacaccaatggcatctcaagcaggtcggtgagattacaattctacataggtgattttgtataggctaaagcattgagattgtaaatttgaactccaacacgaggatgtcaaatatttttgtagaacgctcactttgtttcacattagaagacaataatgctaatgacatttttacctatcgatcctattggagagacaatattaatatgatggtggagtccatccacgaggtccataaatatgcgtctttatagtagatgttgagtctaaagattatacaacctttatcaagttagtgtcatgtggtatgctatgattcgtttatatatgcatcaacctatactctatataaggaattatgcttcctatagagtaagggaaaggaattattgatgctatttgaatgtgtattacgaggacacgctgatagctatgtacgtgtatgtatttcatgggacctaaaatgtgcactcactctttctgcaagcataaatcgaggcttgttcagtttgctatcattttcaaccttatcaagttttggcaaagttacttaaaaaagtagctacatttagtttgttgccaaattttagtaagtacatataaaatcttgtcaaaatttgacaaccttgctaaaattttgataaccttaccaaaatttgataatgccaaaacttaataaggttaaaaataatagcaaagtgagcaggccctagatttatactccgtatatattttccatgtgggctgcaggcacacaactggtgaaacacatggtggcattggaggtttgggaaccagggcgagcatggtatcacttgagcgtgacccgtacgagcacggcagggatgacgatatcatcgatcggacccgtggcgcgcgcgtgcggaccaaaaatccaaaaatccggacgacaacgagacagccacacaaacgcgatgaggccgcaacttgcacacacaagcatgtaacgcacctgcctcgtccaacgcgaataacattcgtgcagctcaaggtgtggccgaccgtgcgcgtacctgtagtagagaaacgtacatggatttattttctggctagcttcacaagtggttagctaattgatctggattcaaagactcatctattctatttatttaatattaaatttttctctactattcgcgtttttttcgtacctgtatgtatacggagtacttatatataagggtagtctggtacacgaattcgtagacgttgcacaccagcttccacgacaaataaataatcctgcgagctgcagctgctcatcatcagctcatcctatcctacggactgcaacaaccaacacaaacacaagtcagtccatgccgaaagaagccaaagaaaaatgcatggaaaatgtatacaccacatcatcttgaaccaaatcaccagattaatcaaagccaacgaacgtacggcaaggtgatcatgataactatagcaaggatgtaaaaacaggagtattatattttcaagaacacgagcaatcaacggatctgaacctgaagtaattaacctgcaagtcaaaagggatccaccgcgagaggtggattattgtcggtctaccactcgtaaaaccgggggacaatgttgtcggtctactactgcattctgtattatcatattgctacaagcacgaaacagtgacagcttatctaagccaacaatatgctttctgctcgcaactaattaaaattgcatccatggggttgaacggaccaaagaggataagttaagaaaaagcgtggctaaacactcaaaaagtcggcaatcgatcagcatgcacctttatcccttatgcacggtaatcctaagccatgactatcacggaacgcgtcaaagaaaaatgacagtcacggatcaatcaagggcgcagttaataaaaatagcaaaaacttgaaggtgttaggataattttgacagtgacttgcttgttacagagatattaccttttttttatattctgtactaaagagtatttacctatttgaagtagaaaggcatcataatctaaagtaaaacagagtatgtaagcaactgagtgagcaatggcctatattattttcgtgtggagatattctcatctaatgtcatcaagattcaagacggaggttgcacttgcaccgatctagagagaggatgtgcttaccaacatccaaatcttgatgcctaattttgttgatgcagttggacaaaatatcccttgcaagatactagcatatatcttcaaattatcgaataaaatataagttaggatccatcagcagtgactggaccatatctttttttatatataaaaaaactgacactggagtacaggaccatatcaacaggtggatatatattgtttacgtgagtgataatctaaagaaagaacagaacttgatgaattaaaagttgtgaaaaagatagcatacctgcaggcaagggtagccattccatattggcatattccgaatgtgccgttgcaacagtttccatcatcagattcatatgcttcactggtattgaattgataaacaaatccatttcaataaaacaaagagataagatgtatggaaataaaagataaacttaaaaaagttgctcggctggatcaacaatgataaagaaacacagtcagttcattaaaaagaataagaagattcatgatttgttttctgtttatatctcattctctagtttaaaaacaactcagttgaacattgcacaaaacaacggtactccagagcccagaagcctacacgccttatatttatgttacctaatagatttaattttctcaatcatacgcacccagtatatggcagcaatataattaatctgaaacattagtaagaagattttgctgagatgctagtctgaacactgaaccaaccatatttatgttacctaatagatttaattttctcaatcatacgcacccagtatatggcagcaatataattaatctgaaacattagtaagaagattttgccgagctgctagtctgaacactgaaccaaccattttggaccttatggtttcttactaaactaaaaatgttctggcatgaagagttttagtatcatataaacactgtaatgcacagatatttagtaccaactaacaaatacacttgaaatggtgcacttatgactgcactgcattattgaccgaatagtgctgatcagcagtaacgtgcaccattgttctgaaagaattcagaatcaggtcccaaacttgaagggaaatataagcaacaacagtggagtaaacagttctctgaaacaagatatgaatgtgcaatgagcaagagtgatagaaagtgggttgtgaacttgtgatacagttctagaatgctgtagttgtttgcacaataccaaatcaaaaatgcctatggcagatttgcacagtacagtttcattgacgcctttcaagatggaaagtgttctaaagataatttggccggacaaatatagaaatattcttttgtccttttaagaagcaaagcttggaaaggacatcaaatcaactgaatgatgaacgtccaagtaaaaatgaacggttacatttgacaaatttatcagttgttgagaaatggcgaagcagacaagtaccttcagaaagcaattggtacacatcatcactcaaatccatcttccagaggcccaaatcagaaataccgcttgatgcatcctacacagacaatcaccaatcacaactgaaccactcaactgcatcgtagcaaccatcccaaaaaagtaaaatattcgaaaatatgatttttgtctcgaactacaggcagtatgaggatatgacaaaaggctctccaactacatctggctgacagagtcgcgcgtaacctgaacaaattaagcaataatcgaagcacacgccacggttgtcgacgatcccctcacactccaagctatcaccagttcaccacgagcccaagaggcaagcactgaaaaatccttacccctctttccccgagggccgcaccgccatcttcccctccggcgaaagctcgaagaactagtcgccatccccgaacgaacacaccctagtacataccataaccctacccagcaaaaacgcatacaaaatcaaattaaacggggacttcgcgagctggaacgcgagggaagaggagcaggatacttatctacctgcctccggtcggattccgctgcggcgcggagccggctgccggagggcgcctccccggcgtccccgccatctccggcttcgccgccgcccgacggcgacgcgcgcctctttttttcttcttttttgagcccgcgcgtctcttgctctatttcggtgtttcaaatgggccgagataggtgggccttaatgggcctgaatcaaatgcgaactatactgtaatattgtcgatttgggccgaaaattatccatccagtacagtcacctgacaagtaggccctacgcgccgcacttgtctcgcgctgctgtttttttccccctcctcggcggcgattccactgcctcgccgtcgccggagttggagaagaaggcggcggcggcggcggcgcagaaaggtgaggcctctcgaccgaatccctttccccttcccgtcttccgccccgcgcagtcagcagcaacagacgaaggaatgcggtgcgaatgcttgcgagtagagaaatcgatttctggctgccgttcatctgcgcgttttgttgcgcgcgcgcgcgcgcgagggagggagggagatccagtaaatggcgccttgtcccgttgcttgctcgatcctcctgccggccgtgggggtttttgcccccgattggttccgataatttgtcccgtgttgtagatggtgaatcggtgatgaccaagggttaccttagatgataggaaatgattaggagtagcgtatttcctcgtgattactggagctgatacaatgcaggatatttttagcgctgatttgtaacatggcaggattaatataccattgttgtgctgttgatcacaccatatttcccttatgcagggtattttgtattagggatataggcaatgcaaaactgcaagctgcaaagccatggccatccaagataaagttgagaacaacgacccaactgtgactgttgggttggccgtgagtagttccaaatccagtaagtacgccgtgcagtgggctgtgaaaaacttctgcaccaatgggatggttaggttcgtgcttatccatgtactgcagaggatcaccacggttccaacaccgagtgagtgcatatttgatgtgtttcctactgtgtagatgtatactttcgtttgtaaatcatgttgtcacttaaatatatctatttttcttgcttcttttgtagtgggcaactatatcccgattgataaagtacgggctgacattgccagcgcatatgtgaaagaagtcgaatgtaaggcccgaacgatgctccttttctacaagaacatgtgtgatgagaaggtatgacgttgccacttcaggccatcctttttttcttttccgttccaaaatgaacattcctaagggcacactggagccaaatataatgaaatacaactgaataagcacaattcacaacagtatttattcaggacatttcataatgttaattttgttcagaattgtactttcgtatagagtcagaaattatgagaacaggttagaactcagcaatgatactcatagttttaaacatcctgctgaacatgtgtatacattttctgatcttgttcaggctaaagctgaagtactggttgtcaaaggtgaagatgtggcagaaaccatttccaatgttgtttcaatgtacgaaatccacaagcttgttgtcggtgactcttctcagggcaactttattaggtacttaacatgttctgtaataaataatggtgaactgcatgcatcaaaatgctgattaatttggtggaaatgtcttaggaaatccaagggtactaggacatcttctcaaatttgcagaagtgttccaagcttttgtgcagtttatgttgtctcaaaaggtggtttatccgcagtttattctcctggatttgaaggtcacaagagttctgagctattcctgtccagtgatagctccaaaactgaaatccattcagatgataagccctcattatcaggtgaagttatctgtccgtaaaactggcactggaaattttcactgtgtactgtatagacgataacataatgactgcttccaactttgaaccttttcgtccttggtactctttgaagctgatatagaatggatctttgctagtctttgagaagtttgtagcacctagcttccttttcaaatgtttgcttggttctttgcattcaataagaatttggaatcgaggtcgtttggttttgaaattcagcaaaaaagaaaagaaaaaaaaacagtgcaagaaatttatcccttttgtccaatgcagatgccacaccttcgagaagctttagatcaaacttgacatgggagaatctggaaagtttatcatccgcagaccatgatagaccgcgctccttacatgagtatcttactgaaagcacttcagcatctgttggtgataataacagtaattctccatgtgctagcggtcaaacccctcgaccaagtaacgtgcttatctcagataaagctccaatgacaagcagtcccctgcaggaattgatgctttcagaggacatggtgagccatttgattttttcacagtaaaactgtaataaattttttcacagtagtataattttgcaaatgatacatctttgatgaattgaggatgagccttcactgtttaaacttcttagataagaatagttccttttttttctgaatatacagtaacttaattttctcaatgcaggatgatgtaaatagcgagcttgaaaagctgaggcttgaacttaggcatattaaaggagtgtgcaaacttgttcaggatgagtccatcaatgcttctcagcatgtaagtttgggagtactgtgtttcaacataattagttggttactttatctccaatagtcagcaacttaattgtcatcttgacaatcatatgttaggtgactgacttagctgcaaaacgtgctgaagaggaagcccggctcagcgaggtctactccaggatcaacagagtcaatgagcaagcacatcaagagaaggaacaactgaacgctttggaggctcagtgcaggcatgtgagggatcttgcaagaaaagaagctttgcagaagcagattttgcagctgaggacttcgaaggaggctgataagatgcaaaggctggaaaaacttcttgaattagatgggatgtcatactcaacatttacatgggaagacattgaatctgctacatcatcgttttcagaggcacttaaaattggatcaggatctaacggaacagtgtacaagggcaatctacgtcagacatctgttgccataaaagtcctcacttctgacgacagccacaggatcaaacatttcaaacaagaggtattccttgaaccattaaaggttgagcagtcaagtcctaatatcatcatgatctccggatcttcagatatattcataggctaagaagtaaattgcgataactttgctatgttcaaatatgcagtgctactcttcttgcatatataatgcaagatgccatcattgttatctctaggaaattcttataagatgcccctgttctgcagcttgaggttttgggtaagatccgtcacccacatctgctgctgctcataggtgcctgtctggacagaccatgcttggtgtacgagtacatggagaatggcagccttgaggatcgcttgcaactcaaaggaggcacggccccactcccatggtaccaacgtcttcgcattgcttgggaaatagccctggcccttgtctacctccacagctcgaagccgaagccaatcatccatcgtgacctcaagcctgcaaacatactccttgatagcaatttcaccagcaagattggcgatgtgggcctttcaacattgcttccgctgggggatgccttgtcgacaacgcgcacaattttcaaggacacagatctagttggcacactgttttacatggacccagagtaccaaaggacaggccaagtgtcaacaaaatctgacacatacgccttgggcatggttttattgcagctgctcactggaaagccacctgtggggctagcggaccttgtggagcaagcagtagaaaatggtcaccttgttgacatcttggacaagagtgctgggaagtggcctgcacaagaagcacatgagctagcgcagcttggcctaagctgtttggaaatgcgaagcaagcatagaccagatctgaagtgtaaggttcttgtggagctggaacggctgaaaaaaattgccagtgctgtctctgaccctgtacggccagtgatatctggaccaccaagccattttatctgcccaatactcaaggtattttttggcttattgcaatacatcagctttaagtgaattacatcacaactacctgtagctcattgtcttgtaagaatgtttctgtttcagaatttgaactatattacacttcaaggtggtctgtaattcaactttttactcttaccttgttgtatccatttttttcgaagggtctgaggtgaaacttcattttgctttttttcctccctgtagaggataatgcaggacccatgcattgcatctgacgggtactcgtacgaccgggtcgctattgagatgtggttgtgcgagaatgacaagtcaccgattacaaaatcgcggcttcctaacaaggatttggttcccaaccatgctctgttatgtgcaattacaagttggaaggcagaagcaagggactgattgagtgattgtgctaggtaacttctctaacttcacatggatacggcactcgaaggctgatgatgtacatgtttttgccttggtgatggcctccttaatctctaatactgtagatactgcggtaatgttcttgtaaagcagcagttttgcagcattttcatagaccatctctgagataaattttgaagggtttagagtaggagtatcaagaaggtcattttgtaggttggaccagcagaaagtacagtagtacacttctacagtattgctttgtgatagtttatacatatacatcgaaaggataggaaattcctcttactttcttatcttagtattgtgatgactactctataaatttaagagttgagacaaatttccggcatagactccatgttaccgttgtgactatgatggctataaacttagtatttcttccgtcccaaaatatagcaagttttaattatgaatttagataaacacttattcagatttataattaaaagctgttaatgtatattttgggatggaggtgataatatttaaactacctctgagagtaaagggttagcaggtggtcgtcgtatcccatagtgttttgctagtactattattattgttacgaaccatatttatagagtaaggtatttgctgtacttagcatgttctgttagtattagcaaacttggacatgtggtcttcagctgtacatccatgtagccttgttcaactcgatcagctccaggtgatgagatgatcatatctgaccaataatttggacacatcaggtttaactaaaccacttaggaaaaaaaaacatagcttgagctgcgtgtaagtggatgatgccagcagctgttcaaactactccaagtactactccagtaagaaaagaaaaatgattaaggagagatgagttagcagcagtggcatgacgagctaggaggccggattgtcggggctttggggttacgtgctagtgacgtgtgggccccaagcacggatgacgtggacactttcacgtgtatatgcagctagctagcttagcactactagataagtataagtgtggcacacttgtgatagtgtgaaggttaagagtaggaggaggagtactaattataatcatcatggtgtcatcatcaggcaaggtagagtcccccgacagcatgccggtttggtgtcaccaccgccacgagtccatgagtgacatttattagggccaatgcattgcacgcacgcatgattgctcacattctgttgcactaacagataaatttagtactgtatgacaaaatgacaaaattagtccatgagtagtaccaatgcatgcacgcacgcatgattgatcacatattgttcccctcttgtatcaagatttgattgattccaaatctagtgatcatcataaatatggcgtagtatgaaaatcaaacattgctactccctccctccgttctataataggtgatgtttttaactttttatttgcaatgtttgatcattcgttttatttaaaaaattaatacaaatataaaaaaagataagtcatatgtaaagtacttttaataataaagtaattgacaaacaaaataaataataattcaatttttttttgaatatgataaatgattaaacattgaaaaaaaacttaaaaagataagtaatatggacggaggtaggatgttcttggcctcttaattaattgttctttcttggtatctcctgacatagtatagtaacacactttaactaatactaatggttggccattgactgagtacgtagcatatacgcatttgatcatgttactcatagctgctacgtcgtcacgtcaacgtgcatgtagttaacttaacaaacaatcagttggttatccatttccattaggtgcatgattacattattattatttattggatcaaccatgaattcgcggctacctccggcatgatcgacacacctacctgcatgcatggaagccggggtcgcgccacgtgcgcacgacgtggcatgctcgaacgccatggaagctgggatttaaccacgcacgactaaacaacaaagtagagtagtatacttagggcacccacaatggttatctataagctctctacaagagatctatgtcagcatattttcctacttggaagagattaaatgaagagagagcaaagctatctactaacatggagatagtctatagagaaaaacgaggcaatggattagagagctatagatacccatgtagacataccattgaagtggtttactattaatctagtctattgttgaggtgtacatgttttatagatagtaccttactttaccattgcgggtgctctaaagcaattaaagaagtaattaatgctgttgacaagagctaaataattataatcaacacgcacctattattggaacttgaattgcaagtctctccctcgttcgtttccggagatttttgtttttttaaataatctccgctagtacgggatctagcatgtataaaagttttaaaaaaatcaaataaatatattttaaattataataattaatacttaactaatcatatgttaataagctatcccttttttcgtcgggtcggctttgctgatcaaacattgaattaagaaggagaaaatttagaactgtacagatcaaaaaaaacaaaagatagcaaacacacaccccgaaaaaatcagaggtgacacagctcctactaacagagcagaagctcacacacacccttgttctgctaactagctgatccctatggatatggggcttcttgcttcaatttcgcacagcagaccggccgctttccaagcttcccattcttccacaattgtggcacaaagatggcccgctgaggttgctcttccatcaaacactctagcattattacgttccttccatatgaggcatgtcacaaggatcaccccggcgtcaaatgtctttctgtcttgcttgcgcactgattttcggaccgaacaccaccaagaggaaagatcttctaccggcaccgacaggggcggatctacccattaggcatggtgggtcgaccatcccagctatgactcatatcgccccacacccccaagaccctccccacccccttataatagttataggccatcaaaattatgtataataaggtttggacgtctgtctcttcacaatgcatgcacgccataaacaatgatcaagataattatacgattgatatataaatatgatatgtgttatgttcgattgcttatcgagtaaacatcttcattcttcgtcccatctatattttaaaactgcgtccgccactgggcaccgaacaggaaaggctaagccgatctcgaatccttgtccaaacctgctttgtgaagggacaatcatggaagatgtgggagcaggactcgccgtcgtttgcacaaaggtgacagatcgaggccatttgccaaccccggcgctggaggttgtcggtagttaaacatgcaccacgcatcgaagctatcccgttttacatgctgctaattaggagtaatatgcttctccaaattgaaggttcaaacggctagcactataaatctgaagcaagtcgttcgtagcaacgctaatatgcatgcatattaaaagtcggaaggaataattggcatggatctatcgctaatgatcgatccatcgtttaatctgacgctcacggaagcaagctactcctactaacccataaaaaaataatatagtaatgtaccccctccatcctaaaatatttgacgccgttgacctttttaaaaatgtttgaccgttcgtcttattaaaaaaattaagtaattattaattcttttcccttcatttgatttattgttaaatatatttttatgtatacatatagttttacatatttcacaaagtttttgaataaaatgaatggtcaaatatgtttaaaaaaatcaacggtgtcaaacatttaggaagtatatgatatattctactactacaaatctagatatatttttgattttttttgtctatatttatgtaatagaatgtgtcacgtctaatcgtatatttgttttatgtggaacagaggaagtagctaggtcactcgcatgcaccatttctataatcaacattcaacaaggacctaggaagacagtcctgtagccatcgacggacgatacatggatggatgcatcaggccagctagcgatcgatcgatctggcgtcagcgtatatgactctgacctactactaagtagcagaaagacctagtagtattcgtagctggctgtccagttcacacatacgagatcaactgatgattgatcgattaacacgtgtacaaccatgcatgcatgcttggcgatagatgaatgatcatgcatgcatcaggtcgtcactcgtaatctctggtcatctttcgaccacaaatataataatttctaagttatttataagaggttatgtttaagaaaaaaataatttgttgtccttgatggtttgtgattaaattatggttggaggaaattaaaacgagaggtgactgtcaggggcggctctaccttggtccatggggattagggccttagggcccgatggaggctcgagctttcattattgacgcgagaaccatataagcctctatttttctttgccatatataagatagaaaagggttataattttgtctagtttgtttacacctagcccagctgctatttctttatggatctctgtcacttgtgactattaaaattaacaaacaacatcatagaaatgcttatgattcataaaattttaaaacttaaaacgtttatatttatagataaagagagtagcacatgctgtatatgtggtgcgcgtgcagtgtgtccacatgcatgcatgagcatgacggcaacacggcatgcatgcaacgcatacaggcaggcagcttaattggtcgacggatggtcaatggatggatcgatggaaccatccagcacaagtgccctcgcgtccaagttactccaatttgtcattactagtatcacgtacacggtccaatcgattgattcttgtcaactcgatcgatcgatcgatctcatgggccaagctatctatctattctagtattagtcttccaaaacataatgaatcattgattgattgattgattggtcgatgcctccatggatcatactagtatacttctttcttaaaaaaaaaaactagacctattacttttatcgtcaagattaaaaagaaattaacttattttatacgtgacaaaaattaaagagtatatatatcaagatgactcatcgagttctggtctcaaatatttgatttgtcctttcatttaaatcttatatgcatagagactctaaatcttgtggaggaagctaagtatgggagaagatggtggaattgctaatattgatgacatgaaattgcacgtacactacgtgcatccgttcgtgcagcgggccacgtacgcgccgacgtggcgagcttggccaccagggagaatgcatgcaggtacaagtgtatatggtaaagtacacgtctagatgcacaacgacttgctaatccagtgacccatccatggttacacacgtatacatgttactggagtactacgcgtgagtgtgatagatagatagaacatctcggtcgtatgtatataccggtacacgtccgatcgacgggacagactaattaactactagtcaaagcttgaaatatatggaaaatagtaattaattaatccacagttgattagtttgggtacgtgattgataagagtacagatatatatcacatcaccaggagaaaaaccgaagaatgcattcatgctacacgtttgtactcatggtcgattggtcctcagctgctgctgcttacaagttggtcagtatgctctctccgtgctagtaaaaaaagtcgtttatgacaatatttaagtcaaaccttgaaaatataaattataaataattttgaagttattgagtttaaaaatataaaaattatatgaatagatttgtcttaaaaaatactttcataaaagtatacatatatcactttttaataaatattttttatagaataaagttgtattttggagaccgtgtcgctgtccaaaacgacttcctttacaagtacggagagagtatactttttttcttctctttgattaatcgactgttgactcaaaatatccaaataaaagatttgtattaaacaaatttacatactattcccgcaatatatcaacctggtactaaatgatatatatcttaatactaccattatggacggactctccatccagattcacagtagtatgacatgtttcatctagtactatattcttatatttttatatggagggaatatcaagttatgtatgttttagaaaattcagacaagtatattttttcttttttccaactttctttctttttttttctttctttttgtgtggagacaaaccaaatatgtactggaatttactttatggatcgggagagaatgtcaaactgaaaaaaagctatgaataaaccgcgagcgtcgacgacgatgccaccagagagagagagatgaaaaaaaaaagtgaataaagaaaaagaaacaaggagaggaaaagaaagaaatgggtgatgagtggctccaatgattggaagcaaagcaggtgtgcgttgtcgggggaaggcgaggcaggggaggcccacgtggaagcctgccgcgtccgacgtggcccctcccgcccacgtgagtaggtgggccctcccaccccggtttcccctcctgctttcccgcctcggcccacgtgacccctgggcccactagcccactactaccggctgctgctcccggctcggctcggcttaaaatcgagcttggcttgtcgagttccaaaaaaaaatcaacttaaaaggaaatgtgtcctctcctaagtttatgtatgtggatatatgaggtgtccatgtacattgatctaggaggggtcacatcatcccctcttaggccgagtttagatccaaagtttttctttaaacttctaacttttctatcacatcaaaactttttgacacataaattttcaacttttccgtcacatcgttccaattttaactaaacttctaattttagcgcgaactaaatacaccattgattctttttgggagtggaggatgtaatcggattggcgtgggggcaatgcagtgatgggcatgattggggtgatgatggcggcggcggcagggagaggggaggagatgatggttgggtggaaggggacagcgtggccgcacgcctcgcgtcggcgaccggcagcacgcaccatggtccatgggccacgtacgacccaactgtagtgcatcgccgccgcgccggattgtgccacgtcgtcgatcttgctctcgttcatcagcgactagttcatgtcttttgttgaaatgcgtaaatttcactataagaaatataaaaagtggctgctgagaatggtttctgatccaggtttatgtttttaatggaaaccatgttcaatctgggtgcccaccgtaactgccgtggcggatttatgccacgccttgctcgtagaatctaggcataccacatactattgatactaaggtcgtgttatttccccttttttttcccgttcgtaccttttcaaacggctaaacagtggagtatgacttttgcaaaagttttttatatacaaaagttactttaaaaaattatattaatccatttatcaagtctttaagctaatacttaattagtcacgtattaatgggtaacaccggaaaccacggggaactccaccttccaaactcagcctaagtttagacgcaaacgcttgtataaacacacttatactcactcctgtaaacaaatgcatgcgtgtacatctatctctatgagtatctctcaagatagaatctgcatgttataagagttatgaagtcacaacagatttataccgacattgttaaaaggataattagctgtaaatacgagcatccatataactgatctcatgatttcgttggaacacatgtttttgtacgtacccctccgtcaaaaaaatttaatcctagctatgaacctggacatatacgtatccaggttcgtagccagtttttggacatagtagtaagcaataggaatcggtttaatcgataatggacttgatcgatacaattagctctattgtcgtatatatggctggctgctgcaatacacggttgttgccgacactctcgactattaattaccaggtttgttatcgcattcgaggatgtgcacatgttgtgttattagtgatggattgcttcaatgtggcttacttatttcactctcatcttttcttaggaatatgcggaagatttgtaagccttttttttttttgaggttgcaaccaattgtccatactttcggtacggactacggagactattccactgataggagtacatctgttatctttctctttttctctttttctttgtggcatctgtgtcacatcttgggctatatcttcataaaagaaaataggcaccccaaaagtcaacagcttaagatggagcaatgtactactgcttatactacctccgtcccaaaataagtgcagtcgtagatatccgtgcccaacgtttgatcatccgtcttatttgaaaaatttgtgaaaaatttaaaaatatttagtcacacataaagtactattcataatttatcatctaatagcaataaaaatactaatcataaaaaattttcaaataagacgaacgatcaaacgttgaacatgaataatgcaaaactacacttattttgggatggagggagtaccattttaagctgtctagttgcttcgtccgtccttaaagagatataggtcctgcttggggagctaagggtgtggttggttgcctggctcgtccctggctcgcatctcggatgcaacttgtagactgtttggttgactgcacgtgtcccacagccaggccgaatagatgcaaaaagtctctcgcagccaggctgagcaggaacgaccgaatcgagcttcgctgctcatcctggctccacgcatgcagcggcgccgcacccgcgcatgcaagcgctgcacccgcgcgtgcagggagagccggagaaacgatggggtccccgacaccaccctaccttcttcctcatttcttctatcttctcttctcttcgctatcgccggtcatggccactagcggcgaccatctccatcttcgccggccagatcaggctagctgcaagtcctgctcctccctctcttcttcagcaagggctcaccaagagctctccgccggcggatccggagggcatgagctcgccactgccagatctacctgcacggagatgtcgaagtatgagcttggcttaagctcgtcgtcgtcgccagcggcaccactttcctcgccggcttgagctcgtcgctgcgcggacaccctcgccgccacggacagctacctcaaatccatctcctactcacctttttttttcgccagattcagaggttagaagctcgggcctgccagatccgagtaaccacaacaccctcccggccgctggacccgctgcaccgacggcggcgaacatgcctagctgggtggcacgagcggctaggtaccggtggcggcaagttcctctgcgagctctgttctcctttttttttctttcttttttccaccgaatgtcattaaccactgataaatatggtttatgtactgctgtgcaactgtatatgctcatccgatactgttttcaattattgttgtcaggagctccgaaatcaatgctttgtatattttgcatgtactattaaatctgatatatataccataaataaatacgctttttatttcgtagatggtaagaattttcaatattaattctaagtgaggtaatctctccttcaaagaaagaaaatacttatacctactatccatacaaccaaccaaacaaagtctctttcaagccgtatctttggtgcaagcagccaagcagaatctcacgctaacctggctaaaccaatacaaccaaccaaacggttgcatatgtatctacctagccaggccaaactcagccttgatggaagagatgggccaagctaaaacaatgcaagcaaccaaacacaccctgattctgagaagccaacttctgagaatctgaaaaagatatgttttccagtttttgacttctagtttacaactacagctttagaatctagaaaaaacttagactgtttggggagcttctgatttctaagagaagctgcaacagttagaaactcccctaaactggtccatagttttcagtggtcaaaagtgagattatacatgaggttaaacaaataatatactattcattaatacttggagagaacaaggagaggagaaaactaggggaatgagagagtattattagttcgatggttaaaaaaataaataaaaagatgaaatagtaaatagtattaaggaagaaaaatattttttgtgagctaaaattttaaactataattagattttcttttggacaaggagattagagattaatgtttgggaaagactctgctggtatctctcatttacggaggaattgagggtgattggataagataaaaagaaagataatcaaatagacaaataatactactctctatttaagatataatagtacatagaaaaatagggttaggggagtataaaaaaatcttaacatttgtgaataaacataacacacactaggaaaaatgttttactatattagtagacaaagtggataagcctcaggagatatacttgatagtccagtgataaaaagactgtggtttcaaccttaagaatcctcaacacgattataatttctttttaaaaaatatttgaaggggcgtttctctctatatattttttttattttttagcgtaaagccgtaaaacctcaggctgcgagctatgggcaggctcaactgaaggcatggccaggaaccagggtcaaaggagcaacaagtcatgtccggtgggccccacccggccccaaccccgggggacaagtcaatgagtgcccccgctccctccgaacaggaaaagctgctcatcatttgcgctgcgacgctgacgcgtgcgcccattccacgcaaaagaatactcgcagcccatgcatgcacaatactactactactagtattttctttgacttttcctgcaccccacaaaatatcgcttttgatctaatctcctccttaattaccccctctaatcaagctcccctgtctcccccacgctttaaaagcttcctcctcctcctcgccaaccaccaccctcagtccctcacctccatttccatcaagcccaagaacgaactcaccacgctagtgttgagaagtggagagagttgagaggaatcaatggagatgatggttcatgggaggagagacgagcagtatggcgggctcaggctcgggcttgggcttgggctcagcctcggcgtcgccggtggtgcagccgacgacgagcagccgccgccgcgccgtggtgccgccccgccgccgcagcagcagctgtgcggctggaacggcggcggtctcttctcctcgtcttcctccggtgagtatagatggacggacttacgtcgaagtcgtgcgtgcatgcatggatgcatggatcgatcttacgaaggttagtttgcgtgcagatcatcgggggaggtcggcgatgatggcgtgccacgacgtcatcgagatgccgttcctgcgggggatcgacgtgaaccgtgcgccggcggcagagacgaccacgacgacggcgagggggcccagctgcagcgaggaagacgaggagcccggcgcgtcctcccccaacagcacgctctccagcctcagcggcaagcgcggcgcaccatctgccgccaccgccgccgccgccgccgccagcgacgacgaggactccggcggcggatcccgcaagaagctccgcctctccaaggaccaagccgccgtcctcgaggacaccttcaaagagcacaacaccctcaatcccgtaagcaaaacaatcaatcaatcaaactaattaccaatccaccatgaaatcgatcaagaacaatccgattgacttgttcttgctggattgatcagaagcagaaggcggcgctggcgaggcagctgaatctgaagccgcggcaggtggaggtgtggttccagaacaggagggcgaggacgaagctgaagcagacggaggtggactgcgagctgctcaagcgctgctgcgagacgctcaccgacgagaaccgccgcctccaccgcgagctccaggagctccgcgccctcaagctcgccaccgccgccgccgcgccgcaccacctctacggcgcccgcgtcccgccgcccaccaccctcaccatgtgcccctcctgcgagcgcgtcgcctccgcagccaccaccacccgcaacaactccggcgccgcccccgcgcggccggtgcccacccgcccgtggccgccggcggcggcgcagaggtcgtcggcgtagagaccccactactgattaattagttaattagagatgagtagtggctttttcttaattagcagggtattaattaattacttaattagggttggacccctgtagttttcttgtttatactacgtgtataatttagctctggttttgaactttttaattagtttcataatctttttttttcctatctctcacttcaccctgtttgttgtttactcagcaaagaatatggtgtctttgtataaagtgatgcatgaaatggatcataaaagttttcaatattaattccttcatatctgtagtgttcttggactactaattactgccaaaagaatgatatgattactactgtattgatgcttactatccctcttgtggcacttgagatctcaggataacgatggctgattttccttgctttgttttgttaatctcctcatatgtataagaccagagtaattaattaattaattaacaggggtcgaactgtcaacggtgcaattattaacatctccgagtgcaggcatcagtgaggatgaattccaaagaggaaatcttctccttttctttccattccctgtgatcttatctttgaagcattctaagcttcctgacaggaacatctagctaagctatagctaacttcagagatgcaaaacttgcaagaaacaaaaggggaccagatcaagaaactgaagctgaatctgaagcaacaataacaacagtctctgcaaatcaattaatcagtctctgaacatgtgtgtcgctgttaaacaggcagtcaattaatcagtcagaaggtttagtggtagctgccgtctgaaccgggcaagaaaagatgagcagaatttgacctcttccaacacacaatctgcagcaacttttggctcatatgttctctggccatcttggcgaagctactactagtagtacggtgattgcaggggaaatatctcatcaaatctggatgaaagctactgaagatgagatcattggaacaagacgaagtttcctggaccttactgaacttgcgccagacagatcataccaatccagtatcactggaataaggccctatatattctaaacatgtttttgcacggattattgagacggattttgtttactttgatgataaatcaatattttgagaaataaacttcagtgatttataaatagcttaaaacaagtgatctaaataatgcagtagaagatcttttttatgagaaattgtatagacaaaagataagctgaaaatagcatgccctaatacttgggattaacatagaaaagcaagcaatggcttaattagtagtactcgtagattatgtgtgagttgtcgctactattagttaagtaatccatagcttaattagtagtaggtgcaggtgtgcacgcatgatttggtctggtgatgcaatgcaatcttggttagatttgcgcctaacataatcaggatcattagcctccccagccagcatgccatgtgcaggatgccactaaactactaaaaatcatttggcatcatcatcatccaacagaggcataatgcgtgcgaggtgatgcatcattgtttaaccaaagtgattaattatctcattaggtgtactactcttgtgtgcagggcttagatgtggagggatcacgaagcaaacaggtcccacgcggagcccctcagcttaaatccgggagcaaaagctgcagagatgagaagaaaatttgctaattcatgggacacctttgctccctgcttttgctaacacctagtacagtatactatacccctcttttgctgaaccttgctttgcttgatgaagttttcaaagctggtaatcaatgatgatgcctgtcagtttacaatactttaattgtacactaattgtgttttgtgcagttgtggacttgtggtgtgcaaatgcaaagttgcttggtgatcaatgattgtgctagtattgcctgcacaaagtccctgattagaaaggctgaaatgttgtgcttactaagtagtgttcattactggggccaatgctactgtcttttcaattcttttttctctctcttttctttttcacatgctttcctggagcagagtgtagttagtcagagcagagaaagcgaggttaatacgagtttattagcaggattagtactcaggaactgcacttttactgttgctgcgactgttcagtccaatacatattcagaagggttaggtaggacatccagattccagttgtgaatttcttttctgttcctgagccagcaggtcagctcctgcgcgtgcacgtagcatctgatctgatacggtgaagcattgttcgcttctgcctctgaattctgatccttccttggcgtagaatggaagcaattcagaagaccaactcgcgttgctcaactgattcatcagcaattcgcatgtagatccttctgtctgaatatgtgatcaagccaatggaaatacactaagctacatcgagctccggccatggtcaggtccaagggttgaacttctgacctcatagatgacgctaaggacctgtttagttcgtgaaaagaaaatttttgggtgtcacattggatgtttgaccggatgttggaaggggtttttggacacgaatgaaaaaactaatttcataactcgcctggaaaccgcgagaagaatcttttgagcctaattaatccgtcattagcatatgtaggttactgtagcacttatgactaatcatggactaattaggctcaaaagattcgtctcacgacttctccccaactgcgcaattagtttttttaatatatatttaatgctccatacatatgtccaagaattcgatgtgatgtttttggggaaaaaaatttagaaactaaaacaggcctaacacaaacaaacaaacaagagtaaatcacaaaaccccaggttttgagacacatacaacataaaacctcgggtattatgacttgtttcgagtaacactagattttgaggcaaaatgtttcaaaaagccatatgtttacatcaaatactcatagttttattattgtatatgttcacattagtaaactcaaaatacatataccactcgtgtactttatcttcttcctcacttttgtattacaccatttaaaaagtgcaacacaagtacacaaccccttaataatgacacattaaccagttacttatatacataaacagccatactaccaataaccgatgctcgttaaaataagtccaaacacgtatatcatggaaaatactttcataatatataattagtcaaaaacaatgatattagcttaaacatggggtttcttgaaacattttgccccaaaacctagggttattcgaaacaaatcttaatacctaggggttttgcgttacgggtgcctcaaaacctgggttttgtgaaatttactcaacaaacaaagatgcattactctctccgtttcataatattcgcactatgttaaactatgtgattattactctctctgtttcatattataatcacatagttttatacgaaatcaaacacttttactttttaccattaatttttaaaaacatgtataattcaacatgataatttaccattaatttttaaaaacttgtatagtttaacagcgtgggaataattatatagtttaacatctatatttttagaataatcatgagaaatactttcataatatataattattcgcacgctgttaaactatgtgattttttaggaattaatggtcaaagataagaattttttttatttacaacaaatctaatttaatacggagggaggacatcatatgcatagaggccattgacctgaacaagatgcagttcagtaatccgtatgcatgtgtggttgacagcacgatgcatgcagaagcagttcagaagacgaaaatttgttggtttggttggtctcgtctctgtactgaacttcacacagatgatggctttatgtcactgacttatttgtgctttctgaaaaccaacacacactacagaaatgtcaaacgaggagaaaaaaaggatgttcagatcgaagaaaactcatccatggtgcccattttgacccggaaatcaactgacgatgatgtgtgctgctgaattctcatcaccatgtaccatttcaggaggcatgaccggttggttgatcaatgcagcgatcaaccattgcacgtgtgcatctgaattctcttcctgcattgcagcctgatctctccttcattgagaaatctgaagcagtagcacaggccaaacttgcgtttgtgatgtactgaactttctcagaagcgatagctacttggtcagacaaatctgttaggatctttagtggttatttctgcacgtttgttgaggatcgagttcgcatgaataaacaggacaaatgattgatccagttagaaggaattaacaggtcaagatattatgtttttcttttccaacacatggaatggcttgtctgaacatctggaagaaactgtacttctgaagaacagaacaggaaactgtcgattaagttaaatttcaattagaagaagcatgtttagtgcatcaaatccataaccagtgatgttgctgtatttaatacatgcaaataaagcatatggagactggagctaaatacaatcacatttcagcaacctcagtacaaacttacatgagcagtaaatacaggtagaacagaacccactggtagtttcttggcaaaacttctagacaaatttgtcaggatcttcttgggtgaatatcttcaagttttgtgaagattcgagttcgcataaatcgacaggaaaaatgatgaatccagttagaattataagtcaagatattctgttattttccaacacatggaatggcttgtctgaagctctgaaactctagatgaaacaacattaaaaattctgaagaacaggacaggaagaagtcgatcaagttactttcatgcacaatgcaaatccagataactaaatcggctgaagaatatttggtgcaattgtatgcctcttctcaaaatgaataaagaaggcataaattcattcttggacagagaaaattcagaaaaagcatccagtaaaacatgtggagtgaaaatgccaaactgccagcttaacttgaaagcaagcacaaataatgacaaaatacattattcctctgatataaaaacaaataaaatggcaacttggacagcacatttgtctacaggcatcatgctgaaaaataacgttgtcagtcaaagtcaataaaaaagtagttagtggttagtatatttactagtagttgatagttccccttcttttttcagttgggtttgcaactttgcatagctactgctggttcctgaacgttcacactgcaaagcaaaatggataaaagcacgtcattatttttttaaaaaaagaattcagctatcaacaatagaacacagttcagtcggcactttattcacaagtaagaaagggttaatttaatctatgccattacaaatatgacatattagaaaaatataacattacaattcgtgttatcggctcggtgccactgagaatttttaaaatcggaaccatgccaatcccgtcactatttccgtcctcctctctcacgccgacaacctcaccgtcatagcccacccaccccacccccccaacttcagagaattttcttcagtctaattttctgatttatgctctgaagaatttgtcagtctttgttccgaagaagttttaaccgcagttctcatggtgaaacgcagagagattcagacggacgtgcggtggcgagacggatctaagtgggccgacacggcccaggatgacgtgggtgacatgtgggccgcatttggcccatcatgtccgcgtcagatatgcaagcagattgaggagtccgttccgttcactcgtcgccgtcgccgagatgagcagcaaccgcaaacgcgagctcgagcgcctccgaggcgcggcgcggtggctccttctgcaacgacgccgacgccgtcgtttccctctcattaattacagatcggtagagcggatacctcatacattgttccatcgtcaccgtcctgaagttgtcgtccatcggggtggacactggacagcagaggatatcctccagacaaataggatggaatgtggaaactccaagacaggaaactatgaaatagtatgggcaaatcaattctattagctcgttcaaacaaaaaaaaacatggaaaattaagcttgggtgttgctatgcaatgaaaaaagtgccacgacttagatttcaccgttttgttatataagactttatttgaattatttcactgtttgtattgcacttctgataaattaggcttgaattgtgttatgtgcttgaggtttttggattgtctttacccttttgaactagatgggcacacccatgataaaaatcctgggtctgtcactggtcgacggccgccgggatcgcgtccatgtccgacgatgccagccggagtcgctcgccggtggtcttgcagcagcttgaggtgttgatacgatcgatgtattgccgctaaactgcactgtaccagactcctctggtatttgctcatttctagtaacagaaatggtggcttcatgccctagttcaaaaaaaaaaaaagatcatgtattgccggtttctgatactatccatagatgttcacagaatcacagttagctccgtttgtaacgttgtctcacgtttggatccaatcatcccattcaagggggtttcggagactaaaactccgaccttttttgcgacggcccatgaagaactgtacgttccgtgcgttccccgtgtgtgtaacaacgaagatacatgggttggcttggtttgtagcctaaatagagcttaccaaaattttgtcaatgccaaattttggcaaattttgatatgactaattttgataaggcaaagttgtgtttgaattgaagccaaaatagacaaaattcactattgaaataacccattttcttaggcatgctaaaatttggcttcaaatcaaatattgttaagcctattttatatctcaaaccaaaccagccctatatgactatatacggtagaaactacaaagatgtccttgatgctgttaatccattcattatacagtgggcatgaattcatggagtttcttcctattagacgagagccaacacttccatgtcttcatcggagaaacttttagctactaatcacattcaatattctcttcgagcaatgcacagcagttgcgtggaagttaagaggaaaaatatatgatagtttccaccgaataatcaagtgggctagttgggacacatggtcagcgatttgagataccttgtcatttacctctgtacatgtagaagtcaacttattacagatatgtacatacccaagcaactgcactctttgcttgctgaggagactggagttaaggacttcacattgcatttgcatgttcttggctttaatatatacggatgacatgccagacaaaaagttaaaagaaaggtcgcggcgaatgcaagtcgaacgatcatggattaaccatgacaccttgaagcaaacatgggtgaggtttggcgagttgctctgcctcaagggagcagctctcgctccccacgctattgttactctcagggacagggagtgcctccttgttcttacggggggcacggcatcgtacccacaggtatgagaaccctgcaaaggccgcctggctcgcaaactgcacgcggtatactaggcttatctcccacaagccactgcccacgttaacggccaaggtatccgcatcatacccttcgaggtccgatttggaaaccatgacgaatgtcttctcgtcaaatgcaatgaggttgcgagtggcaaggaacagcggtggtttcattattgggctgtccaggcaaatggatttcccagatttcttcaccctaagctggtagaattgctcaacagcctacaaaatatggcatgcgacacatcagcgttaatgaagtctgactgttgaatatgaacaaaggagacaaaaacataaaggtgttccttgcatactgtaaagtatctccaaacatctaaatctaaaagattgagttgaaccggttcacaaaacaaaaggtaggggcagcttgatagccacagtgtctattactatcatgaatagtggacaaaaccttatctcttttctggaactagcaaaaatgtaaggagctccttgaccactaaaaatcatttcaaatatccaataataagttgcatatattagtgtctaacaattttttttcaagatggaagtcatataaatgggtccagttgatattgaaagcagtcctatttaattctgaatgcataatattttttttcacaataagagcattctgaatttaagagaaacacagccatgaaatcattctgcccacaagcacagaattttttttgtggcagcttacctgccgctgtgcagaagctaatagcacccttggcctgcgcaagcgaacatgttcataagcttcagccggagtcatttgtttgtattgcacctaagtacagagttaatggtcagtatcaaatttcgattatataattaagtcgtatctgcatggccaaataacctaacataccaagtagcaaagaacaactgttgtgctccgtccacgtccagctttgcagtgaacatatgtcaacttcccacacaaagcatttccttccaagattaaaacaacataaataaatacacgagacaaacctagttaaaaatcacaattgcaacagcacaataggatctctacgaaattaatgaacttaaatttttgtctacctccccattagaggaagtgaatatcacaacatgcacgaaaagtaaaaatgtagaagagcaagcagagcaaaaaaggcagtaaataaaaggtcttaaattttttgtatccacaacgtagcagcatattcagtcaagtttcaagaggaaactgcagtagcatactgcaaaaccaaatggcgacggccattatattggtagagttaagtacaatgcacaaattatttattacagggtgttgggaccaacaaacataaaaaacatctcttactacaaacaaaccaaaccaaacataaggtatcaaatcacaagttctgatatctactcatgcaatgaacagtacagtcaaaaacaaactagaatatacatagtgattccgtcgtattataggatatgcaatttgagtagattcttactgtggatgaagtcagcagcccggcaaaggttctcaaatgatggtgcataaagataatctctagttggtaacaccaggttttcaattccatgagcctaaaaaacaaaaagaccatttcagttgtgtgacctagaactgctagttatttgaacattcgctcatgaccagcaggcagaaacagatatatgtaaaatttagggaagttagcatggacatggcacatcagttgtaaattacaaaaaaacagcgccagcgtgattagattacatgtaaagattgcaccaaatgtacagtttaacgtagaagaaagcagaatgttaaaaaaggagcatgttgcatgaacatttcaatgcctaattagatttcttttttctgaactaacacaatgtttgctataaccttgtcatttaggttgaccatgagtagtttacatatcactgacctaggatcttcaatctaccttaactaccacagtcaggtaataacaatatagtacctaacaaacagcgatttgtggtcccatcagctaaacaaaagggcgcttctagtatttttctcaaacccttgatctgatgggtgggcatctagatggcaaacacagaaatctccagtaattgctctcttcacattgcagtattgcaccactgagaccactggaacctgattatgctatatgccagtgtggtttacaacaaggccgtgcacctcctcgttatcagagtaacaacaaataatatgcaggagccatactcgcaggaaggaattaacaaacagaagcagcaaaacttacagaactacatattattcagcacatttgatcagtcatttagtggaatgatttggccgtgtgactacctcatacaggcacctgggaaccagcctctcgtaggattcattcagtgtcacaacaccgcaaactccaagctccttcagccgtagaacatcgctggggaaaggaacagcaccgagcagaacatgctgatcgaagcaaaagaaaagtacacaattagagcagagtaaactataactctaaacagatcgagaaatcaatactgcagaaaaggtagtgccaatcacccacatacaggtccaaaacactaaacgaatcgaaattgaaacaaaaatccaaatacagcaagaactataaacgaagaaaatctcttctccactatgcatatgcagtaggaaagacctaaccctaaacgtttggagtgcaaactgccatgatggtcagcaaaccaccgtaagaagctacattacagggcaaaatccgtcggcggcacaagatgaacgcgaaagccacggcgatcaacaaccagaagaggggggaaaacctccaaaaacaaccgaaatcaaaagagggggtaggaaattttccccacctcgtcgacctgatcccaccagtggaagtgcggctcgaatcggttcctgacgacgttgtacaccagcgtcgggtagaacagcatccgcgcgccgacgcccaccgccgcgcgcttcgcgtcgaaagccacacgcatcaccaccccaccctcctcctccaccgccgccgccgccgccgccgccccacgacgcagctgcagcagcgccccgccgccaccaccaccaccaccatccccacctcctccgccggaatcacccggaagctcctcgatccgcatctcccccttccctccacctcctccaccccgcccaaatcgacccgatctggaccgatccgatcgggaaaaaaaacacacacaccagaaaaaaatcccccccaaaaaacaacgaatcaatcgatcagcgggtggaaaaagggaagctccgcagcgcgaatcggagcagctgggcggcgcgaggtggtggtggtggagcggaatcgaattgaattcgcgattccgcaaccgcgcggaagaaatcgagaaaccccctccccttccctcgcgctcacgcctccccaccctctcctctccaaaaagtcgaaactgcccaaaccgagcagcaacccccgcgcatccgattagtagtacacccggccgcgcgcgaccccttcgtctgacatgtggggcccacttccaccgacagatggggcagggtaacggggcgggggcgggggcgggggcgggggcgtgggtcccctagaggtgacatggcggccgttgatttgtggatgggcttggatccgagcactgactcgaggacgcggacgccacgtggatttgcagaggtggggttaaggagatcgtgtggggggttaaaccgctaatccggtaaagtggatagttccatgcttgtataggacgttaatcgcttaatccattgcttcatctcgcagtgccttctgtgtgtttatgtcattatctttcttttttgtttgtttgtttcgttttggaacaaatgcacgtatagctatagatttcttcacgaaaataaaagtagagatgtctaatgtaatggacatgagttatggtgtgatgtagtcactcaaagtataaggcgaattagttgttacgtgcctaaaaagaaacattcttcttaagaaatttttcttgtgccgtattgcttatggggtgttaagattcagggtgtaaagtttttgcacgtcacatcatgtattatatagggtgtcgcatagggtgtttgggcactaataaaaaactaattacagaatccgtaagtaaaccgcgagacgaatttattaagcttgattaatccatcattagcaaatgtttattgtagcaccatattgtcaaatcatgaagcaattaagcttaaaagattcgtctcgcaaattagtcgcaatctgtgcaattagttatttttctaatctatatttaatacttcatacatgtgttcaaacgttcgatgtgagagggtgtaaagtttctttttccaaaaaaattgttaatttaccaaaatattcattttatatctacaaccgtgtagataatgcatcacagacgctcggttaataatctatgtcaagttatgcctatttcaatctgtttcaaattgagcctatttcaatctattactaattggaaatccaaataactcgtgagtttcaaaagtagcatttgtaaagttgaaaacaattaacatgatgatgacctgttgatattcctcctaactttttgcctacctgttctttccagcgtaacacctcactccttcactcatgtctacacattcttggaagcacaacaacccatggacattgggcattcctttcgatgccttgatatggtgtattgtttgtttgttttcagagcaaaacttatccccaaatcaatttcagcatgatgccaggatgataactgacaaaacaaccgacaacgatgcgtcagcaacgcaccaagattagcctagcgtgcttccaacaaccaaccgatctaatctagttctcaacaagctgacatagtatacagtagagagaaaagtacagagaaatgcagtactgaatgcagcttggtcaccacaggaaagaaactctcaagttaattaattacaggcttaattacagctactggtgcaactgggtaaatttggaccactcatccaaccaaggattggaatcaaaccagcaagctaaagtctaaagggtagcctctgatcaggatcagattcttcaccagctaactgaagctgaatgctgaatgcttagattgcttgctgctgtaaagggaactgaactgaactgaatgaattacaggctgaaacctgaagttgtttcagttaagttcagaagaagatacagtagaagtaacagattactgctatgttttactagcagattagctcatggcaagatttttagataatggaacagatatccagtttgattgccagatgcaacagtcgatctccttgcccagaaattgagcatgaacatgcactcactctcattcatcatctacatgaatgtaatttgtttacaggtggttcttgataactactaattagctatcacaaatacaaatagtaccgtactatctatctctgctcaaaacgagaacaaaaaaaaaagtaaaaaagtggcgccggtgatcgccggcggcgggcggcgggcgagctacttgccgtgcttgacaccacgcggccccgcggatttctttatcgactcgattctctgcagcctgatctgctccctgaacctggcgatgaactcctccgccttcttgtccacctcgttctcgtccacctccggcgacgactccctcctcggcgagttccccctcgtcgagagctcgccgtcgccgtcgacgtcgctgtcgtcgtcgtcgctgctctccgaggacaccgtcacgttgcccaggatggggtcgctgctgcctctctcgtactggaacctgggaatggattggtacgccctgtagccaccgtacggatcgtctgaatccgatccgtgaagaagagccggcgcgtcgccggcgacggcgacgtcgggttgttcttggctctggctctggagtgattctcttcctcctctgattgttctcaccgatttggcaactgggtagtacgacgaggaggaggaggagctatctatggagattcttggcttcgccgacgaggagttgctgctgctacggctgaattcggaggtagtgaagctgtgggaggtttgctcctgcagctcctccttgaagctcttcgccgccgtgcggcgttcggccgccggcggatggtagccgtggacgaggaacggaggtggcggcggaggcggcgccggtggggatgacttgtacgggctcctccgcctggaggagtagtcctcactggccttggctagtgtctccttggacagggacgacgccggggagagcctcttcggcgacggcgaaggggggctcggcgccgacgcgtcgaacctccccgaccgtgaccgccacgggatcggcgaagggagcacggtttcatggccgccgccgcctccgccgggcgtgtcctgtgagatcctgcgcggccgcgccgcccacggctcgccgccgtcgccgtagcccgcgctggaggacgactcgccctgcggcttcagtgttcttacgggcagcgacagcggcggcgcctgctgcgccgcctccacggcgtggctccggccgcctcctgcgccgccggtcgccaccaccaccacaggctcgtcggggtggtgcatcgcgctccacgaccgcaccctgttgccacccgggctgtcgagcgccacgtcgccgccaccgtcgtcgaacaccagcgagtcgtggatcatctgcgacacgtacccggcggagtccgccttcgcctgcgccgcggcatccttctcgtcgccccgcctcccggcgttgttccggcggctgaacagcccgtacgacacggcgatcccgacgacgagcaggtggagcagctcccacaccttggcaagaaacgcctccccacggccgccgccgccgccaccatctccccccgccgccggcgcctgcggcgacggcacgagggggagcagcagtacgcacgccgcgaacaccgccgccctgaacgggaagctctgcagcagcgacgcctgcgccaccgccattggaggaagaagaagaagacgaagagggggaagcgggaggcagcgtgacgacgctgtttttaagctgcttttgctaagtttttctcttcttcttctctctctttgatagcttttcgcgcgcaaaataaaagttgtatcaaattctctcaccctttggcttgggctttatggccaaccatgcgttggagatgcatcgagattactagagatggtatctcttctcatctcatctattatctctttttattttgtgtttttcttcccctctactctcctaggcaagtgtgtgtagtttgagatggtgagggaggcttgaggaaaatggtataacttagctagtaagggaggaattttgtgtgagaaaaaggaatatatgcacttctctcttggtcttcttttgtttttcacgtttatcagtctcggcctctgtatcatgtgatgcaagtaacacaccgtttaatacgcgtgagtcaaaaacataaagaacatatgaaagaatatgcatttttttcgagaacggcgaaataagatgtttgtcctaacaatgatattttatttttacaatacatatgtattatgattggcagattcctaacaaaattcctattatccaaatgcacatgcgctgcatatatgagagttgttctttttgaataaaagaaaaaaaaagagctctaaacacgcgagttggaacacgcaaaaatatgaaggaatatgcatttttgtgagaacgacaaaagaaacgaactgaaacaaaaaaaagatgttgtacaaactatggtcctttatttttgcagcacatgcattatgattatcagattttataacaaaatccacaatatccaaatgcacatgccctgcatatatatatgagacttgtttctttttttttataggaaaaaagtgagcaagtactcaaaatcataaaatatgttatatcagataaacatagcatttacactacaagtacgcctttgattcgctcgtggatgttacgcgaatattgtgctgcttcaacgtgatcgagctctttgtcttctctcactgacgcgtctctgacgaaatgctgatcgagcatgcatatgcattaaccaccctgcagctgttaatctcttttcaggacaggacagtaaatccaggtaaaactgcaaaggtttttttttaatcgaactgcatttcattttattaagaagtaaattcaggtaaaactgcaaatatttttttttaaaaaaaatgcagaagagcttcatttcatttcagtgagaagtcagtttaggtaaaactgcaaatatcataactactgcgagattacaatgttagtttccatgaaatgggaattaacataacatatacttcagtcatcaagcagctgcttactctgcacactagtcatcagtgaagtcagctgcagaacgtacgtatccaccagctggacagtgtacctgatcgtcagttgagcactaaagttactcttgtacatatccaaactaaaggttcatgaaaaaaatacatctttgtggattaagacgaatataagctcgttcaacactttgcagtaaactacacctaatcctgcataagctaggagtagtaatttaaagacacatcataaagtagagccaattaaccagcacacagtatggattggtgattagatgagttcgatacttcgatggtgattggaacaacaaagatttttcacacaactgaaactctgtaccaactagaacatcggatatgcagacagagagagagcaatgcaatgcaaggtgatctggagacctgaaaaaaagaagaagaaagaacatgaacatttgcgtggttaaaaaccaaagattcctcactcttttgggtggcgtacgcaactactgcttctgctgctgatagcttttctgcaagcttaggtgggtttctgaatgctgatggtagtgtggcgttcatgcatgcatgtggtgggattagttgcgttgatcttgtttttgagggcagcatgagatgctcctactcatctcggttcccttttggctttgagcatcttttctccttttctttttcaaatggtttgggaattcagctgctctttactgactcatcaccgcacgccaactttgattttttttttcgtactacatcagtcaaatttttgtaagcgagtgtcacacttcagttgatgcgtgaatcgacagaatctgttgctcttggtattgtgaagcaggcaagcagccatggcacatggcagtgactaaagttcagtcttgacttccagtgctcgaactgctctagcaactttcagaaaacctctcaaactgaaaaaaatgtacatcctcttggctcttctccttagtattttttccgcgaacatgcaaaagacttgcatatctctgtacgctctttagtaatagaaaatagaacgttcacaagatacaaatgatgaaattattcaagatcctttaggccttgttcggttaatctccatgagggagggattggagggaatttatcaattttgctatatatttgtcgacaaattttaccccaaaaatttgacagatgtaattacagtacaatcgtagtgtaattacattgtaacttgcatgtaattacactgtaactatagtgtaacttgtatgtaactttcaaaaatctctccgtaacatgttatttcgataaaatggaggttgtgggaataaattctttcgcatatgtgtgtgctatgatttgttttcttcatcaccaaaataaatcttgtaatagatctaacgattcaaaattatgtgaaacttacatataagttacactgtagttacatgcaagttacagtgtaattacatataagttacagtgtaattacactacgattgtactataattacatctgtcaaatttttaggagaaaatttatcgacaaatgtataggtggtcccgaatttattccacacctaatatggtgtggaattatttcccttcaatcctctccaatctccttcgatccctccaaaccaaacaaggacttattgatatttttcagcgaggtatatgtgctggattaggcatgggccaagagtattgttgggcttctgaatgggttttgtggcccacgttcagtccctatgtgtgctagaaactatatgggcccgcgtaacagtgacatacgagtgtgggcagctgttgggcccacgttcaggtccatagtatccaacggccacatgaaatctggcccataaaatggccatattgatcgagctagtggataggaggccaattgggcgtcccagcccaacacggcacgggcccgctaagacacggcaactgtagcgggccgtgccttgctggtccgtcggtgccagcccatgggctaaacctctgccgccggctcttgccccttaccgggcttctgttgcatcgctgggttgggacgcggatctgcttgttcatctcatagatgagacgagatgagatgagccttcaccgattgatggttttgagagaagtccttgagagcgtttctgaataatggatggaatttctgagcaccaaacgggttttgactggcgtcctgcgatatcaaatgctaagatttctggagaagctagctgcaatcatcccatttgttaagatgagaagatcaattgataatgacacctgtgtagatgatcaattgataatgtctcgttgcacatttgcaactttcagaaaaattcagagtccaggccatgccatcctactccatccgtttcaggttataaaatatttttgactttagtcaaaatcaaactattttaagtttgaccaagtttatagaacaaaatagtactcccttcgtctcataatatagcaacctagtactggtctactggatgtgacatttcatagtacaataaatctagacaccatcctatctatccagattcgttgtactatgaaatatccaattggtactaggttgttatattatgggacggagggagtaatatttttgacccaagataaatttattataaaaatatatttaattattaatttctataaacttagtcaaatttaaagcagtttgactttgaccaaagtaaaaatatcttataacctgaaacggagagggtacttttcagtgattcagtccatccaagatgagagggcaagacctacaattagttgcatctttatgtttctgaatctggtttgcttcaaaattttctcactgtcggactaacacatatgtatgttcagaaatttcagattcagtgctgcagcgccgcagactgaattttcacggctcattttgactgaaactagggtgaaatgaaacaaagtcaacacctgggcacttcaagcaaagataagtcttgttccttcccatgaattcaattgaaatagctacaagtaaagcaccctgtgctgtgataatttcctatgaaatttcactagtagaatggagtgtagtacagataaactactcatgactcatcctttctgcatccattctactagtgtttgtagtttatctgtactacactccattcctatgaaatttcactctgtagtgttcgtaattcttcactcttcccaagcttctcggtaagtaacttgttgactgaaaacaaaaaaaaaatgctagagaatcagtcgatgagcaggcaagagcttgggaattaggaggaaatgctgccatgctttcgttggccgtagcaatttcttgactagattcttgtactaggaagctgctcgctagcgtaatcacaaagacacgacttgacctcgtacttaaggaatactactactaaacctacttcaagtaccaatcttccaatacattaactcaagatatcatcagaatctttggtactcaactcgtgcaagtggctggattttgaccagatggtcggttgctgtttgccaatttccttggctcttcttgctgatgcgcaagttaggccaaactaggatctatctatctgtctgtctacttatttatggctaattcttttttcctgatcagaaacgatccacctcgagatcttgtcaataatttgcagccgcaatatctccaacgaggttagcaccaacaaaataacaatatcatctcctatgctagtgacattattccattgatttgccacctcgagaaacaaaaagttgtgacaaccctgaaaagaagaaaacaactgcagaaaaggatctccactccaccttatctctgaagatcatatttcccaatcctatgatccatttctttattcctgcatctctctctttccttccttttgtcgacgacaggttgccgtcgactctgcaccagcaacggtgggggcatgcaggcaccgcaccgacgacggcgatcgaagaggccaagaggcaaagttttgcagtgattttggtgagtttcaagcatgcaaaccaagcagcagcagagagattcagttgggagccacctaggcatgccatgcatctttctttgcaaaggttgagacccagcagcagtgcagcgtgcttgacatctccttgtgtttttctcctcatcatggaccacttatcctatcgagatccacatatcctggcctagattcgaccacatcccatccatctcccttttcccttcctatgcagctccagagacctgcagtagacagactctgcgtagcatatggcatgatttctgcatatccattatcttgctaggcctagagatcttaacagttgggccattattgatgcaaagaaagctggtgctttgcttctttgtggagtagctgtagttcactgttgtgtttgagttcttagcatgcaaagcaagcataagtgaccagcatgtcctgacagtaaaaaaaaaaagaagaaagaaactgaattctgcatgattcttcactggctttcattctctgctgttagaagcaagcataagtctggaatgaatgcatgatgacaagagagattgttgtgttttttacgagagtggcatgaatggattggctgggaccaatggtcacaaggacatgaaggggaagggtccaattattgaagcactggaagaagctcagagccacacaagaagatgtcccagctgcctcctgtgacaggaacaggaaacaaactagacttatgaacaagatggagacccttcatgatctctgcatcaatatactccaattttgcaaccgtacaatacagacaggctactatctggttttcttttcaccaacttataccaaccaaccaaggcttaattaaacatgtctcggaaggtactgacattctcactgtattatataagactgctgaaagaaacgccacatgacccaaatacaaagttagcatgacaactacaacaacaacaacaacaaacaacccccgcaaaaaaaaaaaaaaaacaacaacaacaaacaacaacagcggcgacgaagaacagtagctgaagccgatccagattccttcggtggagaattgcgtctggatcacagcaccttgatggccgcctcgatcgcgcaatgaggaggcgcgatactgagctctagactgctgatggatgatgatgccatttccagtccagagatcatggagagcgacatgtcctcggcggcctttaatctcttcacatattcagttagttcatcaacctgacagaaggatcagtttgtgttagttttggtcagactgttgctgggttccatgaagatgttctcagatgctgattttacctgcacgctatcgcctctaaagcctctagcaactggatagcttagtatctgcagcaatattaaagattcagtcttcagataggattgtttgtctcaagttacaaccagtaatcatctaagggtaattacaactcagcttgtggctacaaagaagaaaaaatggaagcaaagtagaaaattaccgggacatcgccgcgatctgtatgaattatatcctgggtaggaggcttagttccaacactctgaggacttggaagctgcaacagaaggtttcagacaagagcattagctgcaagatcccaacatgcgtggatctgatcaaagaagtgcactgtcactgacctgatcatcactgcactcagcaacaacatcaaagaggctggcccggcgcttctttttgccagggttggtctgccggaggaagtacttctgggcgtggctggccacctgagtcgccgtcctgctggtcacaaagttcttggagatgcctctccagtcccctttccccagctgcctcagcccttccaggaatttcttgtgctcctcctcagtccatggtaccccttcacagattaatcaatcaaaggcaattaagtgtcacatgatcttcacaggaagcaacaaacagggaataattaattactcctaactagtaaaaagtttttcaggtctgagaacctgcttgtggattgttatcgatgtgttgttgaccaattgactgacacacaaaaggttaatcatttttctctctcttttggaagaggggattttcaaccaattttgttggttgctcaatcaaagatattttttttgttttttttttgctttcacggatcatcaaattgcgtcaagaattaacagtgagttggaagtttcagagtaaaaaaaaaggaatcaggtgatggaacaagtaatgaacagtagatacaagaacagacaaaaagggtggttgctcacctttcttcctctcctgcaccttgcggcggcggcgcttctgctggccggaggcgagctcggagtcgtcggaggcgcgccgtttgccgccgtcggccggcaccggcagcgggtcgatggaggtgaggttgggcatactggagctcttcttgatgaacaatccaccctccacctcctcctcctcgtactcctcctcgtcaactccgccgccgccgccgcggacctcgacgccgaacagccggaatatcaccggcggcgaaggcttcctctccgctgcctcctcatgctgctccatctcgatcggtggccggtcgctgcgtggtcgcttttggtggtgagaatgagatgaaaatggcgggtatcgtcgccgcgatgaaaaggggggattattattgttgggctctcgacggtttggaggagactactgctcccactcctcttctctgtttatttatagagggggtttatttttcttataaaatgcatatgtatttgaaaagaataataataaaaaattaaattattttaacagcaaaaaaggacgaaaattttagtccttttgttggtactccctcagttttgacttattttactagtcaaatttcttttaactttatcaattttatagaaaagtttagcaatttctacaacacaaaattagtttcattaaaactaacatttattatgcagtaaaatatatggagggtcatttaacttgtttatgtgtgtcgtgtatatcattctactttcaaaatacacatttagattactaatatgagttaagtaaatcatttgattatcaaactatccacgtgagcgcatcttgtacatatggtatgtcacctacgattgaaaaaaacacttttggaaatatgaaaaaaaaaacgtgtgtgtatttttccctttctcacagcactaacatttagaaatacacaaaattagaggaacacaatcatttcacttctacctgttattatgtttgttttgtgttgaaaaatattactaaatttttatataaattagttaaatttaaagtagtcaaaataactagcactataaaacggagggagtattaaattgttaattgacgaatcagatggtttccctgcaactacaggactcgttgacctcatctctggcatgcccaaggctaaagggaagagatgccatccctctcatttccctgtcttccagtgacgtcggtacttacgtctaaaatcttcttgaaatgctcagagaaaaaaagatctccttggttgtgcctgtggtagcatatcgaactaaatctaattgttggcaggagttttcgcgtcaatttcttggcaacgatcagagactgaacctggctacgtgtacatgtatagtgtcagtaactcagaatcttctcttctttttttttttcagggcatcattgtgtcattgcctgggtagccacactggacagaaagaacattgcaattgcgacaaaaaaagaaagaaataactgtttgccagttgggttgcaatttgcctgcagcttcgaatattccacgtgttgatcgatgaacaacagattcagatattcagatcgtacattcgtacgtacgcaggtacgttcattcgtttctgttcagcattactatatatctcgtcgatcgatgaatgaattattagctcatggttgcatatatatgtgggcataaatatctctcatcacattggaaatatcttgcattgctagctagcccttgaatgtatcgatcgatgatggcataggcataacgtatggtcgagaatactccctccgtttcaaaatgtttgacaccgttgactttttagcacttgtttgaccattcgtcttattcaaaaaattttgtgaaatatgtaaaactatatgtgtacatgaaagtatatttaacaatgaatcaaatgatatgaaaagaataaataattacttaaattttttaaataagacgaatggtcaaacacatactaaaaagtcaacagtgtcaaacattttgaaacggagggagtatataggtatagcaggacaatcgagcagctagctagcatacagatatcagtagtatttttcctcttgcatccttttctttttctgaagaagaatagatatcatcatcgacttgtttgtctttttttttttgaaacttcatcgacttgtttgtcaatggaatgcacagcaacatgcatcgatcgtcaaatccgtagtttcgtaaccaatcatcaaattaatcaaatcatgcatcgatgtgcaattgtgtatagttactccatttacgaggtagtactccaattaggactagtagtgcttttaactgtttttatcttcgttatgagtcatgaccgtggataagttcaattcacattttaaatcgatggattttcatcggtctctcctcgaggtgacaaattatgagcaaattgcagacgagagaagctagggtcttttgacagagagtgaaaaacggcaaccctggaattctcattttctcctcgtatttgtcaacctcccggtttttctacctcgtatggtatcacctatccaaacctccttaattttttactcagtagtagatagatagatgatcttagtaactgaagtggatttactgacttaactctagtgtttactcttgttcgtctgaaactaggaatatcatacagccgccgcagtacaaaactgagttaaaaaacgcacgcctacgtagaacaaaactgcactggtaaagtgggccacttgaatagataaagaaatggcccagctagtcctaatgactgaacgggaaagtccatttgacgtccctcaactatggtttgtctaggttagtccactattacagcccacaatgccttctttgaactgggctggtctttacattctccaaacacaaaaaactagtgaaagtttcgaagttgggggtatgtttttttagataatagttagggatatgttttagctgaatgaatggtgattgatactccaaaattgtatgtgctgtggtcatgacttggacaaattcgaggttgcttaaaaaaagacagggaaaatcagtgtttggcagaaatagtgtgaattcaagactcaggccttgtttagttcgcgaaaaaaaaaattttgggtgttacatcggacgtttgaccggatgtcggaaggggttttcagatacgaatgaaaaaaactaatttcataactcgcctggaaaccaagagacgaatttattaaacctaattaatctgttattagcatatgtgggttactgtagcatttatgggtaatcatggactaattaggctcaaaagattcatctcgcgattttcatgcaaactgtgcaattagtttttcattttatctatatttaatgctccatgcatgtgtccgaagattcgatgtgatgtttttcggaaaaaaattttgggaactaaacaaggcctcaatagatacttatggaggatcttttgagtggcttgcgtttctgcaatgttgttggacggtcgaccttctgctaaagtgtggtatcgacagtcactcgacattgcctcctctgcacccaataacagaagacggcgaaccacatccatcttaactatgttttttcttgccaagtatggtaccatgttctgtctcctcctggttggcccgacctcgctcttttctgtggttgttctctctaggtttggtgaccgtctgctagggctcgtttacctgagtatcttcgcaagggcttcgactctttggtcctcctggtctcctgacaactgtggaatgagcagaactttagagtattcgatcgctcactctcttcggttttcaatggtgctagagtctatcctccaggaaggccgtatgtggtcatctgctggaactgctgcttttgaggacttttgctaggagtttagtgggactccgccctctaggagtttttcatcttttttaagttgtctataagttgtcttttcttttcggttttttatttctcgtcccccgacaataacactttagttgtttgtgttatgtaattaaaacgttgttttcttctaatatattgtcgtgtaacttttttctatgttggggaaaatacttacataggatgatggtgtaatagtatgtttcctgtttcacgatttaggtcggcatgcgatgcgatgcgactcagtgactaaactttacttcgacttgacttgacttagtttacgaccttgtatttcccagtcttggacggtgatctccattgcttttgtgattttgcttaatcattttttaagttggcttttcaaaagggctccaataagtgaggtaaattagtcagacttaatgacacaaatttccgtagcctgacaaagtacacacatacacagtacacgctcgtatgcacacatgatgcacatgtcgcgcgcgctgcctcgccacgccacgccgcgccgcgcggcttataagccagacaccggcgcgcgcgccctcgccactcgcgagcttctactgctgtctctgagatactgtcagtgcactgtctgtgcgttcccggccatgtccgccgccgcggtcaccgccacgccgcgccacgcccggccgtctcctctcaacccgaacgccagggccgcggcggcggcggccgccgcggcgccgccgaacgccgtgtccaccaccaggacgcacctcgccaacctcgaccgcctcctcgtccggccgccgccgctccccctgccgctccagaacaagggggcgccgccggccgatgacctcggcgacggcggcggcgccgccaccaccgacgaccggagcggccgctgcgggctgctcaacgcgctcaacctgtccacgttcctgcccttcgtccgcaagccggccgtcgacgagatgtcgccgcgcagcctcgcgcacctgcagcgcctcctcacgctgtcgccgcggccctcgccgaaaggctccatcgccggcgagtggcggaggtatcacagcgagggcggctgggacgggctgctcgacccgctcgaccagaacctccgccgcgaggtcctccgctacggcgacttcgtgcaggccgcgtacacggcgttccactccatgccgtcgtcgtcgtcggcggcggcgtcgcagcacagccagcaccggacgctcgtgctccccgaccggtcgtaccggccgacgcgcagcctgttcgccacgtcgtcgctgtccatcccggcgtgggcgcggcggcggtcggcgcccgggtggctcacgcagcgctccagcttcgtcggctacgtcgccgtctgcgacaacgagggcgaggtccagcgcatgggccgccgggacatcgccatcgtcctgcgcggcacggcgacgtgccccgagtgggcggagaacctccgcgccggcctcgtgccggtcgacgacgacgacgacgacgacgtcggctcgccgcagaacgcgccgaaggtggcgaaggggttcttgagcctgtacaagacggccggcgaccacgtccccagcctctccgacgccatagtcgacgaggtgaggcgcctcgtcgaggtcttcgagggggaggagctgagcatcacggtggtgggacacagcctcggcgcgtcgctcgccgtcctcgccgccgacgagctcagcgcttgcctgtccgcggacgtggctgaacatcgccggcggccaccgccgatcgccgtggtgtccttcggcggcccgaagaccgggaaccgcgcgttcgccgaccgcctccagaacggccgcggcgtgaacgtgctccgcgtggtgaacgccggcgacgtggtgacgcgggtgccggcgccggcgatggcgcgggagggggaggggcacgtgcacgccggcgcggagctgaggctggacagccgcgactcgccgtgcctccgcccggacgccgggccggcgtgctgccacgacctggaggcgtacctccacctgctcgacggcttcgccggctccggccggccgttccgcgccgacgcgagccgcagcgtggcgcggctgctgacctaccagcgtcccaacgtgaggggcgcctacgtcgagcgcgccagggtgctcggcttcgagccggcgacgccgcggaccgccaccgccaacggcgccggcggcggagccgaggggcattacggctacttggctagcccaacatgatcgttgcgtactactaccactgtagcatgcatgcattgtcgtgtaccaccttaattgttataggagtaaattgtatcgatagtacaagaacttgttatgtgggtgcaatctaatgtatggacttgtaaaatgcttgttttgatacgtgaacttttcttgctcatatgaattaaagtcaaaaggacattatataactaatttgttgatttagatgctgattaggatactacgtagagacatacacttgttcaataaaaagatagaatgatatatagtgatcgtagagaaagatataaaataccgagcaatgattcatgggttagaaacatatgaaattcaagataaagtagagaacaaatttataaatataacatattttatgcatactcactattcgtatggacgccacatcctaatcaacatcagctaggtaaaattaaccttgctaagccattttagacctagatcacacgtattagataagttcgtgtaaaaaaagaacattttacaagttcatatactaaattgcacacacctaacaagtttatataccaccaatgtaatttactcgggaatggtatttaactcgtaattgagatgtatctgcacgtgtttcttgatgtgcattaattctactgcatatatgatcaagaggtgatgcggttgagtcaacttaacggtgaactttttttgagaactaacgatgaacttgttggtgtagtcgtacgttatgcgtatgctttttggtggcaaattaggtggtcgttatcaaatgactggtttctggacattacgaaatctgtcaaccatcagtggcaaagctatatagtgtttggggtacacatgaaccccccaattcctaatttctcacttaaaaagactaaaatatatagtgttgtattaaaattttctatattctcaatggtagtgcaccctcttattttgatgctagcttcgcccctgtcaaccactcatgatcgtgcatcattgggtgcatatgtgcatcatcaggcacaagcatatgtgacatacagtaccgatttgatgcttgaactactgaagttcgtacctcaaataccattattattatttagacaagagctccaggactatttgttactccctctataaataaaaaacgaattccctgtcaggggcggatcccatgtgattcatgggtattcacctgaatacccatagaatttttaaaaaaataactatatataggtatgttatgcatatatacatgagaaattagaaggaagtacagcatgtatagcccaaatgaaaagaagcccatttattcgcagcagaccatacattcctccccatcttggcccaacgaataggcccactggcccaaaaacgaacaaaaccctagtccctatcccccggtcagctagtccccacgccttctgtcgtcccagccccaatccgccgcgcctccactcatccccaccgacgggcgacggggcatcgagagctcgacgctcggcggcgccggccgccggctcggcgcgtcgccagaatcgccaccagcctcatctccctggaccctggtccctgggcctgctgctgcggaggcggcgtggcctgcgacgacgccgccgcctcctcggggacgggcgacgctgagcagctgaggttcgcacggacggcggcggcgctgcggcgcacggcggcagccggttgcggcgacgcacccccgcgtcggcgcgtccccttggtccctagacagctggacagtggactggcactggtaaaataaatcctcttgtcaaattccccaagcgattggccattgcttaattgctattgcttagaagttaaattagtcagaaatttgaactgtaggtcttgaaatttgaaaaatgaagaagaagaagacaatagatttgaagtctttgtgggaaaggtcaaccaagtctcagaaagtagcttccacctctgatccaaaaccattaaccattgagagtgaagttcagatcccagaaaatgccccttctagtcctattcagctactacttgaagcacccaatgcctatgatagtgatatgtccccaagtgtgcagttggagatagacatcttgactattgtgctactgtttgtacctttaaggctttaaacatgtcattaccactcctgtatgattttcccagtccaattttttgagttctgtatgatttttttttcagctttgaataccctttgctcaaatcctggatccgccactgttccctgtgtccagatttatattcatgagctattcttttactacgatgaagagagtgccaaagaggttaagcaagcaatgtgcaaactttcgttcaaatgcttgagccgctgaaatccatgttggattcaccccccattcgtacaagataggtcatatattcacatgagtttcgtaacttcgttcagaggcttgtttctgaaaatccgtagaaagaaaatctactccatatatataatatgcatcactctttgaggaaaacaatacattccatccgtccaaaaacataactatttttggaatttagttttttttttccaaaatttaaaatatttcatcacctatttcatctcaactaatcataattttctcctatttaatgtcccgctacgttttcttatcaaccaataacaatctttcatcattttatttgacctactttttagatttatataaagtctctataaatacattttaagatatgataagtggatgtttctttctttttatatgtgtgtggggggtggctgaatgtaatatgggcaacaaggacagtgacaggagtggcaacatgcagggacaaaccggcctctctctaccacgttcacagcgagaatgcaagtggatctgtggatgcatgcctcggtggcgtgcgtgtcaacagtggtcagtgtagtggatgacacattctttctccccttgcactgtcggagacgatatatatgattccatcagttaacttctctcaaatcaaaattttcgtttaaatattttaacttttattcaagttataacaaaagctgtacagttgtagattaaaaaaactataagtgatcatttccacatctattttatattctcactagctatttctccgaatccaaaactctccaaacaaatctagtttttctcaaacgtgtaattggaatgcacgtcaatatattaaaagaaaagaatatttgttacgcaatgcaatcagcccaaacaaaccttgtcgcacactatgctgctggatggatcacgcaaatgcaccttagtggtagtggagtagataagcagccaactatcaaaccgcaacgtgctcaatgctaacgacgtgctagcctatggcttattttaccttttagctctaataaaaataaaaaaatatatctaactgcttcagcagacacacctgcttgttgtcctgctgtggcttgcgttagatttgtaataatatagtttattatatggttgattgattaattaaattattagcagtcccttaaaaaataatgtagcagtacttgtgtagtacggactatgtatatattttgatgtcagtgtatgcatgtatgggagttgaaagaagcttagatttttaaaatgaagtcgtcatactgtgtaaatcatgttgtattaccgtaaccacttgccgttgcctcgggatataagtttactttagatccctcaatttatcattgaatctgaaatccgtcctgaaccgtactaccagatatgacgtgtccatcaactttcaaaaccaatacaaataagattccaaagcggtttcaacggtagtttcggctgacgtagtgctaaaccgggtccccttctccgccaaccttgtggctcctcggcatggagaaggatggcggtccatgggtggctgttggatgccgggaaggagaagaagcaagaaaggagaaaagagaaagaaaataaaaggaaggcgatacccactgcatttttttatttttaatcagacactcactgacatgtcgaccccatggtttttcttgactttaagtgccatgccaatgtcatgtaggcgccacatcagccgaaccaccatattgggatcttatttgtattggttttgaaagtctagggatgcgccatatgtattgcggttaggtataaattttagactcgacgacaaattaagggatccaatgtaaacttatttcttgtcttggtgaactactgggccaagatacccagtctgaccaaaaggcccatttacaggtcggcctgccttgtctcgctgcgttgcaattgaatacggcccaacatggaggccattactggcaggcctgctcgcggttcagcaaaacggcccattaaatactcggcccaattaatcttggtgagttcgaggctatcccattccggcccaaactgctggtgaattgctcctgggaatacggcccaaattgttcggccgcgcttagggccgtcggatcaagacggatggcctgcgatgctccacgtagtcgaccagccatcctccgccctcgtcgccgtttccgccaccgttcccggcgagctccgccgcctccttcgccgacgatctggtcttccatggccagcaagggaaattctgtagatctcaggatctctcaaccccccctcgaattcgtccaacccgagtggaaccgctcgctgagaggagagatcaagaggttggtggtggtgctctgctcggcggcgatggtatcctcctcctccccaacctgcttggtccacgccgcctccgatcgattccgcggagatatctatgggctttcctctcgcctccccgcgccgccacggcagcgcacactaggtcatcaacgggcggatcgctgggcgggatcagccgcccccatcgatctcgccatggcggcgaggcgagtcgtcagcaccctcactacgctgcgctgcgccacccacttctcgtctgacgaatctgccgtcatcggttgggattgggatttggtagtgcgattgttggtgttcgtttatgttcagggtgtgccatttcttcagtccttcgatacatggaagttcatgtgtgccaatgaatgtactgttaacagttttgctgcaggtccaatacatgttctctaccacgatgccgcaattcgtgtggatggtgattaagggcaatgctgaattgctgatgcatttcttgtttgaatttcagaaggcgattggagccggtgatcatttgcttggggttttacgtgaataagatgggccaatgtgctttggataacgcccttcagactcagactcttcagtggtaaggacattggttcaaacctatctaatgttttgtaattgatagaactgtccggtttgacaatagatttcaagcattagctcaaatatttatatttctgtagatttctgtagattacattgatctagctggctaatgatttgctcttgcatttcttgtccttgtttgcaacttgcatcctgattattaatttgtccttggtgaagtcttaagtgatgatcgtactgttaaaagtcaaaaactatatgctcatggatcttcccgactgtgccaccactccacggtagtggcacaaaaacacgagttatcatcaatcaaaacacctagtgcaactgagttagtctgcaaagccatgcgcatacatgtgttcctttggtttgatgaagtaatggagtaatcgaagtgttgaatgtgatgaacatctctctgtttaggtctcttgtcagaatgaagatctgttttttccccagcaaaccaacacctaaatggtgctgtgtgccaactgccgtaaggctcatccagtgctcgtcttttttgttacacacactatttcatggtcaacaaaaaccacaacaacaaccagctctcttgcagacgttgttcccagagaagattattttggctcttcttctacataggagtagtacgttgcaggcttgcagctgatgtctcttcttctttgatggttacaggtcaaaagctatttgtcatttctctggcttattcacagaaagcattcttccaactactgctgcaatgctgctgctactccactacaaacaaaactagggaaaaaagaagcaaggatgcatcatcagattgtgtgccatgatccaagccgaagctccatcgatccctacacgaagcagcagcaacaaacttgtagcacaccactaaactaaactctgatgactgacaaagtgaaatcggcgcatcaaagaacgagacacacaggtaagcaccacataccccctttgaccgatcttgcctcagctacaaaagacatgctcgcttggatcaaatctacaaaaaaaaatgcaacttcaatctctcttggatcaaatcatcaaaagacatgctcgcttctttcaagaaagaaagggaaaggaatctggtgatggtctcctttccccttttttttcacccttttctagaataaagggaatgttggttttgaacaagatgatccctaggaaggacagtttaggaggtaaagaatatgctactcatagcaatgacattgagtaagatagaatgctcaatgtatagaaactgaaacacaacgcaaagttctataggttaggtgcagagtaagtaagccacagcatcatgccattaaaatgtgccaatacataaggttaccgctccatccaaacaatgagtagatgagtactagagtagtactattgtatagtaataccttcgtgttgtacaatattaatagtagttggtttgaacaaattagaagatgtcctgaaaattcaggattagtccccattgagtgctcaaagactttgtcatgactatataatctcgagtactcgtagaaaatagagtttgtagactaaagtaaagtggtttagtcatctaatttgggtccacaatataaacaataatattagttcactcacatattcaactccaggaatttttgaagcaagagatatatctagctaaaaaaaacttgaagttggagttgccagtccatagagagaacaaatttgtgaatcactgcctcttatatatagttaaggtctcctttggagcgtatgattttcgaaggaatttcataggaactgaactgttttctaccaagaacccataaaaatcctgctttttaaaggattcccaaacctgtttggaacatgagaactgaaccatttcaagcgaaacccgctccaaaaccggtatagcatacccattccttaggcccacgacactgacagccgcagcttatcaaccaaaccctctagtactactgtacctgttcttcactaacggtaatataagcattgcaatcaaacagcaacatctaagcagccgaagcagaggaagaagacagcagcaacagcagcagcagcagttcttcggttcttcctctgttcctctgcagctcactcggattctctctctctcctctgcaaagcctgcaacgcctgctgctgctgctgcagtttggtttctctctccatctgcatcctgcagcttctgtcctttctccccaacctcttttgtccgttgcatttcacctccattaatccaagcacagagagaggagatgcatccgtcacgctcactgcacgccaagccgccaagaagccacggtcaccacgcgcgctcgcgctcccagctgcccaccgccatttctgcgcccaaccaagatttccagttccagttccagcttctccccaaggtgttccagttccacatggacgtcggcggcggcggcggcggtggtggtgaagggaagtcgtcggagaagaaggttcttgctcagctggagcaggtgaggctcagcattgcgtcgagcgaggacgaggaggacggggacgcgccgcccaggagctccttctccggggcgagccacccgccggagccggtggatgagatggatacggtgttcgttgccgtggatggccgggacaaggcggccaagccggtgatcatgtgggacgcgtcgccgccgcagagcggcgcggcgagcccgcacagcagcatcgacagctccggcgcggcggccacggtgacgagcatcgcgcccagctgcaccgtcaccagcctcagcgccaagaccagcgtcagcagcagcgcggccagcgacggcagcgggtggagcaacagcacggccggcgccggcagcgccgccggcggaggcttcggcgggaagccgcacaaggggggcgacccgaggtggaaggcgatcctcgcggcgcgagcccgggacgggccgctcgccatgggcaacttccgcctcctccggcgcctcgggtgcggcgacatcgggacggtgtacctgtccgagctcagcaacgtcgccgtcggcggcggcggcggcgcggcgagggcgtggttcgccatgaaggtgatggacaaggcgtcgctggagagccggcggaagctgagccgggcgcagacggagcgggagatcctccagctgctcgaccaccccttcctgcccaccctgtacgcgcacttcgagaccgacaggttcgcctgcctcgtcatggagttctgccccggcggcgacctccatgctctccggcagcgccagcccggcaagcacttccccgagcacgcggcgaggtaattttcactccactttaattccatctcttgctctaggctcctaatcttgataggattagcattcagcaagaaaccatactctgtttaaagtgacaagatcaggtatggcagttcagagctgtcactggagaaatctttcagtattgcagaaattttcttctctaaaaaattaatcttgccaagcctgaagctggaactgatgcatgattgacacattaacaaaatggcttagttttttttttcagcatttcaattgacattagtgtattaatagtatagtgaatggattatgctccgacttctcgagtggggcattttgcctgtctgctgctttttctatgttgtggaacaggatatctaaaattaacaaatctagcagaccacaaagcatgtgtcagttgtcatgctaaaggttgatagtagcattttccccactaacccattttgtgttcgaattaggtatctcaaacatagacatcttttccgatctgtccctgaattaacaaacatgattatcctacttgtttttcccaatatttctgatgtatcatgtaatcttcttcatgacgtttgtttgatccgccatattcttctcttcatcagctcatcttaaactgaagcatacgatttattcttttcttttccggggctttgcaggttctacgccgcggaggtgctcctcgcgctggagtatctccacatgctcggagtggtgtaccgagacctcaagccggagaacgtcctggtgagggacgacggccacatcatgctctccgacttcgacctctcgctccgctgcgccgtctcgccgacgctggtgatgtcgtcatccctgggctccgatcccaagaggggcaacaatgcgcagtcgtgcgccgcccagccagccgcctgcatccagccgacgtgcttcatgcccaagctgttcggcaagaaacccaagagcagccagccgaggcagaggtatcatcatcagcagcagcagcagctggccgccgcggcgttgccggaggtggtggtggagccgacgggggcgcggtcgatgtcgttcgtggggacgcacgagtacctggcgccggagatcatcaagggggaagggcacggcagcgcggtggactggtggacgttcggggtgttcctgcacgagctcatgtacggcaggacgccgttcaaggggcagacgaaccgggccacgctgttcaacgtcgtcggccagcagctccggttcccggaccacccgccgacgagcaacgccggcagggacctcatcagggggctgctcgccaaggagccgcaggggcggctcggcgtgaagcgcggcgcggcggagatcaagcagcaccccttcttcgacggcgtcaactgggcgctcatccggtgcagcaccccgcccggcgtgcccagggctgtcgagcccgtcgccgtcgccgcggcggtgccggcgacggtgatgtccaagccgccgccggtggacaccgtcgagatggcaatccacagcaattgcaacagcaccaacagcagcaaaagaatggcagggcctccagaggtagagtctggaggcaagtacctagactttgagttcttctagcaaggtgaatgcaaagatctgccaaatattgcatcaggcagctgagaaaatatgaagtttttaaccatatacttgttttagtttgagttgtaactgtagtcactagtcagtgagtcccatactttcaacatttgggcaaaaggcattatctgaatctgaccaaccagttgtactactgtgttttcccctctgctgttgcaattctatcacagatgaactagttagcacttagcacctataaatactccaatagtaggcttaatggagtagcaaaaagtttccatgtacagcatgttagtgacatgcataatcacacattagttcttgccatgattatatacaaaaatgttactatcttttacaagagcaagcatagatgttcttttacaagagcaagcatagatgtgggaagcattgcgtatcaaaatgtgaatgcccagagacacataagggcaatagattgtgaagaacaagagaaggaattatggagacacttcacaagtcatcacagcattagtagtacatcattagttagtaagcattagtaactctagattagtgggttacaggacgaggttatgggaggcggcggcggcggcggcggcgaggccgacgccggcgggagggttgcggtggcgggagagggtgcgcagctgcgcgcgctggcactcgaggttggagacgagatccaccctctcctcccgcggcagccgcacgcgcaccgccctcgggaactccacgaaccccttgatccccctcgcgatgtgcgggttctcgc

SEQ ID NO: 5970 - DNA, 43924 bp, Oryza sativa
  unsure (1)..(43924): unsure at all n locations
agttcttgatcctaataagttcatttgcttcattttctattttatcagcctgcagggaaaaaagtgggcaaaaaaccaattcaattcaaagctgtgttgccagacactcccaactttaaccacttagcaaaccatctacgaaaaaccccgacctgccctcgagctgctccagcaggtgactgaagtgaaatccggcaaagaggcatacccgtacgtgaacccttatcataaaaaagggcaagaaaatgagtataatgacttagcatactcaagacaaattccaaaatgaggttgatattagagtagtgataccttttcaccagctgcaagaataaatcctgccaagttgaatgcaaagcccaggcaatgagtaccaataggactttttaggcttagcattgtatcatataatgccatgcatggtgtaagctgcaacatcattgatgaatacagtttagaaagtcactcccccagaaaaaaatgcagtgtgcgacatagattagctaacagtaagttgacttggttagatatctcggttaactagttggaacattgaaacaaacatttgacatattgataaggtatacttgaggaacataggttttaaagtactcttgttatgctcagtgagcattgcgcacattgatttccagttgattttgaattccaataaactttctttccataccaggtctgatatatatcatctaaagtaaaacaattttccaaacaattgaaggatcatgttgtcataactttcccccgtcctagattatcatgactagagtggccctctttccaggataagtgttttgatccaatataaatagttagatacataagtttttgtatcggttttgtcaacatgtacaacactgaaaaataagatcatatattcggacaatcccaaacattctaacttacaaaccacaaagtagcactggaacgcaggaagccccttcaatgagctatacatgcggtgttagcaactgattagttcatcccagttttattaaacttttgaaataacaccccggttcaatttcttaaagtgacaatgctacttgaaaatcacaaaatcatggcctggcatatccacatatataaaaatagagtaaattgcgccagttgtacaaaaacttggcaggtgggtgcgatttagtgtaaaaacttgtaaaatgagcaaaccggtacataaacttaacaatcacgtgcattttgataaaaacactgttacataccaatgattcatcgtattttattggttgtattgtaaacatatataactgctagattaattgttggcaatgagaatgttttgcagtgctcatcaccgattttttttattagttggatcgctcagaaattttgttagttggcatgcacttagttttgataatcattatttttttccaattttaaatagtagattatttagtatgataaccaagcaaatgcaatacatctaaaaccttgttcagaactcaagatgatctaactggctgctttttctttacatagctgaaaaagtatggtttggaagagagatcttttaaccaaaatgcacgcactaaccaagttgttacacctgtataatcatttttcaaattcttgcactagatcgcacccacttaccaagtttgtgtactatagacgcaatttactcataaaaataagtggcataaaaaaaaggctaattgaagctaacacaaggtgtggtatgttaagttcttacatctcctcctggaccattaatgtatagaagaatctttttagtgttatcaacgctgtcaagatacaacatgctcgccaatacttggttactaaactcttcatctatactgtccccaatgaagataattcgttcgcgatactgcacatgaacaatttgaattagataaacattaatacagtcacacagatagaaatagatgcaccacttcaaggaagcatcatactccattaggcattgtgtagtcttactagagcattccatatatcaagccattgccaagttccttcaccaggtgttctgtaaggcacccgtggtgtaccaacaggcatcattgaaatgcgcgccctggtagccctcttgtttgataatctagcaaattttaatttgaagtgcaatgagataaaataagtgaacaaacaattcagacaaactacaccgacattattcagatattctttggctacctcaagcgctaacaaacatacatattattgttagaacaaaatattgcctataaacctgatgggtgttgaaaattggcttttgaaaattgcaaaattatccatcaacacagacaaatgcccagagctattagattttacaaaaagtatcctttcacatactaacaaacctacagacacttgcatgaaaagtgcgacgcataacaaaaaaaattgaactagcacaacaagcataatcagcacccagaatgaagagttgctgaactctgaagattgtgcagtatcacaatcccatttatccttcccacattataacacatacacgatgccccccaacatcaagttgagcatatcgatggctgcgcacttgtgacgtaccccagagagatcctccggttgacggcggtgtaaaacccggcggtgacattcgggcacgacgactccgacgagcctgcaccgcaatttccaaccccacaaacaccaaaaatcaaacaatcgacaacaatgaggacgaatccgacataaattcgagaattaatctttttagctcctcgctcacctagcttggtctgggccttcaacccgacgaagaccttggtgcccacgctgcaaaaaggggagagatattaaaatgaaaaaaaacgaagagcagaagttgcagggagggttagggttttgggggtttggggatcggagaaacggggaggagttagcgggaggcggctgacctgaaagatgagggcgcgctgcggcgccggcgcgcgggtggaagcaggaggagttcgccggcgccgccgcggacagcgccatcggagtgatggggaggagagcttagctcgcggggagtgactgacgcagtagtggataacgaagatgcgcgttgagattcgtgcgtcgctcgatcaccgtaggtgcagaaaaggaagcgtgctgtcgtttgtctcgtttctcaacagtgaatttcgtagttatatgctggttattttaggatgaaaacaaaataaatttcacatttgaatgttcgcattagagagaaatttatgtggtcaaaatgtaaaaaaaaaatcgattataagcataatacaggacgtgctggaggcagcagtaatctactcgtctactccatccgttcaatatgccataagtacatagaaaaaacataataatatgtataacaatcaaatggatttttattaaatctagtataaatatattttaatagtatgtttgtttccttttcaaaatattgatatatatttatataaatttggtttcacttagttaaagtgttttatgatacggaacaaaaggaatgccttattacaagttggcaaatataagatgtacagtcatttgacaacggaacaatatgaaaaccatgtttttcttttgagtcgtgaccaccatttatagtacgtttttactgaattttcacttcagatgttgagaaagaaaaccatgaacatttaaaggttattattacagtgcaattcaccttcacatccagtgatccaggcatccagcattgcatgagttctctcccatgtttcttttttttgtcaggactgaactaagttaaaactcaataaatatagcaaggccagatgtttgtcaactacactaaggtcagatgattcagtagttcttctctgaattctttgttaggtttcatgcaaaaaatactcaacgacctatgcaaagtacattaggcaacaaaatagaagtgttgtgccatcaggtaatttcatctcaatactgttctagcaagcctgaatagacattctataagctcaatttcctgcatgtagcgcgtccccttgtcaacaccaccctgtcaggcaaattaggcaagttcaggagaagagatcagccatgcaattcctatggaggatgcaacgtgatatgaacgtatcatcagaaataaacgataaatcaagcaccttttgctgctctgtcctaacaggtggacttgagcgccagagtttcagactgacaaagctagctccgctcgtgtttctatcggttttcttgtcgtccctgtcctttgcctctccttccaattttgcttttgtggaagcgaaccaattgagttcatcaaatgagttatcttgctccaaaaccttagtgccatcacattggaaatgattaacagaagcaagatagaacgttcatatacgttaatctgggagcaagaacttgtgtgcagagggaagaagccttgtatcagaaactgaataaattaccagcagggtaataccgacaacaagaacatgttcatagatgttcctgtaaaataaactggaaggaaatgaaaactgcatctgaacaatgttaccttgaggacaaaagcaactccaagtaggaaaccatcgtaagtatgtgtgtatctcttgtcttcatgcccccgtcttaataatttatccttgagaagaagtctacattccatcatgtgggcaattacggatggaacaatttgaaagaaatccttcatttcgtgaagtttattgctctggagcttctacaagcatacaagaaaagtatgctgtcagtgataaagaaataacaaatcttcggttggtatcctacgcagtggaccttaggaagcaactaggtgcgagcggatcttatccatcggattacaagtacacgatttagatttggtgggctgcatgagtgcacggttcacttaaactcaaaatggcttctcacttcttcaatattttctcgttttcacttcaaccactgactacccaagtgagccttcggctgctatgctccatggactaccaaataccagctagcactctggccataaccgctgattgcaaatacgacataacagcaagcatcaccctgaacttggaattcttgcatccactactagcattgacctgaactagtaaccatgcttttaacagtacaaaagtgcacactacacataatggaacttgtccagatttcaagtgtacagggtaaaagatggaacatcagttccctagtcgttgagaaacagatctccgacaccctagagctttggagtctcagagccaacgtgatagccaggcagaaaattcgctcctggtgttcgaggcttccctaaggaacagtctcatgtatatacctcttgtaaatccacccccatccctctccttctctctgtctctcttctctcttgtttctttctttctataaccttgtaatcttttaaaaaaaccctgtaaacttcatttctatcaatgaaatgactataaggtagagccagctctaccttcttacgtcaaaaaaaaaagaaaaagaaaaagaaacaatgttacaggtgaatgatgcaaataccaaaccacaggaaaaatcatatgaaagtttggagttattcccttgtataactgttccaaaacattgtccaaacaaatataaccacagacagaatgcgtcacaactaatgcggtaaaatttgcttgttaactggaatatcatattttcaattggcatggaggtagaatatactaaagaactaaagatagtacctttgaaaagttggttgctaatattgaaaatggctgaattctatcgtctgatggatcattgtttcttgtgcccatgtccaaaactttactaatttcaacaatgtcatcatcccaccccagcagcttgcaacttgtcgtgtatctcaagtcaaatttgggttttctcacatatctacgattgaaaagaaggtcctgctgatgaagaaaaacacacaataataacctctacagatgaagttttgtacatcataccgtgacatgttgttcaaataacgggtgcggccagccgtaagtaccatcatgagacctagtacgctacctattctagtaacagcagcttgtacttgttcaagcaagtctagagcatggtctccaagcccaagctttcctagggcaaatttcatgtctccttgggtagcaggatgggcatcggacactccagtgttctgttgtaaagctacaagagttgattaaatttggtagcttaaatagtgcttatgaaaaacacatgcatgtgttctgaacaggatgaagtgcctaaggacaaactgtgacaacttcagtgacagaaatagtatgttttaccctgtaaactacgagtaacacgttgcgaataatttggaacagtggtagtaaatattacctctgattgtttgaaatcccttaataaatcaatttcaatgttgctttgaagcaaagcatgaagatctacaaacatccggtttaagaaaacaaaaatggaatctatatatgcagaaattcgctgtaaattgcacatggcagctgaagatgcaatatgatccacacataaaactctcaagttttttcggccttggccacccagatcattctcaataaacatctgcatgaaataaaacattagaaaagatcagttcgaaaaaaggagggaaagagagggagggagtggggatgaggaaagagggggctggacattacattaattagaaaaatatcctaatcaagtatgttacatgctaatacatcagtgcaggtgcaaaatatgtgaaatctatctttttcacagactagataaaggggatttgtgggctatcatcattctggtcagaaatacgaaattatgacctccacaggaatccatatgaaccatgatcactaaagcatccaattttcagggtacaaggggcattagtacccacctgcttgacaatgttgtaggaatatgcctcactaaatgaatcaagattttccatggattgttttagatcaaaatcttgatccgcggtatccacagtaagatggaaatcttccagttcaacaccatatttcagctctcctagttgatgcatctctgcatacatctagaatatactcaacaccagtcataagaaagtatttggaaatatatttaagtttcatacagttcttatctatacatgaaaagtatggtgcataactgcgtaccctgttgtcatagttagacatcactgagtaagtatagaacgcagaatttagatggttctccacaagaaatttaatatcaacaaacttggaaggtagtctcaagggcttcattcttaagtaccacgaaagattacgaaccccagtctggccaacagtataagcacagatagtgtcaccataagaaaataaatggcacactgctcaattaatttagggaccattaatttaatgcacttcataacctttgttgggttcacaaagactgatccttttaagtgagtggaatgaacatggagtcggaggtctgtctcaatatctctacacagtggggcaacaacctcctacagagtaagatagaatgaagttaagtataccctccaaagagaacctgcaaaagctagaaaatgttttaaggcattgcccgtgccctgatttttttagtatgaatattctgcaagtgcatttgctactttttttttagaaacaacatagtagtagagtactgactttattttgcaaggaacggtgttgtacttatgctagtgacaaactgcttttataggattacaattacaccaaaaacaggccttcatttggttcttatacaaaatggaattgcctagcttgtccacaccacaaaattacaacagtacacgagcaaaagaaccttggtccatacctttcgcagagcattctcaatttcttcctcatagtgctgaagagtaacagttcccacattcccaagtgtaagaagtgacattccatcagaaaatgcatcaatgatgttcctgtcaactcaaaataatgaatgccaagaaaaaccagtgataatggagatttctcaaaaaggttgaacaagtaaaaaaaaatcttttgatgttcggttcaaacttatgttcagctatcaattacgagaattaattccatgactggaacaactatcatccaacattccaacttatgttgtaaaatcaaacaagaacattagggcatcatcttcatgattatctgtacttactgtagccaagataatttgcaggcatctccatataccattgataaccaagtcacaagcatctcttttctccaatacaaaaagctgcagttcgtcctttcatcaatcagagaccagaaattcgaaagaatgctgaacttcgatataagctttctcacaccaaccaactcaatatccaagtaaccctgtttcatggctaagacattagtgtcacaaacatcagagaaatcaggctatgcattaaataacaccagcaataaagaaacacataatagcatttactgaagttcaagagaagtctgcaatcaaatcgttttacaagaactctaaaagattagttcgcaatctgctccaacttcagactaaatggagatgtgcagatgtaaattctacatatcttaacaatatcccattttggttataatatgtgctagctccctaacttaattagttcatgtgctatacactgcactcgcataggaaccacaaaaggctaactgttttcccttggaacaccctctaaccagctaaaccaagatggtaataaaggttggatttgaatgtgtagtgtaccagactgtgcagaatatccattgtaatagaaagtgtcagttgcctctgagaactcccacctccttcaagcaattgcaaggacatcagaacctggagtaactcagagatgaacccatgagcaaactaaaatttgaaattggttccaaaatgaaaatcttcttcaaaacaaatggactacaaccaatttaataacttaaagggaaaaatgatgattttgacgtttgaatctgacaattagctgaaaaagggtccatgtcaatacttgagtacaaacacttgagtgcgtcaacactaaacaactactagtcccctaattaatcattaacaaacataagatgaatagctgcaggaaatatctcccaacttgttatattttcctagtaacaaacaattaaacatcataaacattttgaaacactttcctcttcaatcaagagataaccaggaacaggacaggctggttcatatcgcaatgattaggcagaggaaacagacaaaggaaaataatagatgcctttaatgtgaacaaatagataaaaataggacctcattgaacattacatttctgcatttgctgcaatcctcataccatgaaggcaaacaagcagcattacagactcgacaaaatttgcatgtttatctatatgggtaattgttccaagatgtattaccaacgaaagtgaatcaataagccttgtctccgtgtctgtaccacctaaaagtcaatggaattttatatcaggagtatcaaaaaggaaataaatgagcaaataagtgcattatatggtatacaaagaaagtatgtctggacgcgttctttatgttctatcacaaatttctggaacactaccaatcatcgcttcccatagtcattgtaaaaattgaaggatcaagtagcacgctaagaagaaattaagctatatatgatgatccgttatacccttttgttcaaactgaagaagactttttagttgaatatgtgtaccctaaacggcacaatgtttcaaacagctatagttctaaactgctacatctagagctaaacatctttcgatggacagaagttcacaatgcaaggctgaatgatgcttctcatttccatgtataagaagcttctgaaaatagtattgtatgattctttttcacagaacacataaaaagaattgcttcacataccacgtatcaatgaactaagaaatcctgtcttgactgcctgactccccttggctatttcattttgtaatttagtctgcttaacacaagcaaagcaataaggacaatcagcactgtaaaaacaaataaaaaaattgtatagttcaggcagttggtgaatggaccttcaatgatattatgagttgttcaatatcagattgaatgatgttgattatgtgaggaagactgcgcactaagctagaccctttcatgtggaacaagtctcctatggcctaatacaagagagttagtacgatgttaaataacagagccacttgatatttcaaggaaaagccttgttcaggaaaaaaaaattccaaggatatgttggtagctttctactaccttcaatgacacaatcatttggcaaagagacttggctttctcccttctcagtggaaccttccaacgaggcaatgatcatcacagaaattagtccatataattcataaaaaaaaaatactacgtagtacaaaaaggaggtagtggtacagatgttaaagtctctgaaaaagtaatgctcgaacaaataattacaaatactaagttctctgttggtagtataaaggttatagtgtaatagtatgtatgtgtcaaggctatttgttatattctagtggtaggctaggattagagctctcctcctcttttttattttcccattgggctctcacaatgttctctaatagaaccgtgtcttcctcaaatgttatcaagttggacaatcaacttagctacatacaaaaataaaattataaattgatgacagctccaagtaacaattgaagaaacaatgagcccaaattggtattgcgtgattcaaagcagggtaataaaatttaaatggataggtcacaggatccacatggtaatcagtaaagactgacaaggcaaaatataaagagtgcaaaaggaaaagtgagaagtgtaggtacctcaagatgcatatgcaagtcaagcattgataggacaagcatatgtattctatctgcaagcactactccctgcaccgaagagcaagcaaaaataaacatgggctacttaactcatcaggaaagtgtctgttatcttacatcgcaacaatcgatatgtatgtaaatgggaagcagttttggcccactcacccaaagtgttaactcttatcaacttacagaacagcaaaattatattcttcgtaaaggatcaaaaggcattcatgctcaacaatcatgcctcagaaatactaattaagccacataaaacacaaagaacttgatgaaagtaagaaaccattttgcaggtcaacaagggcagcaaagttcttctatcctctgtattttggaaatttagcggtctcaatggatttacatgacagcattaggaaagagtcaaaacacaaagcagaataaaagttagaatatgacctgcaaaatttgtttctggagatgtcgaacccactcttcagtcagcatctgcgactgaaaccatgaaagatcaaaacacataatctagtacagttcccagaaatgtaaaaaaattttaccgatggatgaatggctgactggaatgaaacagaccagcatgataacgaatcatttatggcttgaatatccctgcacatgacaaacaacacttacagtaaaactgaagtgcccgaaattatactgaacacttagcagaaagggccatttggaaggatgtcatgttgagatgacaggctaatgctaaattggtcctggcagaagagcaaaataggcaaggcatgtaacccatccaaatgttccctctctgatgattatctcccaaaatatacttatgtaagtcaatgagacatacagcttcaatatttaaatattccacaggtaaagaaaatagtaattgtagtggctaagaatgtcgagcgaaagggatcctgttaagattgatatgtaaagatgaccaaatagtcctaccttgaatgcatttcatttaaccgtgccagatagctattcttcatgataccaaaagcttcacaagcttccttaatgggtggcaacaaagaaagtgatggagagcaatgaaacctaattaagtcagatagcacaatacgctttccaccttcaacatagaccactggaaccaactgaaatatctccactaacaggttcattgatttcttatcaggagcttcacctaacaaaatatgaaatttcagaacattgtaaatcttagcaatcttattatgaggcacaatgataggttgacttgaattattggttaaaaaattaagctgaatagaaaggcaaaaggaatgtacaaataatagtgtatacagtatctaagacaagaagaattatttcacggagaaggcaaaataagaaatgcatgcaagaggactagaaaagaacatatataatggtattaataaccaagaacattcatcaagtaccagttgtcgttgtgaagaacaaaaaaaggcctagaagatggagtatagtccttcgatcaatggggagttccttcaaagaacctgaagtgtaaaaatcaatattggtcctattggataacataactaacaggcatttgaaacatacaagtaaatgtactgaactaaaaaaaattgcacgctgctcaccgatgcgttgaatgatctcagaactgctctcagagaagaaagaataaaatgtgtctaacagtttcttattagatctaacgagggttattgaagagcacaaaggtgaatcttcttgcaccaaccgctgacatagaaataaaaatacagtgacatgaacataagaataatttaagctatatgtttataaaagaaaataatgaaagaacatgaaggtgatgcagcaacactcacttggaagaagccaatgtcaaaaagtttctgtaagttgtgtacaacttgatcaaggaaatctacatcctcgaatgacatactaaatacatcgacctcagatttcaccttgtccagcatcctatgaggaaaccaaaggtcaattttctgaacatattgatgcatgatgataatgagttgcatgggtggatagcatatcatttgatattatattttctcaatggaccaagcaaaagtagaagactttggctatagcattaagaaaatacttcaatgatagctcaccaagatccacaacaatttttttaagctatccattgacacataactgaaacactttggagtcaatctttatctagatatcttaagaaattttacctgttttataacaattaatactccgtattttaactttcaagacaccaattataagtgtttaatgaatgttaaaagacaccacttatcagtgttggtaagttatggatggttctttgaacatattgtccattgaaaaattatatccccaccgagaaactaaaagatgtgctttcagtgttacatatgtaattaatactcccaggctgcatgtgtagaatgacccagaccaaatgaacctaataaactagagaccattaataccttgagaatagagataggtaactcctggtattgccattgtgcctcaaaatttcatctaccaaaaggaacaccataagcccctcgccaagtgatccaaatacggttgtcaaatctaaacccttaaatgagttcaatggacgcacattcttgtcacggactgagcagattgcgtccagctgccggagcaggttcccaaggatcatcaccagcccattgatgatttcatacacctcaagtaacaatggaattgagtgtgcaaatgtcttttgtggctccccctccagaagtgcctcatttggtccctctgcagtgtgcccaaagaggagcagttgccgatagagattacttgacgcctagaaaagaaatggaaaataaggtagcaatcacatactgtatttatcgcttgcattccttgcatgtgttcaacattgtaacaataacatttcaaaaggaaaaggtaataaagcagcaatcacccatcatttatggcttgcatttgacatcatttagatagtggatatttcattaagcacttgcaatcatttcagaaagtaacatttctcatttgacgcatttgaattgactttgcatcctagtatcgccactgatactaaattgactacaaaattactccaaaagtgagtcccataattgaatagcaaaaatcaaagatcatggaacataatcgacaagaagtaatcctacacaagcttaaaattgagtaacacgtcacatttaaattcgagataaacggatcaactttagcgcgcttacagcatcagagaggcgggatatctcaaggcacgagtgggagagcacggcaacgaacttggagacgtcgacgttgtcctcggccgccgccgcggcggtcaagagggacgcggcgcccacaccgacgccggggtcggtgggggccacccggagcctgaccgaggcggaggacaccgaggtggacgcggagcggggcccgatctcggcgacggccgcgcggcaccggaaccgccactcgtcgacgtgccgccgcagcttctcctgctgctcgagtaagactgccgccgggagcaagagcaggcagagttaggggagtgagtccaaccgtggtacggagagagagagagggaggggaaccagcgaggtgcttacgtgacgccatcgccggcggcgagcggtggtcgccggccgtcgagcagatgccgcgaggggaggggaggggagtgtgaggaaatcttacatccaagcccctgcaatctccccaattcttcttctgctttgtgttttattcagatgaacccccaaaattacgagaaattgtaagcgtggctctatcctttgatgcgagtgggccgataaggcccgtgaattgtttgggctctttctcgaaatttccagccgattgggccgaaacaagtctcccgtcacggttgccacaggccatccagtttgtccgattgggtcccttttgagttttttttgttcacgtccctcaacctcaaaatcggattcaaagatccaaaaacttatgaaaccattgcaaaatgagtcccttaacggtttggatggcgttttcgtgctacgtgatgcttacgtggtgttgttgtcctggtctttaactgacatggcataggttatcgaaggcccaaagcccatcttgatttttaccaaaaaaagatcaaacgaaattacaaatgcaaagtcaaaatcgttcaaaaaaagaattttcgtttataatggtgctgtttgttgatgtaacagaaagtattgcatttgtttcatttttttttgtccgaactttgtctgaaccaaccttgaaatggacgatcacatgagaatgacctcggttacgtcaatagaataaaagtgaccgaggacgaaagaattgcggttgacctgagcagcatttttgacaaagttttgaccctaagttgttatgttgtttcattggcatctgtcagctttgattcttgcctttgagttgagaatcaacccaatatacatgcatggaacggtacgatcgagtattattagtttattacaataccttctaaatttttattttttctttttatttgaaaaggtaaaaaaacacaagcgctcataccacgcacacactcacacatattttttcaactctgatatcgtttgcttcgtgaagcacggatacagcaacttaattactaaacaaacagtgccaggtgtgcagtatttctagacaaagcaaaggcgcatttgtccaaaggaggggagattaattaacttaagctctctggatgatctgttcctgcttcctggacagaattctcttgccgattggaacaacctagctagcatttttcttttaaatttctatcagcattattcgttgtcaaaatcgtcatcttggtttggacgatcaaatgccacttcgcctccttctcgtacctgctaaattcgtgcacacacatggacaaatactaatagttataatttgccgaatgatttgcagcctaatactcgtagattagcttgggaagaaatcaaatgatgtgagctccaggaaatcatcggatttcttccccctcctccaagaaaatcaaagctaccactccgtacatcaagagacactgacatgtgggccctacagagaaaaaaaatctccgcgcgccaagtggccccacgccatcctagcttcctctcctcttgaaatagccgccgctgctcgtctcagttcgactcttcaggtggaagccacaaaacgaacgcgaactcgagcggcgaagaagaagagagagagagataaggcggcggcagcgagatggcggtgacgatccagtccgtgaaggcgaggcagatcttcgacagccgcgggaaccccacggtggaggtatacgcgagacattcattcgatcccctggaattggaatttcaaattttgttgcgtcgattcggttctgtttttgtatctatccggttcttgattttgaagcgctgagaagttttctgtttgtgttcaaatctggggtttgcgctgtgcgcaggtggacgtgggactcagcgatggcagcttcgcgaggggcgccgtgccgagcggtgcttccaccggtaagcagatggctgaggcactggctcttccattctgaagaacaatgggtgtttttttttgtagtgataattcgttatatgttaataccatttgatcttcgatttccaagaaacgcgtatcttcgatatcatcgaatggttggtcccaataattcttgggcatggcagtaatgaattggtgtgtgcgtggaaagagatgtttgcatagttatttagatgggacaggggattgatgatttttgaaaacactcaaacagtaatagtaacacgatcatctctgtctgtcaaggctgtgtattgaaattcattagctcatcgcccaaagcacttgcaatgtggaccgtaactgaaacaagagaaacctcttcagtttttgtttttttaagaaagttgaaatatcttcagtttgttataaacttatagagatgacaatattagcacgttattcaagcgctgatggtttccttcttaaagatcttagttcatgtgtttttttacgctgatcttagatttgtcgtttaccttggcaaaggtgtacttaaaattcattagatttttctgtttcctgctttgactgtaggaatatatgaggccttggagttaagagatggaggatccgactatcttggcaaaggtgtactcaaggttagcttattggctttccctcgaatgttaggactattttacaatctataaataacttgttcgtttatattgcattttgattgagcagatcatatttcagctgaacagttaacaatccaaagtctctgtaatttatgtttaagtaaggcagcgtgtacgaagataaccgtcatatgtttgtctatctcttgtgtgggtcacaaaattggttcaaaggaactatttggacctgcatttttcaatttgcaagtgcgagaaaatcattgaacttttgttggaaaaactgattgttaggtgttttctaccattttctaacaactgatggcacctatgtatgccaatcaagtaagtcctccatgtctaatggtgataatgtcctcttttggcaggctgtgagcaatgtaaacactattattgggccagcactcatcggaaaggtatgcatcccatactacatgattttattgatatcatacacacacacacacacacacacaacaaagaaaaaaaaaggatagctttcttaactaatggtgttttttgttgcaggatcccactgagcaagttgacattgataacttcatggttcaacagcttgatggaacctccaacaactggggctggtgcaaacaaaaggtattactccattacttgtgtagtaacaatgcttttggatctaattgcatcagacactgtactctttgcgctgacttcctttgatgtggtaaaaacaatgacagcttggagcaaatgctattcttgctgtttcacttgctgtgtgcaaagcaggagccatggtgaagaagattcccctttaccaggtctgttaaacaactgcatcggtatataactttgttcttctgaaacttcagaacctatgctaaaacatcaagaaattgcagcacattgcaaatcttgctggaaacaagactctcgtgctgcctgtacccgctttcaatgtgatcaatggaggatcccatgctggaaacaaacttgccatgcaggtaaaatattgcttgaataacaagaccatgtcgatgcatgattcagtcatattctctgctcatttagctgctgtacaggagttcatgatcctccctactggtgcatcctctttcaaggaggccatgaagatgggagttgaggtgtaccaccacttgaaggtgaaaaaaaaaaatcaaccttttcattttgtatctgaaacttcagaatgtgttatctgaacttctttatacagagtataatcaagaaaaagtatggccaagatgccacaaatgtgggggatgaaggtggctttgctcctaacattcaggtaatcctccataaatctctgcacggctttcaagtcaataaaacttcttagaatgtcccagtattttttaggcaaatctgacgggtttctcattatgaagtagtagaagtgtagaactgatcgtaaacataagcagttaacgtcacttaagatgttctgagaatatgagtaaagctaaactattcagatactatcaactaaacaacatctgtattagtaaaactaagtagctttatttaaaagttttgacaagagttttcaaatgttttaaataaggtggtggtattggttccgttcagaatactttattagagtagtagtacagcgagttggaccgtacgtacttgggccgtctacggctaatttcggccggatgtacacaaaccagcccaactaatatgagccaggaccgcaccctgttctgggcctagtggtatgggccgcataaacaccactgatcccattcaggtccaactaatatgggccgcaccatcacaccggaggaataagttcactttggctcccttaactattggccgaatctgatttatacccctaaaccacgataccggaatctcgttccagccgaagtagtatggactatggacaaaacattaatctgggccggatacgtggatctaacgatggatggtagtcggggcccactggtcagtctcatgtgtccaaaattgtgcgaccccttggatcttagtgaagcaatatttgcagttacttttcatttttgttgcatacatgaactgaaatattcatgtgcaggaaaacaaagagggcctcgaactgttgaaggccgcaatagctaaggctggctacacaggcaaagtaattcccttttttctcttaatttagctcataattcaagcatctctttgattgtatttgcgtgatcattatgattcatcaatatctattgatttcgtttatatggcaggtggtcataggaatggatgttgcagcttctgaattttacagtgaaaaggacaagacttacgatcttaacttcaaggaggatgtaagatcggcctgcaacttcttgtcaaatctttatctgcacatagttctttgtgttgttccatgaaactacaataagaaataaaactcagtgtgtattaacatgtcttaaatttcttgaccagaacaacgacggttcacacaaaatttcaggtgacagcctgaaagatgtgtacaagtcctttgtttctgagtaccctattgtgtcgatcgaagatccattcgatcaggatgactgggctacctatgccaagcttactgatgagattggacagcaagtgcagattgttggggatgaccttcttgttactaatcccacagtaagttacagttagttaattaattaattgctactaatctcagttagttctctcgaagtttatgttttaacaatgcaatacttgccttttacagagggttgccaaggcaattagtgaaaagacttgcaatgctcttctcttgaaggtattgtatgctgttcagagttgctagttcttttgctaggacattgaatgtagtgcaatattgattataccatctgtttatgctgtcaggtgaatcaaataggctcagttactgagagcattgaggctgttagaatgtccaagcgtgctggatggggagtgatggcaagccataggaggtaagagttgcaagttgtaactctttcagctgttttcattgtttgtaggatttgtttcatttaactatttttgtcatcttttcagtggtgagacagaggataccttcattgctgacctctcagttggtctgtctacggtatgggttttggttaaacttgaatttgattgttctgagtaccttcaatggtaataacatcatatcccacaattttgtttcagggtcaaattaagacaggagctccctgtcggtcagagcgtctggctaaatacaaccaggtaagcctcttgcctcaaacccaaattagtcattactacctcctttgcagccaaatacactttgaatctctgcttgttttcatggagccttactcactagccactactagtaattcatccgacaagaccattaaaatactccttttgctgtgtgattttgtaatctatagtggaagtgattatgtgtgtgaattaaattacatttcatttagcatggcttgatagtttaagcaggaatctatgatagaacactgggcaaagaacggcgatttgcaaacttgtcactaggtagtattatgtttcagcgggagtctgtttgcttgtcctggaaggagcatcattttttttttccagagaattattttagactttttttcccagaaaattcaatgaagaggttccacacaacactattgttttggtgatatatacaatttgtgtcgttgcttgcttgtggttgcagctgctcaggatagaagaagagctgggcgatgctgcagtttacgctggagaaaaattcagagcccctgtggagccgtactaaaccttggcaccttgcggtgatcttgtgcctatggaccatggtgccatcaatctactactgcgtttttacacgagtctacaagggcaataaaattagtacttcttgacagtcccagaaattgcttagttaccctcgctttttcgttaatggccagattgtttgcttactactgtgttgacacacttgagcaccaatatgtaagatcaataaaagagcaaatcgcttgatttttcatcataaagtatttttttccccactcaacaagttgaattcgttgtgctgacttgtgctgtgaagctcagagttggaagtgaaatggaattggtgttgccaagctgagagtgagattatttttggttttatagcaccgagagatcaccgtttagtaatgaaaaggctaatctgttgatgtagtggatagatagcttcagggttcaagttttcgacaaaaatcgatcaaaaactgtgaaattttgaggttttgacgtgggatggaagtagatcccgagtgaattttgaagcagatcctagttttcaagaatacaaatttgaagcagtaaatttgatcaaaatttggcaaaaaaagaagtcgtaccactaagggtcaggatccagcactcaatcggaaaggggatagcacgaagttcacacaaaatttcaggagcaagttcggataagagcattggacacatgctcagctctggggctgatagcacctggcatttcccttcgtgtttgcatttcagaccgacaacaaaagatgagaacatcaagtttagaggaaatgatcttgctaaacaaaaatcaaaccacacaaaatcaacataaaatcaaggccgttctgcagtgcaaggcaagacaacgcacgcacaacgacgaagttaatccctttgcccccacgagaactgatgcccagtagctcctaatttacatgttacatgcgacaataataggagcttcactataaatcggagaaaaaacagctccacaagccaacaatacttttggggcacaatgtttttcacttgtcttgcttctccagatgacctgcatttgacgaaaacaattttggtatcgattaataggactgcaacagggtgttcagcatgcaatgaggataatgttgtagtaatacctaactaatggttggaacttggaacgccaatatgagctaccatagtgttttttttttcattctactcatcctcctccaataatacagtccagatcatcctgaaggcaaaacatgcaaacaattggtagttataatctactctgtttgttgctgacttgcagtaaatatcaaatggttgtttgttgcttgtttaccaaaacaaggacaagaataggagaataatgagaccaactatcttaaaaaggcggcgtttcttctcccggccaagatgattaaatatttctgttacatctacaagatgttgtcgtcgctggtacctgcagcatgcaaagaccataaaaatgttcccagtcaagtcgacaaactgtttttgatttcttttaagtagcagacaagtataaaatcatcaacagaaaacctagacctatagagtggtgacagttcagggaaccttagctcaagtttatcactcatgtttctttctgaaaaaaactgctaaacctagctctatagaatggtgacagttctgggaaccttaactcatgtttcagtcatgtttctttcttcaaaaggaaaaaactaagtgacaagggatgatctgactacagttctaatggaaatatacaatacactgacaaagttcaagcccttgaaatttgcacttttgtgatacagccatatctcgctatagtgctgatactctgacaccagcatgttcacatctgttccattaatagcgcatgctgtttacatccgatattgaacatgataacatatatgttgattggttggaattaaagatttgcattcctggataatcaaataatagttaacaacaaaagttgagcaatatgctgccttctaaaaccatatttacccattaccttctaagtgattctaacttctaagacctcaattcaaaaccaacctaaaatcaggcaagaatctttaaccatgatgtcacatactacaccaatatgcttacaggaaaattacaatatttagtttctcagtagctccctgacatggttaaatctgactgtatgctattagatccaccctagttctctcagtcccatgttgttgttttttatcacgaacacaccaataacagtcaaatttcgtgatttcatcactacatcatcaaccacaagcaacaccatagcatggaaaacatgcaacgaacatgggtccgggtgggtgggaaggaattaattcatctgggacaaacattaaacagcacgagactgaataatctcaccatactagtacatggggtcccaagcatcaatatacaggtcgtctaagaatttagcatagcatctgctttgtaaattccctcttcttctttgttttttttttttgtaaataactttcttttatctaatctaatatatatagcacagtaggagcctctgcctctcctgctgtttttcgtcaaagaggaaaagggttggctaagaaaagatattcacaaagttaggaagggtatatagattgtgctttctataggactatgaaatatgatggttttgcagatgtttgtaggaactacttttcagttttcaggcattcttgtagatactgcatgcaggagccagcattatcccttcatttgttcaaatataagatataagaagttatacacctatattatcgatcataagaccacttaccctataaaacttagtacaacaagaggcacaaaaaagctacatagaaattcagagttatcaaataaagtaaaatcatggtccaaaacaagcatgcctgacacacatatcagaacttagtgcttcctgaatgcagataagaaaatacagtaagatattagaaggatgtctagtaagttacactaataaagatccagacgtgtgcagtattaaggtatatcaaaagtcagaaatcagggcaatgcaaaagtaggtcatataccatattatgtgtaaagtacaaaacttgttttctgaaggagaccaagaacttcactgaccattttaatctaaaattttctgaacaaacagcctaaacagctttataaaaggtatctcaaccttgaacacccatttccattttcaaattattgttttggttctcacataatagacatgaatgactgtaccatttctaactttcagttcatctgtttatactagtcatggcaaaataataacttaggacaaagaagacagcagtcccggacttttcatttggtccattttgcactataaaatgttttaaagactgaaaggcggatagaagacagcagcacttacagcgtatagttatagtacaccatcggggcagaaagtaagaacattgcccaatgccccgataggaggaataatacacttagagctgcttgcaatacgaattctggaataaccactttatttatccgggaggatgaatcgaatggattgatatagtcaaactccagatctgccaagcacatcagctgcaaaacaaaagaaaagggtagaactaaaacatcaggaaatgattctctaaaccaaattccacagccaaagggatgaataatgtaaccaaaattgtaagttactaaaccataatttactacacccaaacaagaacaaagggatatcgaccacggtgatcgcacattgaacagtatcgcgctagaacacgcaacatataaaagcaaaggaattcctcagcccttctcgactgaccaagaatacccaccaaaccccagcaatttggaatcatgagtcgctctaaccccccaaaatcattcgagaatttctcctcaatcgatccacaaatccgcagccctctccatccaaacgaaatcccgtacgggtcagacccggagacgggcggagataccgaggaggcggggggtagctagctatctccctccctccctcacctggtagatgacgagcacgatgagcgccacgacgaggaagaacgcggtgagccacacgaaaaccatctctccctggccctccacaggcggcggcggctcgctctgggggaggtggaggtggaggtggggggtgggcgttggcctcgccggaaccctaaccgaaataaccgtagcgccgcctactgcggcggccggcgaggcggtaaatcggagcggaatggaggggggaggggagaggcgagtggaccagtgcgatggacgcggcccacaagatgcagattctcttagaagcttgtcacaaaataaacggctctgattctcttagggtctcttttggcttgcagccacagtttaccacgtctaataagtactccatccatcttataatatactctctccgttttgttttatttgacaccgttgactttttagcacatgtttgaccgctcgtcttattcaaaaaatttaaataattattaattcttttcctatcatttgattcattgttaaatatacttttatgcatacgtatagttttacatattttacaaaagtttttgaataagacgaacggtcaaacgtgtgataaaaagtcaacgacgtcaaataaaacgaaacggagggagtagtaacctaataccaaataaaacgtatcataatactataaatctatatagggagcatgtccagattcatagtaatagattgctttattacgatacggagggagtatgcaaatttcttttcttttaacttcaaactacaacttacgcatttttcattattatcatacattttaaaatgttaaatggcggtacgtttctttaaatactttctatatacaagttattttcaaaagtcaaataaacctatttttaaagtttgtaataattaatacttaattatttatgtgctaatgatttaccctaattttacgtatggttgataagctaaatcaagtgaagatttgtcaacaactcagcaaagtgtaacaaaaattctcttaaatttgtcaagatgcggcaaagatttttagcacctaacattaagcaatgttagcaagtttttggtggaaaacggtgacaatactagtacctgaactaaatagaggcgagctgtaatacataatttttttgtgtaacatgaaccttagtatgatcgaatctgccaatcagtggcaaggtgggctgtttggttgactctgtcaaatggaattggataagctggaagcctggagtggtgttttttcttgccgttcactgaatgttcttgtttccaggaaactatattgagagtttcagacgttttacacgcattctgcattcatcgtttctcttatatgttaagactgtttgagcattcagcattcacagatcgcgtcccctccacgaaatgtaatataattaaagtgaatggcaccattaccctgtgaatgctgaaattaaattttaaccaaacatctaattttaacgtgaactaaacacaccattcacagctaaaattaaagtaaatggcaccattaccctattcctgttcgagtgtttgataagtatatactacacttgcatgatcatgagcagcttcagcttactagttatattgtagactgctctgacctctgagcctgacaaatcaggaacaactatattgttatattttaagagacggatcgagggagttacttcgaaaagaaaaggtcacaataattcagttcagtttcaggttttcagtctgttcagaaccctacgtacggcgcctacctgatcgaatcaatcaaagagagacgacaaagaaagccatgaaacaacacgtatcaccagctcccgtgttccacttccacgtgcgtgcggcagcgcaagaagcaaagcctactcctacgacacagcttctttcagatagaagcaagacgaggaagatatgtgttgggtccgtgcagaagtttcgttgatagctagccaactgttgcctgccacggatgctatgaatcgtactagcggactatatacatccaagaataacaatgatctcgcactaaaccaaaaaatgacataatgcatcaaaaactagttacttgatgtagtacatgggatcgtccaaaacgcgtctgatatgtacgatggacgatctttttaaacagactattacagtattatgtttctttgctttcatataaagctggatcaatcactcaatcatcaatgcaatgatatatccgttcttaaaaaagcttagactaactcaacagggtctccacgtcgtactcgaccttgtcccacttcgccggcgccgccgatgaggagccgacgtggcagtaccacagcgcggagccctccggcggctcgatgatgaccaccgtgaacccgccgccgtcggtgggatcgccggagagcgtgcagctcgaaccgtccgccggcggcgtccgcccgaacgacggcaggacgacgaccatcttgcgccgcccggcgccgccgccgccgccgttgctgctgcacctgcacagggcggtggcgagggtctccgcgtcgtaggtgatcacccagccgtcctgcgatgtcgcccacatccgcttcgtctcgccgccgccgccgccgtggaggacgtcgccgtggccgaggacgatcatgtacatctcctcctcctcctccggccacgacgccatatggtttcgcggtggcgcgttacgtacgtacgtgaattcgcgtggatggattcgagtttggtttagagagtttgtggtggttggcacgatcgatcgatcgatctagcgtacgtacgcgacagattatatttgcgctggtacgtacgtacgggaatcggtgttggactgccggtgatcacgaggatttcagaccggaagagggttagccgtgtccgtatgtgatttgcactgatctctcaaccgtgcgagcgcgtacgggatggagtcggagaccgataccgaaaataacttgagaccgaaactgaaatgatggagaccaaaattttcggttagaaatttgctcgggctttaattcaaataagaccgttgctttgaaatgtcacttttaaaattggatacatgtattacgagcatatatcttaaagagtgaggcctttcaataattttggaatgtatttagcacgaggtgttgtttcagttttagtttcagcaacacgaggaagcacaaaaacgcagccagtgcgtacgtacgaggtgaacatatgtaacttactaagttggccatgtgggacttaggggagagcggttacatcttctctcaccccctctttctctctctcaatcccaaagagaggtggatagagtggtggtgtttagtgtcggttgttagggttaagttttagacgatctcggttgtagttccatgatggcctagcggcggctggtcatgcttagcggcaactgattcggtactagtcttctcccgggtatatgtattgatgctgtcggtacttgggtggttttttttttcctgattacggcctcccacagttataattttattttttttcctattctattaatatgaacattgcacgtctggtgtgagtcgtaaaaaaaaaaggcgaacagtttcagtttcagcctcgatcgttctggggaatcaagagagagacagtgcatgttgcctagttctaccgcaacttaggtggtgtgtgaatccagggacttaactttagtctctgtatttagagactaatttagagattaatatagaatacttacaaaactaattacataattgaaagctaatttgtgagacaaattttttaagcctaattaatctataattagggaatgtttactgtagcatcacataggctaatcatggattaattaggctcaatagattcgtctcgcgaattagtccaagattatatatgtgttttattaatagtctacgtttaatatttataattagtgtttaaacatccgatgtgatagggacttaaaagttttagtcccatctaaacagggtattattatgtttttcctgcactccaacagctagcagtacaaacatgatcttcagaaaagaagagaaaaggaaaaaaaaaagtacaagttcagtctctccacggctctgaagatccatcaaagatgaacagtagaggcgacgtcgcgatgagctagccgacggcatgtcaagcacaacacgtatgatcacgagctcgtgatgcagcagctcgtgacgagcaggtgatcagttgcatgctctgctcgcttgaatcaattaaggtcgtgtttagttcacactgaaattttaaaatttagaagcttggttgaaattgatacgatgtgatagaaaagttgcgtgtgtataaaatgttcgatgtgatggaaaattggaagtttgacaaaaaaaaaatttggaactaaacaagtcctaagcagcagagcagaaagcagatgcttaacaaaaacgaaagcagattgaaaattaagcagcaggtgttctccgtgcgcaaaggaagaagttacgagagcccagatccaccagcttctcctccggccttagacctgccaagaatcgaatcagtccgcgatgaatttgctccaacaggtcagaacaaatcgaaattctcaagcttaatccatgaatgaatcgaaattttcaagccgactccatggcctcgtgctctgaagaaaccactctgtcacgatgacaatacgaaaatggagcttgaaaaataagagaaaaggcaatagaaagacgcactttcgagcgagtacttggagaaatgcagctcgaacccggccgccgcgtcgccgccgccgccggcggaagggagcggcgggcggcggccctcgcgcacgtacgcgtcgacggcggcgcggacgaggtcggccacggtgcagtccgcgccgatcacgacgtggacgggccacaggctctgctccaccgtcacgttcagcagcagccgcgtcagccgccgcctctgccccgccgccaccatcgccgccgcggcgccgtggctcgacgacatcgcctgcacggcgctcggcgccatggccgctctctcgccttggctgtgtgtgctctgtggcgtacgtgtgcttgcttgtgcggtgcacagcgttggtggtggtgagtacggacagagacggggaggaggatatgggggtaagatatatagcgtggaggaacaagatacttggcgggtaaaaagcagcagattgttaggcacgcgtgacgtttacagccacagcagccatagcttccggatatatcaaatatcactgcaaaatcaaagcataaacgcacaatccacgtgtgaaataagtgttcgtgtcaaattagtgcaaactactccctcctccgtttcaactttgatcaaactcaaattgttttaaatttaattaaagaaaataatatttttaactcaagacaaatttattatgaaaatatatttaattattgatttgatggaactaatttagtattataaatattactatatttatctataaatttagttaaatataaaacagtttaattttaactaaagttaaaacgctttgcaacctttagagggagtatatattttgattgagattaacccagttgtacgtagttcaggtcatcacagattaacagtagcagtagcagtagaaggaggagaggagagaggaagaagagagattgaccattgagagcaggtacaatagcaggctataagccagctgaaaacatattttaaggagataaatgaggagagagaagggcagcgggttacagatttgtagccagctgtagcacggactctaagacgcagcgtgtgtatgacatgtgggaccaggtattaatagtgtaatatgtaactattgtatgaatgagctattagattgactatagatgaattggagctagtagttggctatactattaaacttgctctgatgtgtggctgtgcgcagacgtggcacggatgcgccgcgcgcctgcgccgcatatgcagagggaacagcgggaggcaacacgtgggcgcttgtgcagacgtcagtcaggctagagcaagtcggaatccaggcggggcggcggaaaacgcctgaaccagttgcggccgcgccgaacgggcggctctcgtcgcgcgacgcgacggggacggtcgggagcattcgcatcttgtgcctcatcgagccgccaaggcacacatggactactctcacttctcgatcggattacttttgtcttaacatctatgaaatatatcgaaaatatgtacaccctacgataacttaaatatggtacaataataattatatttgatcaaagtagtatatcgaaaagcagaagaatattgatgagggttcacgacaaaaagtgccttaaaaataagggatcctaatatttttatatattttaatctatgttgatactattcaacgtgtttaaaggtctctttctattgcacttcttttcttttattgatttggctataatatgcttgttttctaagaccccgataaacatttgattgtagttatggtcaactcaaagagctacgagcttatgactcataactatgaaataaatgtacgtcccatgcatcaaagattacatcttttcacttagtaaaaaaataattcaacatattagaaaacctttatttttccaatatctacttagtagaaagccaacactaattcattctttcatttcttgacatcctcctgcgggacgacgatgagatggcgggaagggagatgcggtcgcctcgcgcgtgtcagtgagacgacaacatgacaacccacgtcttgccctgattcacaattacagtaagttgctgtcgcactatgcgtgtgggccacatcatgcacgacagcgcagtgctattgtgatttctggctcgctaccttttttttttaaaacacacaaacattgcacgttgttgctctcactgcgtgcatgtgcgaagtgttaaagtgggggggcgcaaaatgtaaggattgcggggtagacaattttataccttttttaggcggagctagaacgaaatagaagagggtgtctcttgtttaatttactctactttagatcaagtttaagttgatgcgtgcttttcagtttgtattgggagaggtgtacacatggtaaaaatcgataagttataaataaaaaaatttcttgaccgagtttatgggcaccctcctcccatactctacctccgcccgtgtctttttagataatagaaatggacgacgccttcagcctttgtctatgggcacacaaccaacaagtctcaaagtaaaaaaagaaagaaatttaaaaaaaagacgtgaaaggataacccccaactttcactaataaaaggatcaactgaaaaaacgttttcaaaatcacatggattttatacctacggtttagtttgttaggccactcattgttcagagctaggcttgcaggtaattttaccaacgagttaaacggtgtgcgggtgatcatccgatgtgtagggtttatgtctattagtagaccgatgtgtataagtattggattgtattttactttgttgataggttttttaacccatggggtctcaagtcactaggccctattgtcaattgtcaactctagctaagaatgtctcgtgtgtgtgatcatggaaactgaggcactcaatttggggcggtggctgtatacatgtagtacactttatccaatttcaatgtgacgttgaggtgcaaaattcttactgcaacccatcggcacaaagccacaaaactagttgttcgctttcgccacctctgatcgatgccaacctgaattgagaacaattgcttgatgccgggcatgcaaagcagaagacgcaagcctgcaggagagcacacacatccaaatgactcacaatataattctccactaatctccttgtacgtacaattgtcgtttgaacaccgaattattcagtgttaatttgaatcaaaggccaaacgtccgctgcaaagaacaaaatgaatcgcgggcttcacgatgaactcatgaacctcacgtgagttcatggatgccaagcgccgagcagatagtcccaaggattggaggcgccaggggttcggagaattattccccaaaccccagtttggttaacaggaaccgttcgatcgagaatgcgcggtcaaaagtcatgcggttagaaagagtgcggtgatgctggggcaggagggtttggagaataattctcctagcccgcgttgagtccatgaaatctgttggatcgtgatcgtgcggtcggtaggggtggacaaaatgcttggactcgtgagcaggctcgggtttagctcgagctcgcaaagctcggctcagcttgaaacctaaacgagccgagctcaagccgtatgcgcagctcgtttctaaatcgagccgagcccaagctggctcgttcaacttgtcaagcttttgcataaaaatggcctggcccattattgtcgctggtgtggcccaaggcccataaaaaacactaagggagcgttcggcaggaggagattgtgagtgagtttgtctcgtttcccgcgctcacgtttcccgaactactaaacggtgtgttttttgcaaaaagtttctatacgaaagttgctttaaaaatcatattaatccatttttgaaatttaaaataattaatactcaactaatcatactctaatagctcacctcgttttgcgtatcttcccaatcttctcaatctcctcccactcaaactcagccttagtccctaactattattttcctaatctcccacccaccccactcgtaggtgctatcttctccccttcccaccacgcgagtccgccaccgacgcctttcaacgagtccgctcgcctccttcaacgtgaagtcgtgccgcgaccgcatgagaaactgaggagggaggacgtcgaggcgctgcactgcgtcatctccttcctcccctgcggtacctcttccctccgctacaccgccggtccgccgcctccctcccctacggcgtcgcctccatccctgcgccgtcaggccaccatctccgtcccctgcgtggctacgccgcggccttgctcccctacggtgccgcttccatccccagcggccagcgccgccggtccaccacctccctcatctacggcatcgccggcctgccggctccgtcccagtgccgccggtccaccgcgtccctcccctatggcgtcgacgccatccatcgtctcgctgcttgtatctaaaccaagctagctcgagcttcgaaacgagccgaaccgagcggctattttacctcgtttcattaatcaagccaagccaaaccaagccgagcctgttctttgtcaagctttcacgaagccgacccctaaacaaggccataatcgcgagacaagtcaagcgggttcgttccgttccggagtcgggaagacaaaccgacgtgctttgagattcgaattggtcgcaactagcaatcgcattgtagggagagatataaagcatggaggtcctccccaacctcaattccgctcccaaccggattggaggattttagccctaaaaatcgcaagatcccacatcgaacccaaattccgaacctccaatcgaattcctccgattccccggcgacgcagaacccgatgctctgccaacaagcggtgccaatccaccgcgggcgcaggagcgcccggcggcggtggccgctggccgtccggcggccgccgtcgccggctgcccggctgcttccggagtcgtcctcaaccacagcaggtgcccttgacctccttcgctacgggcggaacttccgtcgagcctcgccgccgccgcgcccaccgtatgtgcatcccctctcctctctctctctcgctccttccttttcccgcgatttagttcgcttttgctatgcgtgtattgattttactgctagtctccacgtattgttatctctcgacgctatttgtgatttaagtacttcgattttctatgtgtgatttaggcagcgttcgttctgggagattggagatagattgcacatcgttttccgcgtgcacgcttccaaactattaaacggtgcgttttttgcaaaaaaaattctataagaaagttgctttaaaaaatcatattagtctatttttgaaatttaaaataattaatacttgattaatcatgcacctcgttttgcgtatcttcccaatcttctctatctcccctttctcaaacacagccttaggcaccgttcgttccagggtgtttggggagattgagtctcgttttccgcgcgcacgcttttcaaactactaaacggtgcgttttttgcaaaaaatttctataggaaagttgctttaaaaaaccatattaatccatttttgaaatttaaaatagttaatacttaattaatcatgagctaatggctcacctcgttttgcgtatctttccaatctcctcaatccccttcccctcaaacacacccttagtgtcgttcgggaggatagaacagtgtattttataagactgatagacagtatacgtcttctgtaagacttgcgatggattagtggaagtagcagtttgtgacactagattcttgggagtggagaggcaggacaggggggaaaagcgctgtttgctagcacaaacataaccggtgtattcatatgtgatttctagggattaatgtaacaaattggtaaagtctatatagtttttgacccctgctaacttggccactgcaaaatgatccttctgcaatatttatttagaatgaataaatatgttttgattgagatccttccagaataaaattatttctcttactcattgagcttgtttgctacaggttggtaaattctgctgagccttcgtctgcacaagtgctgcgagaaccagatgtttccttctctgtggggttgctcagtaatacagcatcgaaagaaccgataactgcacacacctcttcctcttcctctccacttactgtgcagcatgacgacactgaaacttcgacgccatcacagtgctgcctgtggtcatctcctgggtcatccattttggtcaggagacctcgtggttggtattttgtattctacatcaggatggatcctggggggtgtttccacatgtatcccgatgtgggttgtgggccatatcagagtctgtcagaagttgatgatgctataaaccaacatcttcatgacctgcggattccagaaatgtgaggcttcttaactttgttttatcttgttatctgtttatttgttgcaaactcttgtggttggatacttggatgtatttatttagggcagacagtaactgccttttatatttcggtgcatgtttcatctcatggagcttcaggttgatttaggatcatagtaataattaggacacacatatacacttcaaaatcagttgaattgatttgacaacaaaaaacttttgagagcttgaatcagaatataatagtatttgagaaaaaaatcagaatataatggatgacccagaccctagttatagaaaagatgactagttctcgtttacaaaaataccgggcttccataatttctgatgttatattctgaattgctgcatgttagtctaattaattgctcaaaacagtgtcccatgttccaagtgagttagaaatctgaaatttaatgatgctttgagagtatataatctaggcatggaaacaactatcactctccattgttttatcatgtgctgtgttaaatttatctttctacgtgaactaattgaggaacaccagacttggtaacatgtgcaaacaactttatagcacattgtatcgacaactttgagaaagtacagcatactaatcatacatgatcttcattgatctaattaggggtgaggagcttgataggctccctctaatggagaagatgatacggcaagcgatgtactggcctgacggcaagcggaaacgttgcaagtcagctgggtattttgaaaaagacaagtgccatttgatccaagctttagtggagaagtataatgaggatcataatcttttgggggtatgttctttctctctccacacacacaaatatatattatctatatcttatgtcttactattttaacatttgtttatctgatccatgcgttttgttttaggattttgcgtatgaacttaaggattttttgcaacatggagtaatttatgaggatcaaaggcagtaccaccatttgaatttcactgcgaaggtgaaaagagctgatgggtgtggtgtggagaacctattctttgctgaaatatcacatatgcaaggagaatatgaatgggtggtcagctgttgctgcataattaaacctagtgctaacggtaatatatcttctgcacaattttagttcaaatttcttatcctatataactttctgcttaaaaaattgtatgtaacagcaaattggtaagttgtgcatgccttttggcttaggatatatgctgtagtgcatgtgccccttcagcaacttgtatcaaaacactacctcagtgttcacgtttgaaatagtctgtctagctcacactaatagggagtactgtttcttttcgatataattgaaaatttctataggatgtgattcattatccttgtactgaagacatgccttatttaccattgatcacttatcagcatggtaaccatctgcccagttactttggctgttaaaactgacaaatatccccatttttgaaggtcattgctatggctgtaggaataatggttatgttggcatgaagcaccctaacaatgatgcatacagtggtggtcatttggatggatatttaccttttggggtcaattcctatgcgcgcaataatgatgaggaactcagtgtatgacaatttatttctgacaagcatctatcattgttgtattgctctaagtactcaacagttaatagcctgatcttctcttttacaggtcaaggatgaggaagatatgctaagacgtatgtacaaggtaataacacaacaagatctacttccacctgtacacatgttgctcggttcattgttgattgagtgctccttgtttttattttttagggcctagataagccaggcggattcaagagacccatccctaaatttgcaacacgaattgtgtggaaaactgaggaggaagctggtgtggaagctggttgaagctggaaccttgcatttttctactagatgtgttaggcaaatgtgctatcgtatacattcatgtaacacaagttaaacttatcaccatcgaacttgtccaccagtgccccagcagtagaagcgcatcttatcacaattggtggtaaatttagtggaatggatgaacatccacgctaatggttgctgaaagctgaaatgacaatttgcataacatttcagtatttcttctcaagttctccaataagacccctctttaaaaatgtggttttacctgcaaccaaatatggcataccatcacactcaatccaagaatcttacagcaaggcagtcggtaaacttttgatatgaaaatgaagctatttcagccatgttgcctggctgaaatattcagactgcaacaactgtttttgcctgatcttgtactgacaacaagcaacatgcaacactttaatttactcctttgaaggaaatcatagtattttactttttccttaaatgtagcaccctcatgcatgctccatgttacgtttgtgaatcttagaattaaaatagtagcttatagcaagatggttcattctttgttttttttttaaaaaaatggttcattctgaaaagacaatttttattataggatatttggactttacgattttagctataagacaccacatgaagtaacttttaggaaaatacattctcaaaatatagaattttgctgctaaagaccgcacccattagagcattcattttctgattcaatagaaaagagaaaccatgtgaaacatatatcaaatatccatttcctcctctctcaatgcctattgatatgggtattcttctcatcactgcataaattcaatatagtaaaactaatggtattagacaggggcggagacaagggtgggacaattagggcttgggccctaggcttaggaccaaattcctattaaaatcttattcaaaatattgtaaaaagttgaagatataaagagttttgttaagaacacattaactcagccctgcttggccctagacgtgatcaattcttggcgattaaaatattaggtcgaggagctccgccacaagcggcgctaccgtttgtggaacaaggtttggggccttaggggtgattgttcaccgttgatatttttcatgactttttaaactatataagtatatataggatatgagcacatagctacagtgtttctgtattaggccgaaacattcgatcctcccggataccggcccaatgctggaaaattaaaacgggccgtgatcccctcgagaaaattctacaatgggcctcataaggccccttttcaccgtgaaacatcactaaaccgcttacctttcctaaaagtccacgcggacactgacacgtcatcatcgtgttcgtttcctcgtcaaaagggcaaaaagaacacgaagaagaggggcgtccaaatccgccgccgaattccccacccgtcgcgtccaaaatccaaatccgccgccgcgatcgaggccgacgaggagaggttgaggttgaggtgagagccatggtgagcgccttcttcctgctgtgcgggtgcgtggaccaggcgagcgtcgcggtggtggagaagtggggccgcttcctccgcctcgccgagccgggcctccacttcttcaacccgttcgccggcgagttcgtcgccgggacgctctccacccgcgtccagtcgctcgacgtccgcgtcgagaccaagaccaaggtttcccttctcggtcacgctacctcgcgagtttcttctgtttgttttggatttctagtgtagcccccatggccattatccaatgttaaggttcaatactaggcagaccatggaattattcgtaattctccacctgagcccactgattggggatttggttcaaagtatgtattcgatcagttctctcggtgcgccagattagtatctaattgttgaaccagacagggtccattttgtcctaattactgatgggagtaacagagctggtatgcttgtgatgggtgtgcgtgatggtggaaaaaaagtaattagtcaatgctaattgggcatatttcattgtgtctgctgggtgatgcttaacgatgtcatgctaagtgaaccaagggaattactgttactctgtaaatttagttggttcatgagatgaagttgtcgagcaacattatttgaggatcagtgatatgcagatttttcctttttccttttattgggagatgctttgccaggacagcaatggaaacgcaattaataacatgttatatccttgtgatgctcttgctatatagcgcttacaaatgaaatgaaatatttgctatggaatgacaattttacttaatgctagcacttggttgtttctttgcttgatgaaacattggatgatgtgcttttcccctgcaggataatgtctttgttcagcttatctgcacaatccaatatcgggttgttaaggaacatgctgatgatgcattctatgagttgcagaatccccaacagcaaattcaggcctacgtctttgatggtaaaattattaatattgaacaattcagctgttgctcatagcaaattactgactcaaaaatctaaccactttttccttgaaatcagtggtccgagctatagttccgagaatgaatcttgatgatctttttgagcaaaagaatgatgtggcgaaagctgtacttcaggagctagaaaaggtaaccgtatgccaattaacttgatcttttagttgtgaaaattccagtatacatctaatcaatattttaggtttctacatgtattgcttgcttctattgtttcatggtaaacacttcatgtgtttaaacaattctgccaggattctaactgccgtcacccatctgttttgtggttgttgcagtattctttttgttatttttcccctttgttccttttgcatgtttcgagagttgggaattttctttggttcattctaaacatgccgtttggtttctgtcagttcatttttttttaaaaaaagtattggttttaagttttaacatacttatttattgggacaagggatagttccaggatactacttggtggaacgttgttgtttgtacaacttgcatcacaaagaactttgatattgtgttgtatgctgcaatgagttctgctcaggaaactaaagtgtttactaacttttggacacccgtgtttctttcttccacaggtgattggtaataaatatgataaaaataaaattgtttctggttatccaatgctatcattgtttatccaagtttcattgctaaagtctagttttgtcatgaaaattctgttgcctcttattgtcagtgataagcaatttcttgtatactatatagtttctcttccccccaaaagaatcacaatgtccatggtctgttcatctttttcttcgatggtcttctcgtactgtagtttctgtcgtcttgcaatttgataaatcctagatgcttccaggtgatgggagattatggttacagcattgagcacattctcatggttgacatcatccctgatgctgctgtacgcagagcaatgaatgaaataaatgcaggtatggtgccctatatgtcgtacttctttcatagtgtacagtccggaggaccttttctcggtttattggatgccgcaatgttttctcgaagtcaaaacctatcacagttcttatagttatctaatgcttttatgttatcttttctactcatgcttcattttctgtttcttgtaatgttggaagaaagttgaatgacgatgacttgagttaaaacagtgaaagcagggaataggttggggaagaaacatatgtaaaatatatgatcagggaaagaccattgcaatattgaaaggaataggattagtttattcatgcttgcttaattcaacctacgaatgagtctaccctctattttaggtcttgcaacctatctatctcaatctgaacttaaattatgccaactgtcttgtactgactctgtcctggttcattgctcatagttacatattgtacaaaccacaccacaattatagcaacgtctgatgttaagacaatttctgttttgtgcatgtgtgctcactcaactattaaattcttataacagcacaaaggcttcagcttgcaagtgtctacaaaggagaggcggagaagattcttctggtgaagaaagcagaagcagaggcagaggcaaaacacctttccggtgtcggcattgctagacagcggcaggcgataactgatggcctgagagagaacatcctgaacttctcgcactcggtttcaggcacctcagcaaaagaagtcatggatctcatcatggtcacgcagtacttcgacaccatcaaagaacttggggatggctcgaagaacaccacggtgttcatacctcatggcccaggccatgtcagggatatcagcgagcaaatccggaatggtatgatggaagcgtcctgcagcaacgtgtaaatcggtatcgaatgcggaaccaaggttgggggtggttcagatgggaggtcctgtttatagtgaatagtacgaatgaatgctagtagcatgtgttgtttgcacgcgcgccctggagttgtatgcagtggtagatagagttcgagttttggcataataatattgtctgaattttatgtaaaagaaaatcacatgtcttccttttgtgagttaaaagttgcaccgatttatgcatggcaatatctcaactgcaaaaaactggtgagttactgaaatgctgatggttagacaccgggaatcctttgcgtcattctgcagtaaagttgtggcatttgggttcttaaatcctgtagctctagctcacaagaagtcgtctccataacttaatccgctatacgacctattatctgctctgttctataaaaaactcaaacctagttatatatgtgtattgaggtttgtagctaggatttgcttttttttaaggataaagtagtaccatttttttagctttaacagtagcatcaaaggaatgtttggtactttggtttgctatcaattttttgtccgcactaagttaaatcctaaactatcaaaattttagtagtaggataattggctaaaaaaaaagaaaactaaaactgacgagtgcgacgtgatgtcacgaattatagctgcaagtgcaacggcagccgcgagcggcgggacgtgcatgcgacgaagcagcaactctctctctctctctctctgcgccaccgccaccatggcagcggcagcgcaggccgcgtgctcccatggcgtcgtgcggtcgtgccctctcttcgatccccgcgggaatcgcggccccccggttcctcctgcggagaggccccccacgctccgtctccctcctccacaaaggtgcattccagctaaatcgggtgagaggaaaccggggggggggggggggggggggnnananngananggaggagaggagtggaggtagaggggatcaactacgcgtgggggagggatgtcgatgtcggggtcggacttcggcgccccgtgcgacgaccccaagatcttccgcaacatctgccgggatcgtaagctcgctcctcccaccccccacctcttctctgatcctcgtgtctatctatgtctgtatcatctgatcgctgatgccgcgcgaatcgatcgcttgctgctcttctcacaggtatactcaaggacttgctgcatccggacaaagataaggagaccaatagctcatggaaggtagtacaaaagaaatgcattccttttaccctttcttttttggctccatctattcacatttctgttaattcatattttttttcctaa

SEQ ID NO: 5971 - DNA, 4048 bp, Oryza sativa
tggtttcagatttaataaatgccaatatatttgtagaagaatgtgtttgtttttattgtgagaatttctgctaatgaaaaacatttaaagttggctctgtatgcaaataatgatcatatatatttcagttgttttcacttttatctatatggtaggtcagagctggagtacagtataattttgactaaactataccgagtgttaaataatcaatatgatgttatcagctatataaaaatatcaaaataaaattgaatgtacatactgagatatataaaaaggtaaccatagatgtctgctcatggtcacgcaaggcgtgacttaaatggctagtctaaacttgattcatggacccggcacttaatattatgaattttttctctctttgtttaaattctcgttcttcagcttcgaaacaggtaaaataaccagtctctcaactcccagaacggtaaaactcgtccacttcaaaaaaaataaatagggggaacggtaaaactcttaaagccttgaatggtaggacatcgtacgggaaactacaatgaaacaaacaagctaggaagagaaaaatatacttcccgatcaaaagcatactatcacgaattcgaaaactttggagaaattcaaatttgaaatgaacaaaccataaaaaaaatcctacaaatacgattatattgatagtaaaaattttcaaaaagaaatattgaatttacccatcgtttttgaatggaacagatgggaacaatatgtgaaaatgagaaaaaaatgcctaatgggctgacgactcaataagcccaaaacacacgcgagtccaaagcatcacagcacgagccgtcgcggcgtctccggccgccgccgcagccgccgccgccgtagcacatctcccgctcgctggagtatggctgcttcgccgcctccgcggagccctagctccggcgatccggctgaggccgccgacctggccgcctccgccgccgccgctctagcatctcccgctcgcgtatggagctccctcctcgcccgccttccctcgctctcggactactcccgcctcctctccgtaggccgcggccgcggccgccgacggcgtcgcgccgctctcccgctccccattcggcctgccgccgcccactccgcccggtgaggaatcccctcggctcctatgcttcttatgcttcgcaggcttttcatggagtagtgtagtaactagtaccattaccatgtacttgtgattcgtggattggtggacatgacaggtaaaacaaattggggcgaattctcggttagcaggtggtgtatgtggaactcgtactaatgtgtttcgatgttgatcactgcttgcagtatgtgctaatgtgcatcagtttttcttctactatattcgatgcatcttgttatgtggctggttcatgtaatgcattactgatttttcacatgccattgattattggtgtgcacagagttacttggatatgtttctgactatatgttattcgcaggattgccggtcagatgcccaaagcttttgacatcctacaagatgttgcgcaacacactctgtctaatttgcatgatatccagaagagcttaatattttggcagtccaaagcagaggtataaagttgattcataaaaattgaagtgcttctacacttttaatatgtagagaagtccactacttactcatcttccgttgtcctatgctattttctccagggaacaagttcacagaaactgtattaaatgatctttgaaagaggtccaagggcctttgtcgaagcagcatggcaaacactgactagactcaagagcaatgggagtccagtcccgcaccttttgcactctgcttctgatatggtctcaacaaaacttgctgtcctgacaagtatgcaacactgcttggctgcttttcttgctgaggtttgtttagtcagatgtttatcattacaaatgcttatgtctagtagaataaaactcgtgtcagcagttctttcaaagctaactttgtagttgctcgcttccaaaaattgctgtactactctagtcagatcattcaaacccaattttctaactctttgataacattgtttgttttacatgacacagttccacatttataaatccaaatcataccttgcttgttctataggtttattgcgaagttgacaaattcaaagaaggattaactgaaaattcagataaatcgcttcacacactgtttgctgttttgaatactgtcttctccaaattggaggtatcactccaaaatgtttgtgaggtatgcattgtttgcttttcttgcatttggatgttatatgtataatatacttttgtgtttggcattatgtaatatattttcttcaggggcatactctactgttcgcactcgatggaagcccatctgaacttctctttgaaagattaccagaaattgattatgataactcagagtggacagaggcctcctcaacagatgctatatgttttatctaccaaaacctccagaagctagataaccttgtttgctctcaggtaagcaactttctctttcaacaacagcaacttgtctcgcatttgctacttctattaatgttacctgagttgtagatggggtatggttggatcaatgttatactattggaggttctatgattgggcctgttcggctgcctgttctgcagttgtggcacagccggcaccaacagtgccacatgcacacgcgcagccgcagccgccgctgccagcttgctgaacaggcccactacctgtttgtgcttgctgtataaaatgtttatatagctatatgcatatgcattgtttcagactataaatgagtggtattgtcatacctatagttctgaacaggcgccccattagcatgcatataatggagcaacatgctgattatcaaaaccatgagatttgagatgtgagaattaatcatgtggatgaactagtgaaaatgtgttcaatgccaaacttgtatctcaatacagagtaaatgtgtaaatgtatagcattctccaggtagtattttattttttgtgatttctccatttatcatatttttacttttataaactatgtaagttgcagttatgtagaaataagtgggtttgttcactgtacaacaataaatcttacatttcttatcagatgattatatgttgcttaattgcctgaagcaaatattttctgcaattatagctctcaaggcataaaaaaccaagacatatgaccatatactggttgccctacacatgtggagcgttgggtctctcggcatgttctctgtggcttttgcgacacagtagcttgatgggaagttctgacatcgacaactgggttcaaagtgccaaagagtcaatagctggattttgggatgtgcatgttgagaaacctgtaggatactttctatttatgtccttctattatttatcttatgcatttttaaatgatgctagtgtaagttaactgagggtgaatcaaggcattctagttaaagtcttttctcgttattccgacattgacatatatgagatgttctctgaggtacaggaggataagattttgttaatctattcatgcaaatatttgtctaacaaaaaggaaaaccagataaagggaaagaaaagcatgctgccttgtgcatactagccgtactgttttcttatagtataagcatatatgatagagtatagaaacaatttcatgtgtttgtttactgcagcacttgcacttattaccatgaacatccttaagtttacatgtgtatataaggcatataactaactactatctttgttgacaattataaggcacacacgtagtttcaaaattttggacattgtaattttttaccaataaataagtaatgtaagatgcaacattatatagttgtgtgatacaaaaatggtaattttgaatttttgtttgcaataacttatgatcatgatttgtagttacacacgctatattgcaaaagattcacagtcataaattcattttggcagaccacaccaagtcaaatcgcacacaatattatata

SEQ ID NO: 5972 - DNA, 4183 bp, Oryza sativa
ctaacctgtgcccggtagcatgggaaaccgttgtttttcttcttttttttttccctttccgtctgttttcataccctgctgcatggagtagtgtagtagcgttgcatgatgatgcgtatagcgattattctttaaacagcaagaataatactccttaagtcttaatatgatgttattgtttttttataatttattttaatttagtataaatatgtaaatgaattaaaattatacttttttatgataaaacaagtcacaacaaaataaataatttttttgaggaaacaataataaataactagcatggtggcccgtgcaaatttcgcggctagcatctttatattttctcatataatagcatatatgttttctcattatattattcaaatatattaaaataacaacataattttaaattttgcaataactttacaaaactactaatgtgtaatattcatattatattttatatacatgttagttattaattatttttaatatcaaattttagttatttgtaaattatatatattcctatatggactctagactcgtcttttaatatttctttttttttaattccgaatttcctgtaaattgtatttctatatagcctatatgctcttcttctaatattatttatttttatttctgaattttcatattatattttatatacgtgttagttattaattatttttaatatcaaattttagttatttgtcaattatatatattcctatatggactctagactcgtcttttaatatttttgttaatttcgaattttctgtaaattgtatttctatatagactctatgcttttcttccaatattatttatttttatttctgaatttttattacttctaattgtatttctatgtggactttaaactcatctttcaatattctttaatttttaatttcaaatttcagttacttctaaattgtattcctatatttgtaatcctatattgaccttaaactcttcttcccatgtttttcttaattttgaatttttgttatttataaattgtatttttatatggactctaaactctacttttaattttattatgtttattccaaattttagttagttttaaattcctatatgaactctatcctctacttctaatattccttatttttaattccgaatttcagttatttcctaattatatttctatatggactctagtctcctcttttagtatcccttattttttaattccgaatttcacttatttcctaattgtatttctatatggactctagtctcctcttctaatattccttattttttaatttcgaatttcaactatttctaaattgtatttctatatgactctaccttttctttttctccgattaatgtgagaatttctaggccatgagagcgaacgtggaggctcctttttctatttctttaataatataatagatatttatattttttaaagaaataaaataaatggttaaacgttatgcgaaaactcaacgacatattatattttgggatgaaaagatgacatactatcattagtcatgacattagtacctgattgttgcagtctgatagcttatttatcattaatcatggcaagtccggtttttctctactacctgatgttcatgacaagtccctgttggctgttgcaatcattgtagttgtgccagatgggataatatattagcagtttgctaatgacagagtagtgacgttgttttcatacatagagaaatccctagggaacatggcaccctgccggctcccttcgcaacttggtgacaccgaccgcacaagtttcagctgtcaccatctcttgggccgcatgttggcggagaaaggcagcccagccgtcttctagttgaaactaaaaggcccagcacaactcatcccgcacggtttcgctgatgaatcgttgcgggttgccgctttggacaccgcctaggcgcctactccacgcgccgtcggattcctgcccggaactagctcgatctcactcgttgtcgctggtgacttgtgccggcttggctaagatcaagtttagtagagccactcctagcttaaaatcatctataattaatttaatagccaatacatataatagttatatgcaaatatacaccacactattgatatataatttctcatgttatatacacattacgttttatgttttatatatgtatgtatatagttgatttatagtatactattgtataacctgctctgctcgatctcatctcggtgatcccatacttggcacgtacacgtgccctcttgatgacataaacaaagagcagacagcttgtgtgcgcttgtctaggtagaaaaaaagggatccgatcgatccgaagagcatggtgaaaagcacgctattaccagtaccaccactgttcgtttcgtttgttgggtttcggtcatcgccccacacatgtcgcgcatgcatggttgtcgccgcgacacgtgccggcgcgcgcacctccctctccgcaccttaactccttcgctctccgcccacttccccatcacgcgcgagcgctgccatcctctcctcctagctaggtcgatcgacgtcgagaatggcagatcggcagcagcagcacgcgcacggcgagggccggacggcggcgcagcgcctcgggtacgcgcccgcggcgtcggcggactcgccgtcgacgacgctgctccggcgggtgcagacgcacgcgccgaactccacccaggtggtcggcttcctcacgctggccgtctccggcgccgtcctcctgctcctgaccgggctcacgctcaccggcgccgtcgtggcgctcatcttcctggggccgatcgcgctgctcaccagccccatctgggtgcccgtcgccgtcgcgctcttcgtgctcgccgcggccgcgctctccgcctgcgccttcgtcgtcgtcgccgtcgccgccggcacgtggatgtaccgctacttcacggggaggcaccccgtcggcgccgaccgggtggactacgcgcgcagccggatcgccgacacggctagccacgtcaaggactacgcgcgcgagtacggcggctacctgcatagccgggccaaggatgccgcgccggcgcgtaagccgcccgcgcgcgccacatgtgtgtcggtgtgtggcatgcagcttagatgtgatcgttcttcttcggtgtgtttgtgttgtcgatttcctcacttcttctgtaggctactttaatttggtattttgatcttcttcttctctggatcgtacgtcactcgggttgtatttagtttggatcataagacgtcgcaccgggctgaattgatcttcgtcatttggcctgattcgatctcgcaatggtcgatcgcaattcctcccagctcgaggttacgctcaatgacgactctttgcgtgtgagatgtgacctagctagaaaagtccaaaattttatcgttttcgcaaagcaaaagatgtgaagaagcaaacggcacagcattaaacaagcaagaagttaaccaaacaatctgaattggaagcggttttgatatgttttttcagttgggactggaggcgagcggcgccacaaaccaaattctgcctcaccaaatgagctgagatcagcgtgcaacggcgcaaccagttccgtgcaacagtcgaagatgcattcagagatcagtgcgcccaccagttccagtcgagcagagggcatccgccatgccggcaacaacaccgaaccatcgcatcacgaaccgccgtgaagaccgaagaagaaacagggagacagggtagagataggagaggaggggatgacacgtggggcctattcttgtaaaacttttgtgatgactaggctgccgcgaggataccaagtactccgtaaatcaaaaccgccatctaacaatgaggtagttttgaacgattttaacaggggaacggctaatgggcgatcgatctgaacgatcgatccccatccctgtacactcctctccccgcttcctccctccccttctttttcttgctacaccataaatttttaaaaaaattaaaaaataaagttggaaaaatctatgtataaaaatattatatatataaaaaaaatttgaatttaaattcaaatttgaaacgggtatgtaaacttttgacttataaactttgggtctataaactttaagtgtgtaaactcttagatg

SEQ ID NO: 5973 - DNA, 1093 bp, Oryza sativa
aaactcatttaaaccctagactataggttaatatgataatgtggaataagtaccaccgctctggtgttggttaaataaaatgaatcacatggtgggcttgtgggtgcaaggttttgctagtcgcgcccatagcaattaaggacccggttcgcgggaaaccctgaaagaatttatcgtgcttaccacaagccagcgtggccaacggctgggcttgtagtgtagcttttctctagctgacgcatccaggcaagggtgggcgtgatggagcagggcgggccctgcgacggcctctgtcgctttcggattcacctaggcacgagaggggactgccagttgcccgctgggaacgggggtgaaacctgaggtgtggtgtgcttggctagagggggttatgcgaagggtcctgtcacgacctctttccggtatgtcgtggtggcatgtcggcgcacggaaacgtgtcgtggggctgtgtcttgtgggtacagttgtacacctctgatcagagtaaaactattcgaatagccgtgcccgcggttatgggcggtcaaccagattcaccgtgattagactcaccttagtttagtctaatgaaattggatggtataggtggatggttgggcctgttgcaacgtggtgtagcgttggacagtggatgtttaatactgcttaattattacaactgttttcgcattcaattcctgtttataaatgccagtatttatgcaaatgaacctgcttagctatcccttgttgaatccctgcatcatacccccattccggtatgacttgctgagtacagtgggtagtactcagccttgctctatttcccccccccccaatcccagagctcgagtatgtgtccgatggcgggttctccgaggagtaggcttcgtccgtgccgtcgaggatgcctgtggagtggtgttcccgctgcagttcaagtcaaggcttagctcttgttgtctttcttttcttccgctgcatttatgtaagacttttatgatgtttgtaagacgtggatctgaatgtcaacattgtcgtttgtgtaccccggccggtcctggacggggattttaatgcacattctgcttga

SEQ ID NO: 5974 - DNA, 8602 bp, Oryza sativa
  unsure (1)..(8602): unsure at all n locations
cgtggcccnnnggtgggatcaactgactggacagcagcncatcataagatctggtcgtataagagttctcgccgtgcgtattaaccaagccgtgtaatcggaaattgagttttccaacttcacagctgggggctaggatcagtgcttgttcaaccaaggcaggtcaagggtccaagagccttgtcctccgagaacgattctccgacgacaaggctgggggctagggagagtgtatgactctacaaactgactgatcaaagtcggtaagagagaagacgctcatatataaaacattggtcggtaaatttaattcatttttagttttccatacaaattataacatgtcaccatttgagcgtttgctcgggggctatttctatttgatattcttttctgagtattgatttctggaaaattctattcgacattgtggaaaactccatgtctctatggttctacaccaagatcgactaaggcgagtacgacaaatgttgacaaggctccgtcgcagactctacgccttctcgatcgctcgagaacggttgctggatctcgacaaggaatacggaataaagagatggtgtacccgccgagataaaactttttgacttcaatccaaattctcgattacagcaagacgggagacttagtcgtatgttatgtactttcttggttgacgtcggagattgactcaagacaaaccctttaggtgcccgcacgaggctgataaaggaagtctaacgttatctctgaactcaccgagaacggtcacttgagctcgataacagttactccatggtcagcggtcgagaatatgaattcgttcatttgcattgaagtcgggggctactgtcatggttatggataccacatacctaatagtagtcgactaaatctcggcaggacccaccacataccatgtcttatacggaaactgacttcggatataaagggagttccggataaggaaagacaaccagtgttctacatggaaacgacaaggactgctcggattatatacatattgcttttcctagttctacttggacaagggaacacctatgggaataaatacaaggccccctaggaggagaggggacacggacaatcgacgaccacctcaatcaacacccaccacaatctacggaataatagatcaagacacaagatcaacatacaagccaacatacgccaagacaagacgccggatatcgacttcagggataagcacgactagtcccctacggtgtctctggatactgtcaggagagacggaagcgctatctctgatctcgccgggcacggattcgagaaggaagactaccctgttgtcgactacgagtcagaacttcagaccgccatgtcgacaacagttagataggctaccccaaatattgtactggtgtgattatggtgaataaagagcaacgaccggtttcggccaacaggatgttgggttattacctgataattcagggacccgaacctatataaaaatctctatctccgtctcgtttacctcagtctcgcatatatcctactaacaacgatcctcatactatgtaaataccagaaccgcgacatcaaacgtcgacagtattattgctagctttctctctgtttttttttgataagctatattatctcaaaagtttctagccttctatcttgtacatagttgatctaagaaataggttacatcgaagtctataaatttaaaatggattggtgactggattatttctgtggattacatatttcattatagggataaattagatatttttagaaaataataaaataatgaaataagtggtcttactatacaatggaataagttttttttgggaaatgtatttttgagcaactaattaattgaatgatttagtaaataagctgacaacatggcagtcaagccgtctaactacctagcaaatcaattaatcctcgctcggcgagtgtgtaacacattactccctccctccattctaaattgatctacatatttcataggtacaccaaaaccaagaaaaactaataactctctcatactatatttactctaaaaacaagctcgatgcatacaccatcccattattttctattcaatagcaaatcaagatattgcatgtgggttataaatacttgtgtgcatggatacatgtatcaatgtccatttactccaatattaatgcacaaatactccaacgaataggcttaatgaatgcacataaatataatgataatttaggaataacctaaaaaactatatatagatcaatttaaaataaagggagtatcttagaaaatttccacggcaaacactaattagctaggtttccatcaagctaattagcgagggtgtaacacattatcttcatgaccatcttccgaattttggccatgctctatgatcagctgccatcgcatgcatgcatgcctcgatctggcggtgatctcagtaaccgaatgcttatcggagtcaacatatcgcacatggccctgcttagtaattaagatgcagatcatcagtgagccttaagcccttaattagcacaattttattaaatcattgagtgtattattatggcacgcgtggtataattagcaaacagctagctaacagcccacatttcaaaaagtcaatgtatgaaccttaacaacgctgctatacgtccgaccagcgtacgactcaacggcgaaatacacggcgcaagcccaattgaattagcgatcgttgcagaagttacggacggcggacggccaatgacgtagtcgtgcgctggtcgtacgcgtcggttggacgtatagcattttcggaaccttaattactccctccgtttcacaatgtaagtcattctaacattttccatatttatattgatgttgatgaatctagacatatatatctatctagattcattagcaccaatataaatatggaaaaaactaaaatgacttacattgtgaaacggacaaatagtttttttgttccaaaatcgtgagagcaaaaggatcacggatggattcgcgacatgtgctgggaacagggcatttccggattagtcgtgcagataagctgatccgagcactttccatttgtattaaatttgctcgctcatagtactgctgatgtgatgcaaagattatcttagtctaattttgttgcaccttcttctttaggtacaacgtataataatgatcagaacgcgtgacatgcatgtacgtgctggttattactcccttcgtttcaaaatatttgacaccgttgactttttttaagtacgtgtttgaccattcgtcttattaaaaaaatttaagtaattatttattcttttcatatcatttgctttattgttaaatatactttcatgtacacatataggtttacatatttcacaaaaatttttgaataagacgaacggtcaaacatgtgctaaaaagttaacagtgtcaaatattttgaaacggagggagtacgtgacagtacgccaatgtctgcagttaatcaggactcaggagcatccatgcatgcatgtttccaggatatcaatacgagcccactacacctccaattataattaagttggcataggtaatttggacagctagctagcgcgtcttcgtgcgtaccaattagaacaggctataaatgtaagccctcagtttcattcacatttcaccactcctccggtgacagtgagtgagccgagggttttcgatatctggataggagcagactcatcgctaaatgtcttacccgactattcaaaacaccggagtacgtgggtccgtgacgctgacgctgtgaactagctagccatggccatggctgcttcttcttcttcctcctggtgcgcactgaaacagtcatgcgtggccctcctgatggctttggcttgctgcctaactacgtgcgcgcgcggcgcagtcgaggcgctgtacgtgctgggcgactcgcaggcggacgtagggaacaacaactacctgccggcgtcgctgctcaaggccaactaccctcacaatggcgtcgactacccggggggcaagcccaccggcaggttcagcaatggctacaacttcgtcgacttactcggtgagtgtatatctcaaggccattcattagctagttaattatagtacgtttattagtaatatatatattgagtcaaaaatatattttgatagctgatatttttgggataatcgatctaacattcaacgcaaaaatccctctaaaaatatatcaaatataactccgataaatatatatatatataattatggtgtaattataatataattcgcatgtacttacgtccctaaaaaattcaaaagttgtgctggcttagtgggggctgcctgcggttgtcagtttgaccctcacctcgcgcaatgtcctctgatttttacccaatacaacatgcatagatcgtatagcccattcggtggctgaaaatttgatacgatttttaccaattttttttgtcgaatgtgaaataactaggctgtaaactttttggtgtattcggatgcaccaacactctagctcacccatagacatccaggcggttgctataaaaatagcaaggcactattattccccgggtgagggcgttcacactgcatcaccgtgacgttcagccctcgagacgccaacagagatttggactgccacgttctcgccactgctgcgctcctgcgaggaacgtgctaccaaactatgacgcgcgaacctcgtgttaggtgaggccgcgtgatgggcggagcgacgggatagagtctgcattggacctgcgatgctgtccggcccccacacggcacacccccactcccacaagccaccgcgggtacctcacccaactccggtaagagaacaaaaggggcagcaacagcgagatgggggaagaggggcctacctttccagccgccgctaaccggagaaagaagagaagacaaaagatggaggagaggcacatagccttgcaggcctcgtcggcacgagccgccgccggattccgaggggcgaagctcagcagcggcgtaggcccaagccaccgtggggacctcgtagcccgtgcactacgccactaccccgatctggtcggcggtcaccccgatctactcatcgccacaggtgtcggcgatggggaggggagggagaggtgtcgtcaacagggagggaggggagaagaaccggtgatggagagggaagggagaggtgccatcttgttaatagagaaatagaaagggctaaaatagaaaatatgaggggctaaaacaaaaaaacgaagccacacatagagacccatgcattgtgggagacaattttttttaaggtgtggttttagcccatggcacgtgaggcaggccaaattcttctggcacactgtgaacgccctgagcatacggtatgatcattataaatgatctcttgtgtcagtgcctgcatgtatgtactactttcgcaagatctataattcttagagcatgatcaataataaggtaatttagctccaattatgtccaactcatctataacttactttgcagcttgtacacgcaacatctagttgtattgttgggtcctatatgcttcacatcactattaaaaaattgcagcatcgatcctatgttgcaatttttgcatagcagcatttctctcactctctcacgtccaacgtttttatctagagatgcgtgttgcagcccgatgataaaattgtcgtccgctcgcgccagctcatgcatgttctctctctttagctcttttccctatatcaccattgctatctacgtggacttagtgtcgcctgactaatgtacctgctcttaagaaaactacgaagacccttgctcttaagcaaaccatgcatggttaggcaccgtaaaacttcgccaccgctaatcgattaacttcgccaccgcgcagagcgcttgcttggctagagccaaacaaaatagggaagttctaaattaaataacatgccgaaagtaaaggggaatcagaggaaaaattaactatgtgtagtatagcttcaatagggcaggctagctagtagcttagcttcagcatacacatgcatgcacacccgctgtgaacgaaggagcgagcgagcgacgatgggttcttgcacattgtcctccggcggcgtctgcgtcgtcgtcgtcctcctgtgtttggctgcttgctgcctaacgtgcgcgcgcggcgctgtcccggcgatctacgtgctcggagactcgcaggcagacgtagggaacaacaactacctgctgcactcgctgctcaaggccaacttccctcacaatggcatcgactacccggggggaaagcccaccggcaggttcagcaatggctacaacttcgtcgatttaatcggtgagtatatatccatcatcatcgatcgatcgctgcgtaaggctagctagctagatagggagtatgaatgtatgatcgatcgattgggagattggaggcacaacgttaacgtatgttgttgtcttgcgtgtgtatgcggtgtttgactgtttggtgtgttcggagaagacagcatgtcaactggcaatagcaaaagcgatggagatatatgatagttcgacgtccaaacgaccgagcgtatatggagtgggacttgacgggattttatttggcttggcgcgtacgtatacctccgcctctctttatctcttgggatacgtgttcacatatatactgccaatcctggacggcgatatgtatacgagcttgtgtgaaacaaattaaatcgctgtagttttttccaaacaccactacgcacggacactgatgccgcatattctattgtagtatatagtaatttgctagaacgcaatatgaccattattaatttaatttaacatttctatttcaatttggcatctaaaatttttacaaatgacgtttttacccctacgacaagttgcatgcatgctccatttgagtaaatttttgtcccaaaattcaaaaataaaaaatattttggaaaatttatgaatttcaaaaaattgaacatgaaaaattgaatgatattaatctaaattttaacagatttgcaaatttcgaaacttttcttcccaaattgcgaaaaaaaggtatttttgcggaccaacagaatggaatatttccaaatttaaaaaaactcaataaaatttttatttgacgagatattgaatgaatttaaacattttcttgaaattccaaaaaaaaaatttaaaagaaaaattttgatggagtattacaaaaaacaaccccttcacaattattactaagtcaagaaaactgaatgaacggaatgttatttactttttggacttgtagtagttgaattagtttcttatatcaagatgaccttagagtagaaaaaattaatggtatttgtacatatttattaatttccatgcatgcagattacaaatcactaattttaaatatgaatcagtttgtttatgaatatataaaagtaatatttctaaacttacgtttacatatgcttcccaaggaaatttctaaaaatattagttatgaaaaatgtagatttaggtgtttctgcaactattcaccctgctctggttattatagatttaagagttttagtcctacaatttaatgtggcattatctgacctatagaattaattgtcacagaaaaatacttttggattatttttattttgtagaaaatattatttttattaagcatctgacctttgcatagattatatgcatatagtaaagaaacattgcattattattgagcctgaaaaactcttatcttgcaatttcatccatctcgatcaatatgtctctaggtccatttcatagttgtgactgaatatttttctattaatttggtataacaaataaagatattataacggtggtggaacaaaactactttaacattctactccatccatccctttcaaattataatgcgctttgattttttctagattaagcttctttaaatttaatcaaaattatagagaagtacatcagatcaattaagaatgattatgtctacgcgcgaccacgcgaaaggaatcaaagatactagcatgtgaagcaccaaactgctagctgcattccgaacaggaggaagggggaaacagctagaataatgcaccgctgtactgtgttgccgatcgagcaaaggaaaacgatatgcgcccgcgcgagacggagaacatataaaaggcgcagctaaatcaggagccacactgttatgatctctattgctaagcttgcactatgcgcaaccttttccatgtaaaaggcgcagctaaatcaaatcgccgacgcgcgatcgatcgatggagacgtgacgtgcctgtctcgcggttcggtggtcctatatgctatatactcactccgtcccaaaataaatcagcttctaaaatttaaaatcaaaataaatcaacttttactcttttacctaccattagtttgcaaatctaaaaattttatttctttcataccctttacctacctattcatcgatataacttcacaattaattagagatatcttgatcattcatatctctgatgggnggtgtnccatcagtagtctacctgcgcag

SEQ ID NO: 5975 - DNA, 6085 bp, Oryza sativa
atgcctgtgcagcctggggacgcccgctcgccgcgggagcgtgtctcgcggcctccacggggcagggcagcagcgtcagcgagcgaggcgcgcggggagaagaagatcgtactactagaccaccgtggcccggcgtggcgtggcgtggcgtggcacggcgcgcgcggggggaaaatgctctggcggtttggcttcgcggcgccggtgcggtttgtaatgggggtggtggtggtggtgcgggggtggcaagagcacgggaattaactggcgagcacgtcgccgccgtttcttgctgtgtgtgtatggcacgccaactaacctgtgcccggtagcatgggaaaccgttgtttttcttcttttttttttccctttccgtctgttttcaaaccctcctgcatggagtagtgtagtagcgttgcatgatgatgcgtatagcgattattctttaaacagcaagaataatactccttaagtcttaatatgatgttattgtttttttataatttattttaatttagtataaatatgtaaatgaattaaaattatacttttttatgataaaacaagtcacaacaaaataaataatttttttgaggaaacaataataaataactagcatggtggcccgtgcaaatttcgcggctagcatctttatattttctcatataatagcatatatgttttctcattatattattcaaatatattaaaataacaacataattttaaattttgcaataactttacaaaactactaatgtgtaatattcatattatattttatatacatgttagttattaattatttttaatatcaaattttagttatttgtaaattatatatattcctatatggactctagactcgtcttttaatatttctttttttttaattccgaatttcctgtaaattgtatttctatatagcctatatgctcttcttctaatattatttatttttatttctgaattttcatattatattttatatacgtgttagttattaattatttttaatatcaaattttagttatttgtcaattatatatattcctatatggactctagactcgtcttttaatatttttgttaatttcgaattttctgtaaattgtatttctatatagactctatgcttttcttccaatattatttatttttatttctgaatttttattacttctaattgtatttctatgtggactttaaactcatctttcaatattctttaatttttaatttcaaatttcagttacttctaaattgtattcctatatttgtaatcctatattgaccttaaactcttcttcccatgtttttcttaattttgaatttttgttatttataaattgtatttttatatggactctaaactctacttttaattttattatgtttattccaaattttagttagttttaaattcctatatgaactctatactctacttctaatattccttatttttaattccgaatttctatttttttcttaattgtatttctatatggactctatactctacttctaatattccttatttttatttccgaatttctattatttcctaattgtatttctctattccttatttttatttccgaatttcagttatttcctaattgtatttctatatggactgtatcctctacttctaatattccttatttttaattccgaattccagttatgtcataattgtatttctatatggactctagtctcctcttctaatattacttattttttaattccgaattttagttatttcctaattgtatttctatatggactctatcctctacttctaatattccttatttttaattccgaatttcagttatttcctaattatatttctatatggactctagtctcctcttttagtatcccttattttttaattccgaatttcacttatttcctaattgtatttctatatggactctagtctcctcttctaatattccttattttttaatttcgaatttcaactatttctaaattgtatttctatatgactctaccttttctttttctccgattaatgtgagaatttctaggccatgagagcgaacgtggaggctcctttttctatttctttaataatataatagatatttatattttttaaagaaataaaataaatggttaaacgttatgcgaaaactcaacgacatattatattttgggatgaaaagatgacatactatcattagtcatgacattagtacctgattgttgcagtctgatagcttatttatcattaatcatggcaagtccggtttttctctactacctgatgttcatgacaagtccctgttggctgttgcaatcattgtagttgtgccagatgggataatatattagcagtttgctaatgacagagtagtgacgttgttttcatacatagagaaatccctagggaacatggcaccctgccggctcccttcgcaacttggtgacaccgaccgcacaagtttcagctgtcaccatctcttgggccgcatgttggcggagaaaggcagcccagccgtcttctagttgaaactaaaaggcccagcacaactcatcccgcacggtttcgctgatgaatcgttgcgggttgccgctttggacaccgcctaggcgcctactccacgcgccgtcggattcctgcccggaactagctcgatctcactcgttgtcgctggtgacttgtgccggcttggctaagatcaagtttagtagagccactcctagcttaaaatcatctataattaatttaatagccaatacatataatagttatatgcaaatatacaccacactattgatatataatttctcatgttatatacacattacgttttatgttttatatatgtatgtatataagtgatttatagtatactattgtataacctgctctgctcgatctcatctcggtgatcccatacttggcacgtacacgtgccctcttgatgacataaacaaagagcagacagcttgtgtgcgcttgtctaggtagaaaaaaagggatccgatcgatccgaagagcatggtgaaaagcacgctattaccagtaccaccactgttcgtttcgtttgttgggtttcggtcatcgccccacacatgtcgcgcatgcatggttgtcgccgcgacacgtgccggcgcgcgcacctccctctccgcaccttaactccttcgctctccgcccacttccccatcacgcgcgagcgctgccatcctctcctcctagctaggtcgatcgacgtcgagaatggcagatcggcagcagcagcacgcgcacggcgagggccggacggcggcgcagcgcctcgggtacgcgcccgcggcgtcggcggactcgccgtcgacgacgctgctccggcgggtgcagacgcacgcgccgaactccacccaggtggtcggcttcctcacgctggccgtctccggcgccgtcctcctgctcctgaccgggctcacgctcaccggcgccgtcgtggcgctcatcttcctggggccgatcgcgctgctcaccagccccatctgggtgcccgtcgccgtcgcgctcttcgtgctcgccgcggccgcgctctccgcctgcgcattcgtcgtcgtcgccgtcgccgccggcacgtggatgtaccgctacttcacggggaggcaccccgtcggcgccgaccgggtggactacgcgcgcagccggatcgccgacacggctagccacgtcaaggactacgcgcgcgagtacggcggctacctgcatagccgggccaaggatgccgcgcccggcgcgtaagccgcccgcgcgcgccacatgtgtgtcggtgtgtggcatgcagcttagatgtgatcgttcttcttcggtgtgtttgtgttgtcgatttcctcacttcttctgtaggctactttaatttggtattttgatcttcttcttctctggatcgtacgtcactcgggttgtatttagtttggatcataagacgtcgcaccgggctgaattgatcttcgtcatttggcctgattcgatctcgcaatggtcgatcgcaattcctcccagctcgaggttacgctcaatgacgactctttgcgtgtgagatgtgacctagctagaaaagtccaaaattttatcgttttcgcaaagcaaaagatgtgaagaagcaaacggcacagcattaaacaagcaagaagttaaccaaacaatctgaattggaagcggttttgatatgttttttcagttgggactgaaggcgagcggcgccacaaaccaaattctgcctcaccaaatgagctgagatcagcgtgcaacggcgcaaccagttccgtgcaacagtcgaagatgcattcagagatcagtgcgcccaccagttccagtcgagcagagggcatccgccatgccggcaacaacaccgaaccatcgcatcacgaaccgccgtgaagaccgaagaagaaacagggagacagggtagagataggagaggaggggatgacacgtggggcctattcttgtaaaacttttgtgatgactaggctgccgcgaggataccaagtactccgtaaatcaaaaccgccatctaaacaatgaggtagttttgaacgattttaacaggggaacggctaatgggcgatcgatctgaacgatcgatccccatccctgtacactcctctccccgcttcctccctccccttctttttcttgctacaccataaatttttaaaaaaattaaaaaataaagttggaaaaatctatgtataaaaatattatatatataaaaaaaatttgaatttaaattcaaatttgaaacgggtatgtaaacttttgacttataaactttgggtctataaactttaagtgtgtaaactttagatgtatagaaatactatatacaaaaaatatttgaattcaaatttgaatcgggtacataaatttttgacttataaactttgagtctataaactttaggtgtataaactttagatgtatagaaatactatatataaaaaatatttgaattcaaattcaaatttgaattgagtatataaacttttgacttataaacattcgctctacaaactttagatggataaactttagatatgtaaattttaggtgtataaacttaataaaagaggaaaagaaaaaaatgaaaaaaaaaacgatcactgccagcgatcaatcgctcgttaggactttcgttttaacagttggagaatcaatatatcaggcttgactgattgagggggggggctaatgggcaatcgatcgccagggcgatcgcccagcgattagatccgcccccctccccctataggcaatacctcctccctcttctccccctttctcctccccttcttctctcgggaatgctaatgggcgggtgatcgctcccccgtccgcccagcgatcactcgcccgctccctcctctatactactcctctcctcccttctcttcatactatagtaaaccacaaaaaaaataaaaaaaacaaaaagttagaaaaatttatgtatagaaatactatgtataaaaaatttgaattcaaattcaaatttgaatcgagtatgtaaacttttgacttataaactttgggtctataaactttaggtgtataaactttagatgtatagaaatactatatatagaaaatatttgaattcaaattcaaatttgaatcgggtatataaactttaggtctataaactttatgtctataaactttaggtgtataaactttagatatatagaaatactatatatgaaaaatatttgaattcaaatttgaatcggatatttgaattcaaattcaaatttgaataagatataattcaaattcaaatttgaatcagatatataaactttaggtctataaacattaggtctataaactttagatgtatagaaatattatatataaaaaatatttgaattcaaattcaaatttgaatcggatatataaacttttgacttataaacttttggtctctaaactttagatgtgtaaacttgaggtatataaactttaggcgtataaatttactaaaataggaaagtaataaggtgccaaaaaaggaaaccaggtggagggagggaaggggga

SEQ ID NO: 5976 - DNA, 7029 bp, Oryza sativa
cttctaggataaggtgcttgacatgcagggtagggaggaaaaccacgaggttgggcgaggcacgacaagcgtggcagtgataaacccttttgcgtttgtgtcatagaaagcaactgcaatcatttcctccagtgtggtagggaaggctcacactcttacagtccagtacgcagtgagatgcatccccagtctcattcgtaagtagttcgatgtgcatgaagcttctaggctataatcatagggtgctcctggccctttcaaggtcggagtgatcccagagtaaacttggtcttagcatgcagaacccgcccatgattgaatttgagttctatcgtgatctcagacatcatgtttgagccgaatctgacccacaatttgtagagaggtagttattctctaaacatcccccccccccccccccgcgctgcttctacgactcgcgtgtcgcgtgagtggggccaacctgcagagtcacgtggccaaagggaaagtaattcccctctacttctcatacccccgggcccatatctccaacatatatgtatcaaaatttgatacctctcggtacctcttggtatctcttaagtatagtaacatttcttttttagaaattagatatatgacagttttgttcttaaaattttattgcaggaggtttttaaatggaaaaaaaggggttattttctgtagtcatggctgatgctgatggcactggtgtgagctagtaacaatccagagaacaagttgacgggaacagatgactataaacgggctattggtgtgcgtcgagatcaaatggataattcctctcaccggcgccggattctcctgggcaaaaatgtggagtttgctcggccaagtggtcagcagctcaggcacgcacagtctctttttcacagttttaataggagtacgagactgactgcgacgcaatgccttctggctcttttgttttgttccttttgttctgtttcgttttactcccccgaaaacaacatcacgctagccgatcaagcttcctcctgcgagaatgcgacgcgaaaactaaatggaaatggttgaaggtttgagcccgatcaggcacgtttcccagctcaagcaaaggatctcacccaatgttactgactttctgctacctgaaatgaatgcagtttctgggcacaggttttggtctctgaatatgaaactctgaaaaagtaattctgaacatggagaagaagttcagacaggaggaaatattggaatgcaggaaattcagtaaaggtgtgtagacaagtagaattagacagagaaatagattatgggcttcagctagaagttaccgcatctcatctcagattagaagtttgaaaaaccaaacaagcagatgagagataattaacctctccatccaaatccatcactccagttatatgttctaactgcatgtgcttttcttttcatgtaactatcgttgagcacgtgataatcagctgctctcatgtatgaatgctctgctacagtcgcggagaattgacacgaaagatacacaaaatggatcgaacaccagcatttcaaatcgatagaacaggagagccattttcatcatggtgtccagttaatttagcaatcgtcggtcgatcggtggtgcccatttcagattggccattccgtacgtttgtccctatgctgtcatgatcccaattatgaacgagcgaactgcatatatcttaccggacgtctccagcaatcttaagcaacaagcaccgaatcaatcacgaagcactgctacacattctggatctgatttttttttcaaggcaaatattttgtatctgattttttaatttttttttaccatttataagaaagtatcactgtatttttctataaaactcgatacctttatatgccttttttctagtgtagaattcactgaaaattttgatatttactacaaatactttttaaaatttctccttgttaattaaccataacataaattaggcatcatgaatatgagttagaatgtgcagaattgttgaaatctcaatgctacaattgtaggttaggtctcgttggaaaaatctctcgattactaaaaaagaaagacatgaaggcctttttctggatcacaaattttacaggatttttgcaccgtccagttctattcctttaaaactatcctccatttcaacgaggtcaaaaattccacctatatgcacgcaccgcctgggcgagcaccgatcgaatcgtcggagtccggccggccacctggcgccgccgccgccgctcgtgatggcggcgcatccacggcacctcggccggccggcgccgcacacgtgtcgcgctttgtgctaattaatctcgttcgtttccagccctaaagctagtcgtaattagctgttactacctttcctttaaagtagcaggacgcaccgtgctcaaagtatgtatcatgtgtgtctacacagtgatccaacagtactatcaccacgtgtgcatcatccatcagaaataatttattaaagaatatagtaaaaacaggtaaatattaatttacggaaaataaaaaaatgtcactctcacaaaattaatgaatttgctattgcacatgtacaaactcgggtgtacaaaaccttgtctaatggaggtttttctcgcgccacccgtaggcgttcacactctgtccgagaaagacaaaggccagttaagtcactgacttcacactgttcatagtccacattaagccgtaattaattaacctaatcacgtgattaattgactatcaatatatgcagaaccaaacactgtaaaattaattagaacggatgcgggtggctgcggctgatgccgttcacgttggcgaagaggccgacgagctcttcccggtaaggcaagaacgtccgccgcggcgtgcccccgccggcgctggtgccggtggcgccaccgcccttagcgccgtaagctatcctgtggatggcggcgaccgtgtcgatctctgcggcggcggcctgtgccgtcttgcggccgcttgccggcgtcggcttgggtggtttgggtttgggcttgaagtgttcgacgtcgttctccttgctactgggcggcgggatggggaggaacaggaacttctccttgccgtcgctgtggctgcggccgacgacgagctcgctgatgcggcgccaccgcgccatggaccccgttgagccgctcttcctgggcgggcgcggggaggccgatgccgaggcggagccggcgccggcgccgggcgtccagagacagtagctctccggcggcgcgccgtccaggccgccctcgtcggacgccggcgcggaagacgacgacgacgacgacgtggacgtggaccacctgtcgaacgaaccacgggactcctcgaggaagagccgcccgagcgggcccctcgtccgcggcggcaccgtcgccgcagcgtcgtccttggccagatgctgctggcgatcgcctcctcctccggcgccggcgcggccgaaaaccgggtagaacggcttgatgcggccgtcggcgaacaggtcgtcggccacggcggcggtgcccgcgggggagtccctgctgacgaaggggaactcgaactcgaactccccatcggaatcagattcctcctccactcccgtcgtcgtcacgtcgctggaagaagcctccgccggcagcacgtcagcggcgacgtcggcggtgggatcttgcggctctggaatcctctcctccatggtggcaggagagggggaaggaatgagaattgagagataggaggaggagtagacgagaggcgacgacgcgggtggataagaaatggagtcagagagcggcgtttataaagggggtgttgcaccggtgcacgtcttccagaagctcgtgctgagctggtgcagaccgtggaccctgcctgaagagaccctccccaagcatttctgaattctgatcaatggcgtggaattttcaaccaaacgtgactcctttgaaagttactgcatccatctcaaaatataaaaatctaaaattaaatgagatattttctaatactacgaatctggacagtcgtaatagaaaatgtcttatccgattctaagttcttatattttgagacggagatagtaaatactccctccgtttcaaaatgtttgacaccgttgcgtgtttgaccattcatcttatttaaaaaatttaagtaattatttattcttttcatatcatttgattcattgttaaatatactttcatgtacacatatagttttacatatttcacaaatttttttaatatgacgaatggtcaaacatatgctaaaaagtcaacggtgtcaaatattttgaaacggagggagtatacaagatttacagggctattttattagaaattagtttgatttttaggagaaaaaaatatctaaattcctccattcaaagaaagccttaattacctcatttatgtttttttgtttcgacgatgcgcaaaagcattgtaaatctctgtatttattaagattttgtttgggaggggagagttactacaatttatgtgatgtgcttgatagtgcagcggtaagatgtgtagtttcaactctgagattatgtatttaataatttattcttaaaaaataaatatcataatttcatgcatttgcaccaccaaaagcatgaaggagctcgccgtggtagggaagcagtttggacgcctggtaacattaacgattagccatacaacgattcagggtaaggcatcaggatgatcaatagactcgtcatgtccaacaataaaaaaattaacttagatatgtttgcgggtgacatatttcatattgatctgtcgtatcaaattgtttttttatctttgagtcttttttttaaaaaaataaagtttgataaccatttgaaaggtataaaaaaatgaggaaatgttctcttcaacgatgaaaacactttttcccattaggttgcatgatcgtgtttattgtccagtatacgatgcatgatcgacagagaatatgaggtgttttaactaacgtaccgttagtgtgttactgttatagctaactttgcactgagcagcattaccatagcagtcatatcatccatcattagtgggcgcgagatggattaatcaatgacacgtaccgcatgaaaatgatatgattcgagtgcgcgctcccaccgcgagactttgtgtggactgcaactgcaatagtctaaagggaaccacttcccttggactccaagtctccctttgcgccacaaatcaaatccacaatcctagaaaatcctataagagcatgcatgcatcaacgaccatgagaaaaaagaaaagattagatatgaaatatacgacgacgcatgcatcatacagtcgctgtcttgccctgatctcatgacctcatgaattaaagcggagaggctggagatcggtctcatcatgtttgctgttgacatgctacttcaattcttccggatcaatcgatcggttaacgttcggttcgtgtgtctgtgtgcatgcacaattaatcgagagagaccaacatgccatatgcgttcccacgctggttacacacggcggcgaactcaaactcgtggagctaagctgagctagcgccaggagccagggagaaagaatcagggtgattaatcacctagctaattactccaagattggcaggaatggatggatggggtggctggctggattctctcgtttgtccgttggtccctagctcgcttccttgcttgatgcgcacgtcgaggtggagatctcgccggcgtttagcgttttcatggtttcttctcttctttcatacggcggctgccgctgctctgcgcgtgatgttgatggtgacgtagcggccggccacccggggggcgtgtacgcgtggcggtgcgcgtcggcggtaggcggtgcggtgcggatgggttgtcgtctcgtttcgtcgtccgtggaattcggcggtcacctcagctgccggcgccgcggcggccgtggccccgtgtggtcgtctgcgtccggcgggggtaacgcgaggatgggctagttcgtgtgagtgggccgagaaggtgcggcctgcctaacgctgacgagccagtacgacgttgatgtgggccgatagatacaccggcgctaggcctaactggatcgctctaccggttgcgcaacaaaacctgctcggccgttctagatggctacctaggaataagttcactttgggtgcctctatttgtcgtccaaatttcgtaccttgatagcaaaaccgggtacaacacgttctccaacttacgaaaccatttaaataaagtcccttgatagtatttgaccccggttttagctgaggtgtgcctacgtggcaaatttgactcaatcttcatctgacatgacattgacgtggcgcttacatggcaattcgatccgaaaaataataaaacctatggaaccacatgtcagttttacacacacaataataaaaaatggtggggcccacgtggacctcacctatcatcctccctacccttctctctatcccatccctctctatcctttctccttcctcttctctctatccctctctctctccccgagaatggcgagcggtggcgggcggcgacagagctaagagccggtaggcggcgggtggagcggtgccccggaccaagagtagcaccagagccagtagggccgccgtcccgccgcctacggcaatggccgcgaccgccacgccggacaacttctttttcttcttcttctcggccactggcatggaaccacctccgctgcctcgtccatccgtcggcgtgccatcaggagacggaaagaacggctcgcatgggcggctcaggggcttgccgctgagctggaggttgccgacgaaggactcaggcgggactgcttgttctgtttttctccggagattgttaagatattctgcttgactgcttgcctgacgaaatctagagcatgcatgcgcataactgtgatgagacaaccacatgaatattactacctccgttttttaatagatgacgccgttgacttttt

SEQ ID NO: 5977 - DNA, 22085 bp, Oryza sativa
aaaaagtcagcggcgtcatctattaaaaaacggagggagtacttgacaacttgttggatcgatgtttccgcggagagcctcgggcaagatgtcgatcttgaggaacggcggtagtagcagcccgaggaacttggtcgtctcgccggacatcgtagggatgtgcaggcttgccacgtcgagaaggaggaggggatcccgccggccaggtcgtgggtgcggggccggtcgccgccgggtgcccgccccactccgtccaccgccgctccttgcccgccccacttcggccgctgccgctccttccacgcctcactctggccgccgccattcctccccaccgctccgccgccgtcaccgctccgccctgccgctccggctggagagagagaagggggatagagagaaggggtagcgaggatgacaggtggggtcccaccattttttattattgtttgtgtgaaactgacatgtgggtcccataggttttattatttttcggatataattgccacgtaagcgccacgtcaatgccatgtcagatgaagaccgagtcaaatttgccatataggcgccacctcagctaaaactggggtcaaatactgctgagggaccttatataaatggtttcgtaagttgaaggacctgtcgtacccagttttgcgatcaaggaacgaaaatcagactgggcgacaaataaagggacccaaagtgaacttattccggctaccgacgattgcggtcccgttggatcgctatccatgaatggaataagtcttactttgagtccctctatttgattcgtgcccctcaacaattgtaccagatatcctaaccccctctactattaaaaccggtataatttaacttccttgatggttttgtgagctatttttgctgaagtggttcattggctaatcaaataactgagtcagcacatgaggcttcgaacacaggtcgtctagtccaccaccttgtgaagcttagccggaagatctctgggcgtttcttaagggagttaaagtggacttattccatccaaaacatggttagcctatttgggtagtatcgatctctcccgttctttctttccttccttcccttcccttttttttcttttttttttgcgagaaccccttcctagttcttacatcatgattttctcttctgtagacaaactcaaaatccccacgcactatatatatacgagatacagaaaaacccctgatgaaattaagtacaggcttctacccacagttagagaatgcagatattggaaatgaacaattcccatataattggagattggaattgaatgagaatcctgctgagtccggtgattcatacaccaaaatctacggctcagtatcaaaccttcgatttgtgccgttaccgtggtagcaggcgtaggagcctttcggtctgtcaaacggtgtgcacaccaatggaggcccaaggatacagtcgtcacggtagtgccgcaaagctccgtcgatctggttctcttctgctgtttagtcgcatatggaagtttgtttccttagattggttaatctttacctcattaaagatggtgtttctgctacctttgtatccatctgtgatgtcctggggtgtatccctttaactctgtctttgttaataaagttgtttaagtttttttaaaaaaagagaatcctgcggatagaaagcatttcgacgtcaccagaatctggatagagtttaaattagctgaaacgaaagcaaagatccccatggtttagccccctggattcagtgattaggtctaatctaaaaccgatccttgccgcggaataaaggcggggcctatcgaccactccccatagaaaatttcagaaaaccgggcagagaaaattcagaaaaaccaggccacccccaccaagcgcaagcgcgcagaaaatgacatcgaatcgagccgatcgatggcgcggctgataaagttagccgaaagccgagccgccggagaacgggccgcgccgcgtgcatatgcaatccaaaccaagaggctgccgtgacgtgtatgcgtatagctccagcagccaagtgctaccaaaccccgcttccaacggccggccagagagcgacaccgtggtaaaacgacggaagagaaaaggagtagggaacaaggaagctgctagaatcaatttctttgtatattgcacgtttgcaaatatctagactgggtacacaacttgcatatataacagagtagcacatggattggactccggccgtactacctccgcccccctaaataaattaatttctgattacgaatttggatataacatagttaaaagttggttaattatttttcagtgataagcaaggtatatatggtatcttcgtcaaacttaaaatatgctggcttagtttcttgagagatgcttatataaattgtgtatatgtttatagggatgagtatgcgtatattataagcatctacatttatactatatatgattctaaaacaaattgtttttctttaagatagagggtgtagattgtaagttgtccatgcatacatgcatatgtcaatcttctcttcgcccatgcatatatacttgtcaagctcctaggtggtccaatggctgtcctagttttcaccgctagtgttaacactattgaagacggaaaacccttaaatataaataactacggtctaaggagtagtaggaaattttcagcctcatcttttggcttatgctagcttatacttatacttataagccaaattttaaattttcaatcttaaatttgaagttaattttggagtttttttcatcgtagcttatttttcagcttttgcttttagattgccaagaacacatatataaaatttttatttataaattattttctatttgtaaatatgttgtttcgcttatttcgatggagtccttttttgatggttcaatcactgtatgctaccttttactataaaagctagtagttcataaatatgcagatagtgaacactggtgttaatgtacaatagtgacatgtactaatagtatcctagtttgaaatttcaagctcacttgggtcaaaaagaattttggtagctgacaaattacgcatgttaaacgctcctattacatattcaactgttcaagaaaaggctcttaaaggttattcctaacaactccactatttctttggctcctaagcatgtgtaaagattaaccatcaagcaaacctctggaagaaacatcttggatggtagtatggtacgacctgtagcttttctcaggatgtttttctgtctctcacctgcttccttaattaactcctttccgtcctttgtacttgttgtaatggagtaccctagtttatgcatttacgcaccttctcgaaggatttgccttgcacaaacaggccgggtaggtaaaagaagagtaaattttataaaactatatggtttatggttaaagttgtataacgtcatatattttaatacttgtcatttaactatattttggtactaaaatttcacaaaactacattattaacaaatggatccacccattagatgacgtggttctttccctacatatatttaggatgcaggcatgaaatggtgaatgtttcacttaggataaagctcctgtgtctacattctaggtgaaatatccatatcattttgcggtggacccgttcgttgataatatagttttataaaatttcctaaaactgtaattaattaaatgctaagtttcaaagtgtgtatatttaattttaacttagatcataagatataaagttttgtgaaaaattgactttctttttttaaaagaaaaaagacttgcgagtccagccgagccgagccgagctgaaatccatagtagccaccctccgtggtatatatccacgtctcccttaaacgcaacccctcacccacccatcacacacgcaaaaccaccgtcgtatctattgctgtatcaaagcggagacgccaagccagagtcgacgattcgattaaacaaggaagaggaagaggagagagagagagagattggagtggcattagcgcgagggggaggcgggcatgggggtgctgcggagcacgcagagcatggaggcggaggtggaggagatgcgcgccgcgctagcgctcgcgccgctcggccgccacggcgcgtggaggtcgggggccgcggcgaagcgggaggccggggcggaggagggcgcggcgcccgaggcccgcaccgtgtgcgtcaccggcgggatatcgttcgtggggctcgccgtcgtcgaccgcctcctccggcacggctacgccgtcaggctcgccctcgagacgcaaggttagtcatcgcttgtctggcccgccccaccccgcccttagcagcagcagcagttgcgtgttcgtcgaatggggaattattgccgatgagttggatggtgtttgcttcgcatttgatttgacatcggatcatgccacccgggagttggtaccagtctctgtttgtgaaatctgttttggtacaccggcaaaatcgactgcttatttttaatgcctgcaaaatgcaatgcagttcgattcacgtacgtcttcaattttagtcagagaaaacaagttcaattttattactaatcccttgtcgggcagaagatatccagtaatttagtccaaacttgtaccaatccgattttcaaattttatagtatgcaaagtaccactaccaaattgcagtaataaacgaaacttagattagttagtatattcattttggatcatttatgcattaagtcattgtctctaacccctttgcaccccttgttttagttggtaaacctttgtctttttttgctcaaatcgtattttgtttccgcatgcttcggttcatgcttggtgcgttgtgctgtggtgaacctcacgcgatgagcgtgttgcactttgaatgcacgcaccaaagttccgttccctttttgctattcctttttttacgagtcgagggagagaaaattttttgagtgactgaaccattttgccattttggcacttttttgttggaaccattttcagtgaattttttagtgactgaagcaatttttgctattttggcaaaaagtccaatttttgttccaattcctggaaatttttttgagtgactgaaccattttgctattttggcaaaaagtccaagggagtgaatgaaattgctttggtctccaatttttgttgttgttatttttatttgagtgactgaaccgttttgctacttaatttggaatgggaacttttgcccattaagataatcaacttcgttctttgcagtatggagagcatatgacagtagttgatctcaattcattttgtttgtctagccacttctggtatttggaggttccacgcatgatgtttggtatctccagtcctctttatgatgtaaaaaatattaggattggtagcatgttgcatcaaaaatggtccgcaacgtatcgccatatatcaccttcagtaatgtatctttcacaatctaaccagccaagtcactccctttggaaaacaaggacctactaagtcatgcgtattaaaggagatgtgacatttttctcccctgctcgctcactccacttgtgtgacatagggtaatttggtcggcgaatagagcagaagcaaacttgtcaaaacaaaacagcacaaataaactgcaatttccacagcagcacacaaatgtatttgtttctagtggtgtttacagcctactttaccttgtaataacttacaaggcacacaggttacaatctcctttgacaactatgaacctttttgttttggacagtgggaacctggggattgcattagcacaaggataaggtcctctcttctttatcagtatgctgataggttcacctcatcttacaaccttctcaaatggattgtttggatgattaatccgacaccaaaaggactgctgatgcaccccttcttgtcccatagctgttgtcagttcaaaacgtgtaccatgccaatgaatgaggatgagaaaccgtgggcactaagttagattgtaattaatggtaaactgaagtgaattcttctgaatttttttttctttgaagctatcttctgaaacttttcttttctatggcagaggatctggacaagctgcgagagatggagatgtttggtgagaacggcagggacggtgtctggaccgtgatggcaaatgtaatggacccagagagcttgaaccaagcattcaatggttgtgttggtgtcttccacacatcatccctcattgatccagggggcatctctggctacacggtgagttgcttgacctgtgttagcgttcatacaatatgtcagataagttcccctgcttatttggttcatctgtggaacaagtatgcaatcttgatagtgtcatctctcctacatattaaaatgtatgagccacatccacaagcatcttgtctctattctctatgaatacaagagtgcacaatatgggataggtagatgtcatacctcatgaatcaggctaacacacagcatcacaaatcacaatcctattagactagtaggatatagtttttaattaaatgcatttatagttagagtacactttatgctggtaaatacacaaatcaaaggtaggccatgtgttctagagcagtagtgctatataactgctgaaattattgttggctattgacattatgaattgaccaatcatttcttctccgttaatgggcaagacttgaatatctttaacttaaggatgataagaaccaagtcagaaacaaaagtatctgttagccaaggcaactgactgatcttttggaaaaaatatcaacttttttgtggggcgaaaacattatcaacttaccatgctgaaatatcgaaaaccagagaaaagtcattactcattactggtctatatgtcccactaacacaatacaaaagtatacagagagttttatagaacttaaaatttgtaattagatgcgatgatccaactaggtgttgctctttagggctacacgaataaacagtgcctcggactaggtggtaggtatagcaccaaatataaacccataaataagtagcataatgcttttaagcgtggaccagtgtttgaaacttcaacaaacaaattgactgagagtggtaccacgtaatctttattatatcatatatgatgttgccatgtactttaggttcatctagattctaatcatagatatggtgtttggtttattggttctactcagcatatacagggaaacatcttttagtttttttctaataaagggggaaaatccagcttacatataaataacatacaagaaaaaaaaagagtgactcccttagggcatcagagtattgtctgcacaatcaacacaatagggagaaacagcacaatgacattgacacaatccctacggatattgcaaggaaattcagacgtcagtcaggaacagcaaagagattaaactcaacaacacttgtacagttgtacccactacataggcaatcgaagtgttataggagtcctgagtccatccttacgcctgacatcttttaggtctatcataccgtatatacagtgtgatttgcacctgcagcctataacattcatcctgtgatgcatatgtttcgaagatatgaaaggcagcccattactatctcggttgcagttgaaagctcagccacttgacgaacagtacgaatgtttgttcatcgcttctctcttttctcagttgtagtaactaacagcgcacttgtcagactttttggtcaagactcaagaatgacctgaacaaatcaaatggttgggtggtctattgccttgttccttttgacattccctgcaaaatccatactatttttgcaaccgcatgtttcactattcctcctgtttgcaaagctaatcatactagataaaaaaaaaaactaaccttttcatatatcagatatacttttgcctttattttacgatagctcattatgaggacttaagaggcagctgtggttctagaacaattgctttgctagatttttattagaataggcttgctagactttccagttttattatctatcacagaagtaatttaaaaattatactccctccatcccaagataaaccaacttcgcatgggatatgacatatccatagaggttggtttattttgagacggagtgagtatgttgcatgccatgattcattgttagttgggcagtcaaaatcccgttttagtgagcatggggcattgccatagccttaccaccagatgagccaaccaaagaatccgaaactgattgggcatctaatggtttcagtgcacttgcttattgacgtgatccactgattcctctatggtccactcatgtcaacatacatgttgtagtagtagtagttaagtttcttcaaatatatatttttttgggcaagttgtaatgggttctttaagtttgttgtaatctatattcaaagcctggaacgctgaaaaccgtatggtcttggccagcttcacagaaagaactcttgcaatttcaagtttgtgtgataaaagaaaatgagcaccgaattgaaatgcctttgctttcctaacttgtccacaccaatttcaacagaaacacatggcgattctggaagccagagcggccgagcaggttgttgaagcctgtgtcaggacagagtcagtgaggaagtgtgtgttcacctcatcgctactggcatgcgtgtggaggcaaagctaccctcatcaccgtcgtcgcttccccgccatcatcgacgagagctgttggagcgacgagagcttctgccgcgataacaaggtgagagaggacaaaccaatctcgaattctcaaatcaatattgctgcgtttaaaattaaaagaacataagaacagctaggaatcgaagcaagcattctgaatttctaatggctgggtcatgacgaacattttcagctgtggtttgcgctcgggaagacgatggcggagaaggcggcgtggagggcagcacggggcagagacctgaagctcgtgacgatttgcccggcgctggtcaccggcccaggattccgccggcgaaactccactccgtccatcgcctacctcaaaggtcagtcgatctcggcgaactatactactctctgaatcaatccgatcgaccggagctaagctctgacggacggcggcgcgcggcggcgaactgttcggtgcaggagcgcacgcgatgctggcggagggcctgcttgcgacggcggacgtggagagggtggccgaggcgcacgtccgcgtctacgaggcgatgagcggcggcggcgcggccggcggccggtacatctgctacgaccacgtcgtccggcgcggcgaggagttcgccgagctgcagcggcagctcggcctcccgatcaccggcgtggcagctgcctcgcggcccggctactccgacgacggcgacgtcggcggcgacgggcggttcgcgctctgcaacgggaagctggcgaggctggtgtcctcgcggaggaggtgcacctatgacgtctactaccccgcctcgtacgactaaaaattaaatgaaagcgtcgagttcgtgggtgttgcgattcatcttgtacagaattttggtgcgttaataaacctagctagatagaacttgtacagtacaaaacatgaatatggatagaaattagaagtagtagaagagcgatgagcaaacgccacagtgcggccggaagattgcggagaaagacagcgatctgcagaccatccaaagtcgatgactccaacgagccaaaccaaaattttgttcgtcacgtctcgtagaaaaagccaagaaagaatccgaagatcggagataaggccaaaattttgtcaaatgattttgaccaagtgtatttggatggaatactctcaaaatcaatggtctagtggttcagttcgtcttgggccttgaagaattggcagagtggagatacgtccgatttgggccgaaaacgccctttcgtgacggcccagtagaattcgagaaatcgtggcctcatgggccgagttaggtcgctgcaaaaccgagaccgtctccttcctccgcgcgcgttggcgcatttggtcgagcggctcacgggcgccactccttcggcggcggtcgtggcgacgacggcggagattttggccggacagcggccgtagcgcaaggcgtggagcggagcggggcagtggctgggagcctggggtcgatcgcgcctccgccattgccatctacttgaggactccgcctcccgcggcggctccaatgctccgtccctgttccgcacgggcttctgctactccggcgacaatgacttcgcagccggtttgcctcctcccccgctccaatgattctaccctatattcgccttgtggctgtttctactactgtgttgctagaatggaggggatccccgatttccccgtagtcaaatcaaaggggttagggattcgattgatcccccacctatagcaatgtctgaaattctgattagtgaagtagtatattttattatttcgtttctgttattttatctacctactgcgatgaacatgataatgattctgtttcatccatcttaatagtactttttttttgagaaagagaggaatggtcccatttcattaccgaaattgatagcagagtgactagtactacctcgtatgtatgcatgatgcatctagaacaatgcatgaacactatcccttacattatcaaattcctacatttcacttcaagagggaagctggtacatgtcctgataaccatatactatccttgcataaactgtatatatatacaccacacgatgattgtgcagaaagggggtcggaagaatcacgacgaccaccctaaccaatgaggaccaggagtatagtatttcctggatcacagcatttccactcattcagagagtttcaacatagatcataatctgacatcacgttgttcccagatggtttgccgatctgcaagcaggatatgggagggatggtgggggtggacaactctccaaaggcttgccagcagaatgggttgtacaggtgatactgtggcactatcaggggtttgagctgtattccagtaagagtgatctctgaacaaggcgagctatcactgcatgcaaaatgggcaggcttgattgtgaaggtccccctgatattctcgtactgaacacctaaaaccgccactgctgatgtttggtttctgcaagttgttctgtcacagtaaaattggtctattatgataggtgtttgaacttctgacacttgtatgtttgagaaccttatgccttgaaccaaccctgaacctccctgcataggaatgtcagtgttttttagctctgtgtatatggtggtcattgttggactagtcacatcatctaccagattatgcttacctgccaagttttgattctgacaccagtcattgttttgaacatgttgacatctcttacggtgacattggatacacatgcttttgtgttgtaccttcctagaccaccaatgctgatcccatgccctggtccacagttcacattatgtatgtttatgtcactgcagcctgtctggatggaaacacaatcatcgcctgcatcacagagagcaaatattacttcagatacttgtactagtgtttttagctttcccttagtcctgaatcctgtcggtttctacaagtgagcactgaacagatcaattggcatgtagtttatttattctatatgttacctaaagtaattaattggtagactttgtatgtttctgtttgatgccgatttctccccaccaagccttgccaaaatttggtaacagcttgaccaaacaatgccaaattatcaagaaatgatttatggagccaaattggaatggaattttgtcaatattatgaagcccaatgcttgtcgtttctggttagtgccatcaaaatttggtgggggcgaaagtttgcagctattgccatcaaatcaatcagcaccttctttctttattttggcaaaacctttttttttgaaaaaaaataaatcgagaatgcagcactatattcctatctaacatatcacatttgaaactatactggcttactgctttgattgagttaatgagagcattaccgcaagcgaggttagagtggtgaatgctgacttgtttggaattttgcaggtgtattccatcagtgttgggactgttctcaggcgatgagatggtcaggtcatgaaccattactccttgacagctatcaaacttgagatggcactgtgagctgttaacaatggtgataccagttactgtgacattggaactaccataaaacctcaatgcctgcatcaatgtatgtaaccactgttttaatttgttccagtaggcagttaccaatatgttcaagtatacaaatgcaaccaaattttgcttactgtaggtttaatctgtggcatcttctccagctccacattgtactgttggaaagcattcaaggtaagcaattaaatttgtctacttttgacttgctataagtgtgattgttatagatgatcaggccttacagcatcaacatcatcattgtcgtcgtcatttggatctgaataggtccaccattcttgccccctaccatttatgacaccacttccttgaattgatattccactaagttttgtgaattcaagccattgaagcaaaccagaaccccacactcttgtactggtttgagctaaaatagttccatctagctgcaaaatggaaacacgatatttaataacagcatctctacttcttcaatttgttctaaaatctggatgggtacactatagaaacattccttttgagctcacatctttcgacaaacaaagatacactcagttcctgatggtggttataatatggttattaaacactgcaggcactataataatattgggccaaaatgaaaaaaaaaaagcagcagtttttagtcagaaaactcccaagtaaatatctcagttgagttgaaactgatatatatattgaattggtcaagattgtaaggagtgaaatactacaaccatgtcatttgttgaataaagtattctggtatatatgttttatttcaagcaacggaagacacttattcctgtcaatgatatgccggaatacacattaggacaaggattagagttacctggaacagaatgtttggtttgcagtaaggcccagaaaatgagattgggccaacgacaaactcaagttcagatggtacaagaactgtagatgcctccaccttgcatgctgctgcccatgcttcttcaaaagcctgaatacatagacgataattaagttcaaccttgtttggaaagaacacttcactgattgaatatgaacccaagtatatgctcagataaagtgtagtcagcagtctgctatttcttttagtcatcgctagaacatctttgcagcacgtaactcccaggaggagaaaggaagcctttcttattttagaaaatacattcttatgctactggttgaattttaggataatttttcaactgataacgtggagtaattgaattcagtgttgattttcttgattcttttcaataacaattggacacagcatgaactgacaatgggaatcaatatagttctatactaaattcaaggatagttgtattctgtgataatcagaaaattgcatttgttagcccatgacatttctggtacagtaaagaaatccaacagataccacagaaatttgtactcttgtcaaccattcatctatatgataccaatttttaataatttaaccccaaatcaatgcaatatcgagtaggatttgtaaagacatgtttcttttcagggttgcacccaatcatgtgagaaaagaataatataaacataaaattcaaatcaagcttgttgtgtcatatacagtttttcatgcaagattcctactctgagtaacacatagtgtaatattttcaaaggccggtacgcttcaaagttcctgttaagctctttttaattttttaaaatagaatttcggccatcttatcactgcagcatgttaatgtgaaatgtattaccaaggcaaaataaacatattcttatgctataagaatgaattcttcacaattgagaagcaatcccaatggacttagaactttctttgaagttccaggaaacgcagcatgctatcaggtattgcagtctgaattatacattctgcacttgagcctaaagaatggctagctgattgtaactgacaatagaaactgaagcatatcctaatgttttaaaaaacaaatgaggaactcttaacccagaatgaatgatgcaggtggcacaattttttaagttgaaagcagaacactttgagaagcagtgcggcagttacctgcgtatcatctgtaactccatctccacgggccccaaaatcaaccacattgaagactgtgttctgtgattgggctgctggtggctgtggtggcggcagcaatggaggcagcggcggtggcggagatggcaatgtatgaccacttccactgcttggtggtggcattgttggagccggatgtcctttgccctggacaggtctttcgctcgggttgacgggcacattcgggcttgtactcgggcttggctggtatggatcctgattccctttgccatattgcttgtgggaattgttggtctttcctttcccttttcttcgcagcagagtgctggaggatgctctgttttgcctccagtgcttgccacttcttgcgtcagataaactgacattggaacacagaacaagcaagacaaggagaagcaggaaggtgagacctttaatcccaagccccatctttgcttttgtaactttgtatctctcttgttctgagagaacagtgtatgtacgtgtttggaaggaagataggtgggtgagggagagggatagagtttgtggctttgaggagggaaagagggggtttaaatagagacctccattgtcatctttgcttcctcaaggctggagcagagaaatcggaataaaaggagggcttttctttgggaccccaactcacgtgcatgcttgagaagcatgaattgcattcttgcagctgcacggagaattaaaggtgtatacttgtagtttgtgcttttgtgcatcaccatcacagttttatcccttgtggtttcctttatggtgttctttttgtgagaatcggttggagtaatcacacgccctcattcctcaaggcttggccctgcccacttgccatagttcagaaaaactagacaagacagcttatctgtacttatgtactaacggttcacggggtagggaagtggcatgtctttgtgcctacatggaatcatttgccactagtttattctttgggtagggcatgataaggcagccaggtgattaaactgacaacatgctttatataccagtttgtttaccattgtcaggctattcttgtcacaattttgtcccagactcccagtcatgagaatttacctatatgtgggtcttttttcatgcatgcttcttctctaggaaataacccgtgagtctcattaatacaactactactgttcaggtatccacctcatgatagacctcgctttgaatccaatcatgccctttacacgcaggaactcccaaatgcaggtaatactatgtactatgttgtaactttcttttacaattttcttaaccatattttttgtgaggaattttcttaaccatattattttaacagaatttatagaacaattttgcttcttgagtggctttacatgttcgtcattgcgcgcaacctcaatttttattattgcgggcagacacttgaatggatggctggctggccccaagagtcatgggatgtgggaagcatgctaagaagatccaacatatccctcttggcaagtggaaggtacacttggcatgaccattttctgattttcagcatacaatgtaatgtgcatttataagcttattagagttcgggttttcatcaggatcactggtttcctactgtatggctaaccaattgccgttcacatgctcgcagggatttgtcacgggaaggagtggccggaccaactgccgctaccggactagggagaagggccccccccatcccaagttgcccaacgccattacacccaaacataaacaaagccaccaacctctcctctctagtatgtaccatccacgtcgccctgctaaatctccaatctccaatcaatcatccattcatccatgcaaccacccggccgcgcgtgctggcacgcatcagcaccactcatttgccgtcttcaactctcacaagtaagtggatgcgtacgtgcgtgttcgtggctgccgaatgtggcaggtcatctgcagaaaaaaaatatccctgcatacaccaaaaacacatgttgcgttattggctagcttgccactcctgcatcgtgttgcattgtttgctagcatgcaattcctgcagcgtgcgccactacatgccactgtccatggattaacattggatggatccattaaacttacacaggcttaatgccttagcagcttgcatatgtgataatgtggcatttagcttacacggaaacaacatttgtaacattgtcatgcttcaggttttcgccattatgtatatggccaagatagtcgtcaccggacaggagctgttaagcaagcttactgtcagcagcttgggatggaaggtatgaatacttctttctgccacatttttccattcaaggccaaaaccgttaacatctatagcaagtccttccaaagctggactcgagctgacatggtcatcgtaagatcacagccaatctgctgtgtcctctgcgttagttgtaccagttgcaacaaacccttaaactatgagtagtaactactactagcacccataaaatagcagcagttacgtaccaataaacatatctgcattcaacttacataagttttcttctgtacctgaattgtttggacttgagtggattaacacatcaggcaggcaacagaggaggaggtgtcctagcttttgttggctcctgagacatgcgtgcagaggattggtggctgttcgtctctcgcgttcacgggctgctgcgtcctgccaaatcggcccgattcgcctgcgctgtaagtgtctgtctcttcccccttctgaacattattgaatgagacaccagccgcacatccaatccaccatcgtattattgcaacgccctcgctgaattttcagtagtctattactacctccatcctattgtaagtgtaaccatggttttccgcgtctaactttgatcatccgtcttatttgaaatttttttaaaaaaattaaaagcataagtcacgagtaaagtagtattcatgttttatcatctcataacaacgaaaatactaattataaaaaaatttcaaataagacgaacgatcaaagttggacgcagaaacttatggttgcacttataatgaaacggagggagtacattacaatctgcaatttgctggtcgagttagagataacacgagtttgttgtcagtacgggtagcaatctagcagagtcttgattgggatatgccaacaatttgctgatgcgctgcaagagtacactagagcaacgtccaaggccggccggccggccggcattagccggcacagcacgggccacggccaaagctcgtctctggcttactccggccaagttgcaccggcgattcatcgaatctgccgcacgggtgcatgtcgccgcagtagttcgctggtgcccgtgatagatgcggccgactggccgagcagccagctgcctcccaagttggtaagaattggtgggccgttattttgtttgggctggatttgcacgttggtgccgggcgcatctcaaatcctgcatgggccaggctgtattatctggtaggccatgatatgttccggccttgtggccttgtgggacagatttttggatcaaatttgttcacctgggtacctgctcttggtcaaagttggtggcagggcagcagcattttaacaaatgggaatgtgcagacactgacggtggtccccacccagtagaacatatatagggcctactgaccttactactccagctcaaccgtatctatggttctctatacctactctcgcatgaaaaaccacgacagctgagctacctcggacgttgagcttccctacactctacgtacgtacagtactcctatacagcaagagttctgctccagtacgtaaaactcctatacaacaagagtactggacctacggcttgtgtagtgtgtactcttccctttggcacgtactagtcgattactgttagggtggggtactgcctacgtgggccaatgccttctggccacctaggagatgatgttgacgtggcgaaggaggttgggtgtgggatgactggtggataaatcgctactgcgtgtggggcagtaagagcaggttcaatagtatcgccggtcgatatccatgtccatatcagctaacagttaatatattgagcaaattattcagtacatcacagctctcaagaaacattttttttcctgtgggacccaactgacaagcatcttttatagcattcatgtcactgcgtgtggacccatgaccatttttaaaagttgaaaattcctatcttgcaggcttttcactttgagctcacgtagagttggcgataaaatagtcgcccgttcatatcacctctcttcttctcagttttgctgagatggcggtactattgctggttattgtacctgttctaatgccgcttggctggcatgcagaaaacatcggtcactcggacaccaccaagggtcaaggaaagggagaatcagcatgtctcagttctcaagatgatttgcagagctcactgggatcctctgtgcctgccaggattttcgtcaaagagatgcaagtgctaagtatatcatggttatccctctaagaccaggtacaatagaagattattagccagctgcaaatatattttaataagataaaagacgagagagaagagcagcgggctacagatctgtaaccagctgcaggctgcagcacggacttaaagacgcaatgtgtgcatgacaggtgcgaccatatataaatagtatagtaagcaactattgtattaattgtctattagatcggctatagatgaattggaggtagtagtgggctatattattaaacttgctctaagagcgagtacaatagcaagctataagttaagctgtaagcatatgtggagaagagaagaaagaagagagaaggaaagcgggctacagatttgtagccagctgcagcacagactccaatacattatgtgtgtatgagatgtgggatcatatattaatggtgtagaacgagtataaatagcatgctacaagtcagctgtaagtacacgtggaggagagaagagaagaaagagaagtaaagcgggctacagatttgtagccaaatgtagcacggattccaatacgttgtgtgtgtatgagaggtgggaacatatattaatgatgtgtatatgcttataggtaactattgtatgaatgagctattaaattgactatagatgaatgagctattagattgggcaacatatcctatgcacacaggccctcacgtgtacacacgtgcacaccaactaaaaaatgtcaccaaaaaatctagaaaaaatcatacacatactttcaattgtattacacctagggttaaaatcttaacgtcaaattcattatattttagccgtaacaaaaaaaaacaaaaaatctgacagttttaaggttacaattttgtcagaattttatcttttttgttattctctatgtaaaatgaatttgaagatgcgactttgcacgtagatgtaatactattgaaagtatatgtatgaattttcctagaattttttgtgataatttttagttggtgtacacggtgtgtacacgtgagggcctgtgtgcataggatacgctcacattagattggctataaatgaattggagctagtagttagatatactattaaacttgttctaagagtaaggataatggtagagctcaattactaatattagctcatcttaaatctaaatatacagtaatagattagttataaggttggctacaattttcttctctcctctctctatctcttagagcaagtattgtcttataaatgtatattgtggtgcagattttaaatcctataaatgcttatatttataagagttttataaacaaaatgcttatgttttggaagagatgagtattttgggacggagggagtatataaggaaccaggagaattcctgcgggtgaggtagacagaaacaagaggagtacagaatttgcatgggtgaatgtcgttgtataccctagcaaatagcagcaatacatgaggtagggtacaaagaggtaactgcaaactgcgtacctctaactatctcaaaagatgctctccctgtatatctctcgtgcttaccgcataaaaccattcttaaagcaatctcgaggcctttttaggcgacagccttttgaacgacgatctccttggaacaaccaattgataattgtcctctgatgcattgtaaacaatgtgctcgcagttgtactacgctaatctactgctcgtacttaatcaattgatggtttagctgaatgttttgtgatcacacgtgcacatccatgtgagtttcaagtttgtctagtgcggactagaggttgggcttgataatgttgcattctctcctactggagtatagtacatttataattttattttcaccggttttttcaccatcacattttaggaatagatagcataatcattaattacaacttgcggttcatgactcctagggggtgtttgggaactagagactaaatttagtccctctcacaaaagtacaagtccctatggtagggacttatgtttttgtgagagggactaaagtttagccccactttagtccctccaactaaacaccaccctagagtcttgactttatactacgctattctttgaactttcttttttttgtaaggcatttgaattggaaatttcatactttatgaatttaatcaactgttaaccaagatataagtacatttaatttgcagtacaaactataccaataggtacatactccctcactcataaatattggtatgcataaattaggaataagagaaaaaagattctcttccagtcatcttattgattaagtgtttgtttactttgttgtcaatttcaacattaccaaattttagcaatgctttaatttttataagttttgacgttgtcaaattttgatagtgttggatgtagtttgatgcctttctaaaatttggtagtgtttttgtgagaaccaagttttgaaactactaaaatttagtaaaatgatattggtaaggtaatgtttagtttgttaccctaccaaaatttactaggatcgaaagtgataataaaatgaacgtaccctaaattttgagctttgaattgcatgtatacccctcttacacaattgattggctgaaaatgcttgacctcccgtgcattgaaatcattgtcttgaatgtattcgggaacagatgggggtattcaaattagttttgcatgatattggtttcaattattactcctgtactacttattctatgaaaagtccatgttaacgtttaattttgaagaaagttttaaaatatgtagttctgtaataacgttagcgttaaatctataattttgtgatataatatctttaatttttagttttgtgatagtttaatcaaagtatatgtggttttgtgaagtttactctaaaattaaagtttgtcatacaaagatataatccaaaagtagtataatttttttttgaagactcggatagcactagagactagagtccatgtgttcatctaaaacagacctcagggaggggaggaaggcaggaagcactgatcttctccgacacatgctattctttccatttgaagtgtcggaatccagtgcacaaatcaaagagctttgatcaagacagacgattagacgaacccttgaacgccatgaaaaagattgcgtg

SEQ ID NO: 5978 - DNA, 13898 bp, Oryza sativa
  unsure (1)..(13898): unsure at all n locations
attgtaacatgaatgacgtcccagtgtcatttaacatgaatgagttgacagcattgctttactagcatttttttatttggtggaataagatatatttcaatattgaaatgcaaatgctaacacattagatattccaatgaaaaaaaaaaaactataaccatagaaatcgtctcacctgagccaacctctcgtcacgcctggcaatcttcctctcacgactggccttgctcttggcacgcttagcctcaaactggtcagagagtgtcttctctcttgccttctcagccttagacttgtggatactttccatgagaacacgcttgttcttgaacatgttacccttgaccttcatgtacatgtcatgatacatgtgcttgtcaatcttcttggcctcacgatacttgcgcagcaaacgcctgagcacacgcatcctcctcatccacaggatcttggtggggagcctagcctccctggtacccctacgcttacctgcaaaatggcagaataaggaatacgcagagacattttcacactaaaataacaatgaacttaattgtacacaacgcaccatagccagagtgacgtcccttctgcttggcctcatgggctctccgtgcacgggacctggagtgaatcttctggggcttcttgataatgaacccatccttgaccaacttacggatgttctgacctgcaagcacaaaggaaaaaaaatcagatagccttccaagaatttcaggcatgtgatatgagtcacagatatatacagggcaacaaacttcagtatctagaacagtaaataattaataggatattttattggttcttgcaggaaatgagttgtgacctattccaataggacattacacaaactcgcttgcagataagctacaccataattcatacgctcagacaggatcataccacagttgtacaaatggtgatgcagaatcaaaatgaaccaatgagctttagaagttggaattgcaattgcaaaactgacaaaaaactgatcctttaatggtaatcatcatttgggcatgaattgccagcatcctaactgatttaggtaacgaataactcaacgaagaagcacaaatgcacatgcatatctaaatgcgccaggcatccccttgtctctttgtatattaatcactatagaggacagttagtcacattcccagaacagcgccttggattagaacccctaacgacaaccttgatcaatcggtaacaacactgcatggtccaatctagatagcatacactccaaggtcaatatactggccatttctctaatgttctcttccaaacaaatacacccagcacaacaacctaacaactcctatagaactgggagcacgcgattcccacgaagcaataaaatattcctaccagaatcgccgggggcaaaaattttcgcgcggattagcagcatggcttcagatctaagcaaatcacgcatcaacaccacacaagtagcaggcacagaacatcatacggtaggggcaaggggagggttatgggggggagggacgaggaggggagttctcacgggagttggccatggagatctcgttgacctcattggggtcgagccagaccttgcccttgccgcatttgagcacgctggaggcgagccgcttctgcagcttgagggaaaccatcgccgccgccgccgccggcttcttacctgtgtggagtgtgtggtgaggggggtgcaagggttggccgcgtgcggcgccgggggtttatatagtgagaggggctagggtttcagcccgagcggggagactcatgggccttgggcccatcagtgtgttggggtttgcagcgggaataagttcactttatgaccctcaaatgtccacgaccttaaattacaaaatcggatatctcgacccccaaactcctaaaaccggtgcatttgactccctggaccgttttgggaggcggttttgctgatgtggcgccgtgcggtgcctacgtggcaatattgaccgagttttcggtccacgtagcgttgacgtagcacctacgtggcggtagaattaaaaaatatgcatgggacccattagtcattcacacaaaaagaaacatgggcccactaacatatgggacctatatcctcaagaactcatgtcgacgatactgtggggacgagggctactagttcctaccgcacgatcggaactgtggcatgctaaataggcgcggctcttacccccagatgggccaagtttgacaagtactccctccttcaaaaaaaaaaaaagacaaaccctgggtttgcgtgtccaactttgactgtccgtcttatatgaaatttttttataattcgtatttttattgttgttagatgataaaacatgattaacactttgtgcgtgacttgtctttttaatttttttcataatttttttaaataagacggacgtcaaatattgggcacgaaaattagggtttgtctttttttgggacggatggagtagtactgctgactttgttagtttgtgctttaatattagcaaaaaagtgtggtctgtggtgtattgcatgggctgttcctaaacatgcatgcacctaattaatctaaatgtactgtgtgggtggatcatttatttgctggtctgatagtttgtttagttcaaaaatgtatctttttttcccttccgataacgtttcgatgcacctttttgattacgattgtcgacgggtgatacccgtagaccggatatagagggtattggggtacgctggtacaaggatctacgtagtacgacatcgagtaatcaaaagacaagaattatactggttcaggccccttgataggtaatagccctaatccagttgatatgggattatatggtggaaaacacaggttacaaaggaaagatggaacttgtcgaatccggcgagattgtagtcgagttgattcgactagctcttgacgacgtggcccctcgcaggctccggcttcgtaggctgtgtgggttgtgttggctctgagattcgatcctctatgccctccccaggggtcccttttatatcgcaggtctggtggtctccgagtaggactcgaacacaccagacccagacccagctcaatacgtaggtaacccagttcttatccgagaaggactcttcccgtctattgatttcgtgaaaggtttccttagatcataaaggaaatatccgcatacgcgtgggtatgccatgtcgatacgtaacgtatatcgaagggtagagggtatgcctgacccgtaaccctgacagtagctcccgacttctgctcaaaatgaactcgtgcgaccattcgcgacttcgggtgtcgagaacgttatcattccaggtacgagaaccacggagatgacgtgtagtcgaacatgccgtttgaagcccaacggtcacgagtgaattttgaacttaagtcaaaaactgccgcgcgtaatggacctagaaatttccggcggggatttctctcagttccttggaattcgcaccgtcgggggtgcgcctatttaaagggattttgggtgcgcattttgaagtccgcccactccatcaagcacacaccgcccgttagcgctcctcgccttctccactgccgtaaagaaccctagcttcgtcagctttaggtccatctctggcgatcttccagcagcgatggatctcggcaagtcggcttccaccagcgcgaccctgaagaagctccaggaggatggcgcccttcctggccgtgaaaacgcggagagggaagcaggaggtacaaatcctcagcccatcttaggtcgcatggttgtgatcgaagattatgttgtctgcgggtttctctcttcaccctccgaattccttctgctggttttgaatttctatgggctttctcttctgcacttgaaccccaattccattgctttccttagtgtctttgtgcatctttgcgaggcctacattggggtagagccctttcttgatctgttccgcttttattacgagttgcgctggatggaacccaatagggtgtctggttgcgtcgggttccgacttcgtgacgggatgaagtcgcgctatgtccccttccagtgtccctcttctcgtagtaaatggcggaacaggtggttttaccttgaaatcaaggattcaaatccgatcctcgttgttcccgaggaacaacaagattctggtctggaccgccaagccccccttgaccccctctctccaatcgtttatcgacatcatcgatgatctccgagaacggggcttatcgggatatgaagtcgttgcagacttcgtcgataggcgaatccagccgctccaggctcgggcccacccggcctataactattccgggccagatgacgcgacccgggtttctcctcggggtatctttctcgcattcattttgatatgcttgtactcgcgttccttttcgacttatcaaaaattgattccttcttgacaggtctgagcagcgaagccgtggagcggcgtgttggtcaggtgatgatcagcggcccgactacggcgagcgacatccccgcacccttttgtgaaaggggagtgacggagcacgacgaagcaatcaatgtgagttcattcgataagcgtccgccttctttgctcaaaatcagcttatgacatgatttagtgtaggcccttcctttgactgatgtcgtcggtccgctcgcggatcatcaggtggcggcatctctgaaagagaaggtcgtcaaggtggcgtctgacgctgccaccactagtggtggcaaagctccgactaaggcgaggaaattctcgtctgtgctcggacaccgccgcaaggcggcgactccctcagtaattttcaccttgtcgtcaggttatgtagcaaggaaggtttgttctcactctatgttggttgttttgtaggcttccgacgtgtctcctccgcctgcgcgacgtaagcgcattgtgacgatcggcgagaagtaagtaaagaaacttttagattctcgtgtcttctgtttgagtggaattttgattcatggcggtttatagggaggcgcgggcgaacgttgctcgggccaagtccgggggaacgtctagcgcgtcccctgtcacggcgtcaacagatgtcgtgcccgtggtcgggagtcgggaggcgacgccaagcggccccgtcagcgatcccgctgggggtcgtggtctgccagaggccgtcctcacctgggaggagctccaagtcgaaatggggcgccttctcgaagccggtgctcgcggcatcggccgcgagatctcagaggcgagggcggagacggcggcggccaacgcgcgtgccgagcgcttggtgcgggaactggctgaggcccgcgaggacctcacgaagatgagggagctggtggccggcaacgagcgccagcgcaaggggctcgaggaccgcatgtcggaactcggggataacctctccgagatccgtggttcgctgcgggtcacctacaccggtctccaccagcttgccgaggagtgcggcatcaagtccacgatcccggcgaaccccgacgagttctcgttgacctcttctcttgcggagctggcgacggcgatggggaaatcccctccaagcatacggccaggatcgcggaggagacgtccaacggcatctataccggggcgtgtcatgtcctcgcgtgtgtgaggttgtcgcgtcctgaactcgatatgcgcgagatcttggatcagggggcggcaagcgacacgcgtaagaaggtgatggaagaagtcgatgacctgggggagtctgtcctccccctttttgaagagtaggacttcttgtattttttgtgacttgtaaatcttgaactctggttgccttcgtgcgtgtgattatcatccttgttcaccgttgatctcggaagttttttcttgtcgactgtagagatgctgatgacgaggatgtccagcagcgcgggcagcccgagtcactggcgataattccggtattcgagtttgaaccacacgtcccacatgacgtcgaggaccaaactcttgatgcggaggtcgaagtgactacaactgcctcaagtgagtagccattctaccttcgagttctacctttgtgttgttttggggatttccagcttgtcttagtggtcgttatgtttagcagatctcaaggatgcccttgcgacccaagatcgtcgtatccaatactggaagacgaaatttgaagtggtggaactcgagagaatcatgctatccgtgaagaaagagcaagccgtggaaacgctccgaggccgcgaggtgtggtttgggtcatacttgaagaattgttgcacctcgatggctagggtatgcagggagcttcgagtagtccgcggcgatcctgaagaatcggcggccgggtacatctcgtggctcaacggggcctgtgcccaactcgatggcatcggcaagcgaatcgacgaagccttgaagcaagagtgtcatcttgcgagccgatatttcggaggacatgtgttagcttgcctgcgagatcaccgcccacgcctggatctcgaattcctccgtgaaggtttttcttgttctcggaggaatccggcggagatagaccaccttgcgaggtcgatgtcgccgttggccgagaagattttccagtcaatggactggcattggctttcttggtagtatttgtaccctgcgaccagatatcttaggggaagatgtaatgcagcgaaatatttatgtacaaactgtaagaaatattttgtgaataaagaaatctatctttaacaaatgtttcttactctggatgtcgtgtgtatgagtgtgttctcagttaatgactttagttagccgtttgagtcgtacactctccctagcccccagctttgtcgtcggaggaattttctcggaggacaaggctcttggacccttgacctgtcttggttgaataagctctgatcctagcacccagccgtgaagttggaaagctcggtttccgattacacgacttggttaatacgcacggcgagaactcttacacgaccagatcttacatggtctttcgtctctaaaggatctgacaaggccttatcggctctaggcgtccccagtcgaagatcccttaggttcctcggaggccttgtcaagacggcgtaaagggacataaggacaggtttcaacgctaggtgtcgtcagagtaagggatcattgggtgaaaacactttggtcgtgacatgtgacttagaaataggctttattgatactgtaagggtgcttacaggtacagtggtattgactcatacatagaatttacgtagttggtcaatgttccacgaatttgctagttcgcgatcgtcgccgtctgcgattttgaatgcgcctggccgcaagacttgtgtgatcgtgtagggtccttcccattttggtgagagtttgttttgccctgcttgggtttgaactcgtctgaggacatagtcgccgatcgaaagtatgcatgctcggatgcgcttctcgtgataacggcggagggcttgttgatagctagctgctcgaacggcaactcgctcacgatgctcctcgagaaggtttacatcgatgtctcgctgtttctcctggttctcgtcggaatgcttctgtactcgtgtactttgatgtcgtaactcgccggggaacatggcttcagagccgtacacgaggaagaagggtgtttccttattggatgttgtcagtgtggtgtgcatggcccatagtactgatgggagttcttcaacccattttttgtcgtgtgacatgagtctgtcgtagacgcgggtttttatcccttgtagtactatgccgtttgccctttcgacttgtccattgctttgagggtgagagaccgaggcgaaacatattttgactcccaagccgatgcagtaatcctggaaatcggcgctgatgaattgagggccgttgttagttatgatgcggtgcggtagtccgtatctgcataatatacctctgatgaacttgatggcgttatcggccttgatttccccagtgggtactgcttcgatccatttggtgaatttgtcgattgctacaaataggaatctgtagccgccctgtcctcgtgggaatggcccaagtatgtctagcccccagcacgagaacggccaagtcagagggattgtctggagtgcttgtgcaggtagctttgtgtgcttgctgtggaattgacaggcttcacatcgctggactatgtcgcatgcatctttaaggtcggttggccagaaaaacccttgtcgaaaggctttgccgaccaatgtccgaccggcggcgtgtgacccgcatatgccttcatgtatgtcgaggaggagttgtctgccgtcgtcggtggagacgcatttgagaagtatcccgtttggcgcttttttgtataaatcgttgccgaccatacagtagatctttgctttacgggttattttctcggcctctgtatcgtcctcgggcaactcctcgctgctgatgaatttgattaatgggatgcgccagtcatctgtggtttcaatgtcagcaacggcgcgttctgcctcggtgacctccaagctgatgtcgggggtactcgggccaacttcaccgctaacttcttttaccgatggctttgtcaggacgtcgagaaaggtgccgggttcgagcggttctcgtctggatgcacgtcgtgctaggtcgtctggctcgatgttgtccttgcgatagacgtgtcggacctcgatcccgtcgaacctcttctcgagcttcctgacttctgcgaggtacttggataactcggggttggtgcatttgtagtctttgtgcacctggtttgcgattagctcagagtcccctttgacgattagtcgcttggccccaagtgcggctgcagctcgtatcccggcaagtagtccttcgtattctgcagtgttattggttgccctgaagttaaggtggattgcgtgcttgaattgatctccggagagagatgtcaagataaatcctgcccttgctccttggctgttgagtgcgccatcgaacgccattgtccatgtctcattgtcaccttggttgtctgacttattatctggcatggtccaatcggccacgaagtcggcgagtatctgagatttgatggctgttcgcggcacaaagtggatatcaaattggcttagctcgactacccatttcgcgatgcggccgacaacgtctttgtttctcacaacttcgccaagggggaaggaggagacaactgtgactctgtgggcttgaaagtagtggcgtagcttccttgatgtcatgatgactgcgtagagcagtttttgaatatgtggatatcttgtctttgcgtcatggagagcttcgctgacgtaataaactggtcgctgtattttctctgtctcgacaacaatgacggtgctaacggaatatggcgtggcggtaatataaaggaataattcttcattaggttggggagcaacgagtacaggggggtttgataggtagcgcttgagtgcaataaatgcctcttcggcttcctgtgtccatacaaatttgtcttgtttcttcaataaggcgaagaaaggctgtcctcgttctcccatcctagcgacgaatctgcttaatgctgcgatgcatccggttagcttctgcacctccttgagtcatgtgggcggcttcatgttctcgattgctttgatcttctcgggattcgcctatattcctctgccagaaacaaggaatccgagtagcttgcccgacggtacttcgaacgtgcacttctctagattgagcatgaggcgatatcgtccgaggttgtcgaacgtttcccgcaggtcgtcaatcaatgagtcacttgtcttggttttgacaacgatgtcgtcgacgtaagcctcgacattgttgccaagctggttgctaagtgcgccctggaccgtacgctggaaagtattcccggtggttatcagtccgaaaggcatcttaacgtagcaaaataccccgaacggcgtgatgaacactgtcttctcttcgttctcttttgccatgctgatttggtggtagccagagtaagcgtcgaggaagcttagaagctcgcaaccggctgttgaatccaccaactgatctattcgagggagaggaaagtgatccttggggcatgccttgttgaggtctgtgaagtcgacacacattctccattttccgttggccttccgcaccataactgggttggctagccactctgggtgaagtacttctctaatgaagccagctttcaaaagtttgtcgagctcttcttgtatggcttgttttcggtctggtgcaaatctccgcagtctttgctttactagcttggcatcgggtcgcaccataagtttgtgctcaatcacctccctggggacccccggcatgtcgcacggctgccaagcgaacacgtcggcattatcgcggaggaatgtgatgaacgcgagttcctatttctcatctagtgtagtcccgattttgatagtcttgtcggggttagcactagagagcggaacgatcttgatggtgccgtctggctttggcgtcttatttggcttgctcactttcttaggtggctcagacgtggcgggtggggtgggcgtttgctcgaccatgtcgaggctccgcttgtcgcactgcaccgccagctttgcgttcccctaaatagtgattgttcccttcggtcccagcatcttgagcacttgatatgcgtagtgggatgtggccatgaacttcacaagtgcagttctcccgatgatggcgttataagctgtatcgaattcagcgacatcgaaggtgatcagggtgcagccccctgccacgtcgaacagacttcacgttccactttcttgtattctcgcttggaggagtacgttgtggaaccaccgaatatgtgtgagacgtggaggtcggagtctgggtacgcagaatccgattcgtgaggaggtgtctccttgttcttctcaacaacgcgtactcgcttgcctttttcaaacgccatgtgcttctcgagcgactttttgaaaacaaggcaatcctccagagaatgtctgtccgttttgtgtatggggcaccatgatttctttgtatcgctgccctgtcggtctgggcgcttgggagggttcgcgtattctgctgcgaggacttccgcttgagctttccttttcccgtttttgcgatttttcttcttgcttgactcagatgcgtctgcggatagtttcttctctcccccagtcttcggcttgtcgttcttgcgtcttagcgcgtcatccacatgggctcaccgctcaacgatctcgaataatcttcgagtagttgtgatgcgtcttgtcgccaactcctgggtagtgtagcgatctctgacaccagacttgaaggcgagaattacagaagcgtcggtaatctcgggaattgtgtttctgcactcgttgaagtgccgaacgtattccctcaatgattcccccgagttctgtgttaacgcatgtaagtcgtcttagatcgcgtggcgcttgtatgttccttggaaattggcgacgaactgttgccacaggtctgcccacgaggagattgagtagggaggaagatgcatcagccatgaacgcgcagaaccctttaacgcggatggtaaatagttcgccaacgcgttgtcatctgctccggcagcataaagcactgtcgagtagacttgaaggaattcttctgggtcggtgctcccatcataattttcaatggctctgggtcggaatctctcaggccatcggacatcacatagggaacgaccgaaagccctacacccagcactgggggcggtggtttgtcggcggtcgcgtgaccttcgtggatgtctgtccaacgatgaagaggacgcggatgatgacgatgacgatgggtcgcttggttctggcgtacgattacgaggatgacgacctggatcccgggcatcctgtcgttgtctctcgctgttgtctcggcgccgatcgccttcgtcgtcgtcgttgcggcgacggccatgaccagtattgtctggcccccgccgttcgcgatcgttgtagtctcggtcctcgtttgggcgatttcctcgatcatggcgtcgtgaagagacatgacgccgggagcgatttgcgtcgtcccatgtgcgtcgtgcttctcggcgatcattgatttgatctcgaagatctccaatgccacgaggtggaggggtagcctgtcgaggtaattccctccgctccggatctttaccattggtgtcgccgatcggtggctgatcttggtgtgctgcggtagcggcttcttcgaacgcattgctgaggttggtcaccgactcccgtaatcgttccgtccaacgctcgaggtcgtcgttcagaacgggatcgtaaggagtttccctctgtatggcttgaacaaccctgatgtgctgggctggagtagtcgattgatttgccgcctctgcattggcttgtgctgacgtgccaacgtcatcgatagccaatacctcccgcgacgcacttgttgtcgatgacccacagtcttcgaggagatgtaagaccgatggttcgtgggggtcgagatcgattaccccaacgaatcgatctgaggctggagtcgctccttgttccttgccgttatccctaacggggacgtatgacttaggagacggagttttcacggcgccgaggagaactttgcagctcgagaggtcgtgattctttgtcttgtggataggacaatagacatcccgagttagagaagtacgctgaattccgcgttctttgcaggcgcgaatttcagcacggacattgatgaatacctagcaatcttgaagggtatgtttcttggttttgtggataggacacaaagaccagataacttcggaagtcatctttgttggcccgtggtttatgtcggagggacaagacttggccgcatcagaatccttcacgagtttggatgtagtcgataatccgttctctgtttcaacgggtggatttttcgacatggagccgtcctggttcatagccactgcgttctcgtttccagtcattggaggaccggttgagatcggcatcgtggtgtaaaccgggaagacgatttcgccgacttgagtccataccagcattattgaagctgagagtgcttgactggagctggtgttgacgttgttgtcgacgaagcttgatggcatagtagtagaaccttgagtaccaagtgcccctacctggcgcgccactgtacgtagactggatatagagggtattggggtacgctggtacaaggatctacgtagtacgacatcaagtaatcaaaagacaagaattatactggttcaggccccttgacaggtaatagccctaatccatttgatatgggattatatggtggaaaacacaggttacaaaggaaagatggaacttgtcgaatccggcgagattaaagtcgagttgattcgactagctcttgacgacgtggcccctcgcaggctccggcttcgtaggctgtgtgggttgtgttggctctgagattcgatcctctatgccctccccggggggtcccttttatatcgcaggtctggtggtctccgagtaggactcgaacacaccagacccagctcaatacgtaggtaacccagttcttatccgagaaggactcttcccgtctattgatttcgtgaaaggtttccttagatcataaaggaaatatccgcgtacgcgtgggtatgccatgttgatacgtaacgtatatcgaagggtagagggtatgcttgacccgtaaccccgacaacgattgagatttagtcatcgacgagtgagaggcggattggcacaccctgaaantctcctcccaacctaaattggatttataaatgggtcccaagaaaaaatcggtgttaa

SEQ ID NO: 5979 - DNA, 7932 bp, Oryza sativa
ggggagaaaccctccttctcctctccctccgccgccggccgtgacgacgacgactaccgtgacgccgacgcttgggtcccaccgctgactgcgacgacgacgccgccatcgcctggatccgctggagggagaggccgtcgacgccgccaacggattaggtggtggcgccggattttttttttgttagttgaaaatattttcacaggcgggtggatctactgcctgcgaaaatagatgccgcctgtaaaaatgattttcgcaagcgggctattttcgtagtcgtttgtctacaggcagtccttccccctgcctggaaaaactattttttaccgcctacaaaaatgcttttagtgttggagcatctattgcacctgctcttacggccctcttctctaggatttgaaccatgatgattggagttatatagccacgactttactgccacactattgatgttaccccctcttttcttatttctctttcttcgttaattagtttgctttttaaaaagatactaaatttttacgtaggattttaatttatatgattttttttctgttattttttttcagatttcaggattcgggtcgtctgtcaatttggagcagaattgcacataggctgacatatttgacgcaatgcaacactgttgtataatacaacacttctgtttttattccttaacttgctgcaaatggcacgtgaatttatggatgaatttcttaaaacgaaaggcaagacagcaccaatgatttacgtatccatatatatttatattaaggtaatatccattggtaagaggagactgaacattattatctaggcttaattaagaaataaaattgatgcttagttgcttacatcccagtcatagggattagataatgtaattattcacatgattattgttgatatttcttaacgacattactagaaatataatttccaacaatgaagcccgaaatgttactcggtattctttacggatacagttataatccgcaagcacgcggatataccgttgtattccaaggtatctatttatttaatcccaagggaagatatgataagagagtattatgctaataattttatcgcttgtatagatcaaagtctaacgcaggggttaatcaattcgagtatagggtaggttgacacatagaagaaactaatcataatactctcattcaaaaaatattctaaactaagtggagaaagaataagaaaagaatcatttctgcacttctaatatataattattttaatctacacttgctattgtacaattatgcagccaataccccctaactatgccctcctagtatatcttgaagccacccctaattgccgagtttcttacgacaacccgtcacagccatccaactggtaaagaatacggaggagtacccacaccaggaaattctcttagtattatatatgcacgtggaggaatactcgtactgagttgtcaccattagtgacctacctctacagacatgtggcatataacagcttttaatggtatctaataatctaagcactgcgcttacattactaaatactactctacatctctgcagatgacatagagcaatcatataaatgaacattaaaccaataccattgcatatctctagtaagcttgctacataattattacgatttacgagacaagtataagcaaaagtcggtactcgaataattatataagtaaagtaaagtaccaaagctatataaataagaatattcattattgaataaagtcttacaagaggtagaagggatactagagccatacccgaaatcttcggaagacttgaagaactaagaaactattctaattctactccactagtactagaacaaagtaaataaactaaagagaattcttgatttcttcttcttggtttgtgttgaagtggataaggtgaactccttaaacaggctgccaatgatggttgtggcggttggaattgtcagaaatgccccgcaaccatcattggggagtgatcagggatgtccacgtgtacggccaggatgaaagggcctgatggcggttcagccaaaccctaggccccacctcctggcctatcctttggccaggaggctgactggtgggtccttatggcgttatgatagttatgacccattttgtggtggtttcacctgacttgtgggcccttcaatccttatactcgcgcctgattggtcggaggtgtgtctttgataatattttccattattcttctccatttgtatgaagatctctatatacaaataaagttccaagtacaagtggaaatatattattgttagacaaatatgcatgcaagcattgctagttctccttgatttccgaatatattgatagtcgaaattggtctataatatccgtcaacaattatctcatagttcttaagttgtaattgtgatatttgtgttcttcttttagtgtaggctattgtggatattgagttcgattgatgtattatgccgattctgaccatcttctccggatttttaatattacctacttcatcatgctagaaaaaaccactattatcagtgggtttctttgttttggtaaacatttttattgcttcctatttgttgttatacatcgtcatctttaagttaagttattgatattaaaatttttccttaaggatttctatttagtactagaaaaatgcccatgcttatttgaatattatgttaattacttgattcaaacaaatattgactattacataatatcagaaaatatcaagaactaatttgtaaaacatgtaaaatagtggtggtagagtggtagactgatgatagaaccaccaccactattatccttataatcctttatagtagtatagataatattgcgtgagaatttgatatgattgatgtaactcagacttgcattgtcgactcaacttggctcgagagccaatcgttttatcatttagcttgcacccctatggtggcctaccaacaggagacccattaccaaggccatctccaggaatttgggaccttgggatgaaatgcaaattggaccctaaattttcaaaattttatatgtctaatataaacaatataaacaaggcatagtttcactcaattatataacttcaatatgtgttattttcatacaaaaatatatcaaatattaacgctaaaattgtcaatgtagtgctaacctcatgttctacagaaaagcaccatttgtctattattttttaaaataaaatattaaattatatgtacgtaattaatctactccgagacatcattttcaatttctattgttgccaatccatcgagtctttcttatatcatagtacaacgacttgggtttagaaaagctcctttccatagatgcaacggtcacagcctcacatgaatggctaataaaactttgtatgcaataatagcattaggataaaaggggcgctccttcaaaactttaaaatatcaaagaacacccttttgagattgaattgcttcttctggtctttgcctcttctttcgcttttcagcaccagaatcgtacttcctatttctagctgacataatgaggattgaggaaataagtgtcttcctatttcataaacaaaagaaaagtaatttgagtcaaacagtcacatcactatttaagttttgattcaatcgatagtttgattcatattacatctactatttgatacgagactcaatgtctcaactcttaagtctaaaagtaactttccaatgctgcacaaaggtagtagtcagggacacgaagataagtggatgagaggcactgacaaaggtagccggccaaccgcttggcattgatggcgcttgcccgttggtcgctcgctgcctcgtgttgggctggggtcgggactttgcaggcatcgtcatttcatcgtcgaatttgaaatcgagattgactccagtcacacgacatgactacacaacagtgtgacttgatctcgttcgcctctcagcctccaatgcacctgatggcagatgggcctctctaatcgattcacaggtagaagcaggattgtggctcggctatgcattaatgtgcgcctctccgattaacttgggtgccccaaaaaaattgggggacactctatcatcgccaatgtcgcacacaaccttcgacaggcttgcccattagtgtgacactcctgcccacatcactgctccattgtcatccatcaccttgtcgaccattgtggtgtgccaaaccgcggctgtcgtctgtttgtgattttgtagtctgcttgtactccctctggaagtgtttttgttcgtcggtttacgagagatggcttgacctcaagaactagcctagacaagcaacactttagctcgtgatcctaactaaaccgagctgagcgtctctttcatcaagcttccacaatgcaagccaaaccaagctccgcgcttagctcatttccgcccctattttagggttgggccatatatggctgtgaagttgttcatggaacaaaacaaacaaatccatccattaattgcttggagttttcctttccactaatgttttgccttggttttacaacagagaaaacttttcttgacaaatagttccatagagcatatgtgatctttgctagcaaattcttggtaaaggattttaggtgcactgcagatagcaaaggtaaaaaatccataacacaataatatttacaaggatatttgtggccctgtggcaggacaatcatcaacatagttttgccacactattacatgagttcatatacatcacaatactgatagcatccggaagaacacttaatttatttacaaagcatccacaagtgagcgaacactgcacatttttttggacataaaacacacgctataaaggtattagtcaaacacacacagtaacacaaacttcaggcaacatacaagttagagtgccatgaaacacatacacacatcggcacccacagttagtcattcgatggagagcggctagtaagttgtaaactatagtaagcacacacagtagtagtaataccataattaccttttcattagatgtcttcatcctcaattgcatcaatctttttagtatttagaaaatcattagacaatgagctttttgatgcgtctttccgcaatgattttgacatggggacgttgagagagaatatcaaattccttgagaatatgaagcgcaccttgctctatctcaatagttttcagcgttgttggtacatcaagcttgatcttcttcagactaacaaatccaattgaagagaataaaagatgctcgtccttgtatgactcagaatataaggcaagggtttcaagagatgggagttcagcaagctttgaaatgaatccctgagatacctttgttttctccaatgaaagcatgctgagattaggaaggcatacatccataccagttatctcatataaaaattttagtttcccttgtaacttcatggacttgaggcggcgaagcgagattgtgatgaacacggttgatggaataatgtggccatgcaaggccaaattcctaagattctctagcttgctcagagcagcaaacaaagcctccatattaccagttgtaatgttccaaacaaataaattttctagatggaccatctttccaactgtcccaatcaaatccttctcacagttgtcaagctctattgagtcaagtgtctgcatatgcttcatgctgccaatttgtttaggcaatttgagggtaaaaccaaatacatgccttagtgtcttgatcatcaaccaaaagttcagtgggagcttccgaacattagtttctctgacatccaatgtctgtagaccactcaggcttccaatggacggagggatcactgtcaatgaacaagatgtaattccaaggtactgcagatgcacaacactacctattgcatgtggcaactcatcaccaatctcaatcccttgtaggtcaatgacacggaggaactctgatccttgtagcaatccttttatgtgagatctgatgtctttctgcttcttgttggttatccactgttgaggtggtgtgcaacattgtctagtttggtctcctttgggctcttgttcctttggctcttgctcaaactgagagaagatggatcgtagctttggcaatggattagctagggccgcatacttgtctgtgtaattctgtagagagaggcgacgagcacttgtcaaagtagggatgtcatcaccactatgcacctccaagaaacttgcctcatgcgcttcagattgcaaaaactcatgtactttgttttggatggagatgaacatagtcccggtagtagaattatcatctacaagaacaagattgactagattcctggaaatcagctcattcaggaagatgtagcccaccttctccaatgtctttccaactctaggtgttagaaatccctctgccatccacatacacaccaagttgcgtgcctcgaccactacattgggaggaaatgcagcaaagtatagatagcaacatttcagttcgtgtggaagatcatcaaaacacagggacagtagattgtcgagccgctttgatttcttggaactaagatacttgaatacttctgtccactcatggggaaactctttggtttggacaagacctgataaaagaacaacagccagaggcaacccttccgtgattttgcatatgtcttcacggtattcttcaagtttttgatattgtgcatcaaattggagtagtttcttcaacttcaataccattggacctccggcatcaccttgcttgtcttggtttcgtaatcgcttgtggaacaatttcatgacaacattattttcaagaggttctaaccgaatgtgatgatgataatagagagacgactgttctggtctgtcaaatctgatatgcactattctattaccagtagaaccgactgcaagggtagtgagcatagtgataatgttcttccattcagttctgctaacttcaccatctatcaccagtaagtatttcttatctctcaacgctgtagccaacatttcatggaccatgcttctaggacaattcttgttgtcttctgtaagctgctgaacaatttgatgtaggatgttgggggctgttaaatgaggtgcaaaactctccatagcatgaacatcaaaacaattcttcttcttcattatattgtacacatttctcacaagagttgtcttgccaaccccactctttccagatacagagaccacaattggacgattatcatttttctgtagttcttgatctgttggagtaagggctttctcaagttcctcttggtgctcttcatataatgtcaaatttccttgttgtaaatcatccctgtagttaaaacattatacagttagtacattaaagagtaaatttgcataatgccaaagtgcagtgtattgagaatcagtatcaagtttgaaccatctagctgccttttccccaaatattggtaattcagaatcttgtgtacatatataagcccaaaacccgtttatgtaactttatgaaggagaagagattactgatgaggcatgcactttatgtacatgtatttttttcgtatttcagtataatttttatcttaaccactagcatttatgcaatgctagtcatgaagcagctagtaggtgcatgctagtaatttcaaaaaacaaactttttctagtaaatttaaaaggtaaatttaagtctatctatttctgattagtttgagagcttttctactttgtacctaatatccacacggttcatcatacagacctaaaatttgataatatatggtgtatatttcaacataccttgggcaaatttcaaagttgttttgcataacgtggcagtaacatggcccaagtaaaaatatttttaaacatctactacctccgttttttaatagatgacgccgg

SEQ ID NO: 5980 - DNA, 4402 bp, Oryza sativa
tacacataatcccatatcagcatcttccaaaagaatcctcatagaacttgtttttattacacatgtcttccttagtacacgaatacaaggccctgccttaaacaaaaagggaaggtgcttaacatcggtacattgcatcctcaacatgaatcttccataaacataacaagctcattgtttaaaatcatgaatatatttatttattacatgattgctgcaaactttcgattacacaatgataagtagcaaacggaaaaccacaaacgtggctactcattttgattctggagagatatagctggtattgttctagtgactgcatcctggattggttctgtgatgatgtgttattactgcatattgctatcattcacaggagaagcttccttctgattgctagttgaagcggataatggtcttctgcttcgtatcgccctcctgaggttgattgccctttgctcggcctagagtaggtcggggagagacacaacttcttccatcaacgacaattctttgctgaggctgtcggtgcagagaatggttggtgctgaaggtattattgctatgatttattgcagagtcaggtgcagcaggaggagcattggtgttgtggatgatatcgtcgatgttgctgttggagctgactagctgatgagacaaccgtagagttgttcgttggatttctgcggtcttggtcaacaacacactaagttggcaatccttgggcacatggtttgtaccttcgcacagaaaacatgtgaccttgcgggtgggacactcccctggtggatggtcttcttcacaatgagggcagagtgtgagacacatgctagcaatgtgtccaatttctccgcaacgggtgcatgcctttgattccatctcttcctcgccgacatgtcggggagactcatcttcatcatccgaggagacttgatctgacccttcactatcagatactctgccaccatggcttagaaggtgctgggtcaactgtcgggcacctcgaaaggtatttcctctttgacgtctaggaatagttatccctgctggaggccattcggtgctggtaatagtcatcttacgtacttcttcttcagttcgcatcggtgcttttctcttctgattcttactcttcttgactttggcttgcttagtacgtgaccccacgtgatacgaaaggctaggaggaaagcatttcccgggattccatggattctctccattgggctctctactttgcacactaggctgcaagcttgacttggtgtgaggaggctggtttagcgatgtctgccctgctaaaccaaaggaaggggcttctttgacatatacccatggacaattcagggcatagtgtccttgttctctacaatcatgacaaaaggggacatcctcttctggcattggaagctcattgacctgggtggcaaatgttcgatcaaacacatactgattttggtcttgacttccaaccaatggtagctgtgaaccaagcagcatgctcggaatggaccaagggtgtgcccttgttaactctcttgaggccagtggtggattgagttgaaaacttgagttacttgaggcatacccgctgacattctttcctttttctctgttaaacatctgttacagggattgaggtgagagaggaaacaagctaggaaagaatagaccagaactagagacaggaccttaaaggaactaactctttttgttgttgtgttgtttgtttcacttattctgcaagttgattaagcaaacaacctagcatggttacatcacaacccaccgatgcaaaccacacactacacacacaagcaaggaaacacacgacaaacgaaacactagagggtggcttatgttctgcgacgggttcccaagatcttcactccttcacagctggcttcactgcttcctccacttcgctagcggaccctgcggtcttccggaccttcggcgaacaattggcgacatcttcttcttcgcaaaactaaccaactagtactagttgaaatttgaagaaggaagaaaagggtataccttttgcaaatagcattaggggaaggagaaaaagaggaactttcgcaaatagttttatttataaaatatgtccttaggttttatccacttggcttatcctacagtcgagatggctctgataccagcttgtcgcgaccgggaaaattgccttttcccgaacgctagtgtattaatccccgtcccaggaaaagccggggtacaccacacaaacatgatataaaagacacatctttattatatcgataatatttacattattacaaaggcgcttcaggcctgacaatcaaaaataaacagcagcggactagcgggcctacggctccatcttcacaggcgctcaactggggtataagccaggactccacctaagacatcttctccaaagcttctcttactgaaggggggagaaagatagagcaagaatgagtacaaccacagtactcagcaagccacaccggagatgcataattaatgcaagggagtacaaggggataataatataggggttaagttttgcagtaaacagcatttaaaagtcacttagttgcccaaagccattttataaagacgatcctagagctacacagtattattaatcaaggccgtgaacccacacgaacctgccttaacccaaggcctacgatgattcagaccgaactggcaacccgaccctgggtcccagctcgtcccaagccaacccaggccaaccattccacattttagttgttaagcaaattttaagaattaaaacactgacttgggtacattgctcggcttgcccataaccgagggcgcggctattcgaatagattatactctgatcagaggtgtacatctttacccacaagacacatcttcctcacgtgtaaccacgtgccacataccaccacggtatacggacggaagacgtgacatagtttccaacccatcctagccatagacaagagtaccgacccaaccccacctacggccggaacccccgggacaggcagacaggattgagccccctagcagcaggacaccagccctgtgccatgacatctcgactaccgggccgcagctcgtgtagccttcatttgccctggagaatgtccatcgacccccgacttcatccatctccaatccgtgtacttttgtttataaccagactgagccacaaactaagccttacccactagacatgtggaagtacggtagtgctttgcaacagaggcccgagcttaatccttatagtacccgaggtacgactagcaaaacccaaccacgcacctcgagcccagcctaaaaccaatttggggattttgaatagaaggagcggtgtgaagccaaatccacaataaccaaaccattccatagtgtccaggtgatatgaatattcccaaagtctagagttgtaaaaccacctaatgttacctaattaaattgcgaagcatctacctaaaattaaactagtggtgccatgagtagagtgtccactagttggggttttgtttactctagggtgaacaaggaaataataacaataacaataataaggtcataacaaaggtaaataggcatggctagataaaacagtgataacgcaggaatttaaataaagcgataatgcaataatttaaatcaacataattttataaactgggattcaatatgttcaaggatgatgtgacttgccttgctcgctttcccaaacgtcggcttcaacttccacgaagagcggatcttccgaagctgcagcgtctacacgaccgacggaaaagaaaaggcttttactctactaaaccccatataacaagcagaaacaaagcacaaaaatgggttcttgacttcttaaggaaaaattagagacttgaacggtccaattccgagttcaaatggccaagatatggccatttgaagtttatatgctctttaaatggatatttacgaatttcttcatttaaattttaatttaaaatcggatttattgcgtcagccgaggggaggggcgcgcggaccgggtccacgggagtggggcccacgcggcagcctctcggtccacggtggaccgggcgcacgcggcttgcgctggccggcgccgtgggtcccacgcgtcagccgcacccgagggcgcgggcggctgacggccgggccccacatggcagacgcggggcgcgcccgaaggcggcctcgccggcacggccgacgggaggcggtgcgcccgcgccccgattgtcgccggcggcgaacttcggcgcgactgagcggcgccccagagaggggagggaaagaggaaacgagatggcggtcctcggctcaccccgggttgacggcgacgaccgaaaccgcgaccgaagccgaaaaaggcgcggtcctgttcggt

SEQ ID NO: 5981 - DNA, 8414 bp, Oryza sativa
cttctccatcatggctcgtttgaagttggctcgcacaagtatcccacccgcaagcagggcgtgaccttaatcaaggacagtgcacaaaaacttaaggtcaataggccgcaccaccctattccatgtgttagtattcacatccacttcctttgatagattgtgacggattcgactagctagtcaccacttatcgagcaaatccctgcgacggtgcatgcatactgtcaccagacacgtgcgtcccatgacatctccgcctcctctcgtattgactgcaaaattttacatatcatagatagaaacaacacttcaagattcccataggctccaccaatcgattgcaaggaaaacaaagtcctggtggaaagggatgggtcggaagaagagctaaggtgaaggagaaggtggctgaagtggttggctttatgggagggtgctgagagttatacatggatgcactttatttccggggggaatgacccgttagtgaaatggttcaatattttctttcttcaataaattctcctaaatctgggaggtgatagatatcgtttggttggtttggattaatattatttacttgttttataatgacaattttaagttgaacaatcaatgcctaaaggtgaaccacatgcaagtatgtttatgtgaatgccattattcttcagtgaaataaaagtgtgggttattttttagtagaatggtagtaattactgacttattaatatgtaatttgtttggttagtacccaaacctagccaagccaaaattttagaaatgcaaaaaaaatatagtcatgtgtgatttgtagcaaagaatttggccatgcaaagcaagtgaatatctagccaactttttggtagcaaagcaagtaaatgtctagccaacttttgtaaaaaatggcaagtgaatatctagccaatttttggttaaaaaaattcaatggtcaattattgccatttccaacaaattggaaaggcggaatggttatgaaacaaacatgccctaattgtgcctagaaatagaggataaaacgaacaagctcttaaacggctttcccgggccacgcgtggaaaacccaaaggttaatgggccgcaccaaacctatgtcacactttcacgctgtgatagatcgcgattagcgacctgccgctaggggtggaaaaaaagctcaggctcgtgagctcagctcgggcttggctcgagcttggttggcttggctcggctcgtaagccaaacgagccaagcccaagcctccttttcagctcattgctgaaatgagccaagccgagctagctcgcgagccgcttgttttggctcgcgagcctaagccattatgtgtttatatcgattattttattttatatggcgttattatttgtcaacttcaaatttaccattaagattttgaaggcttgaatatataaagttaatttaattttacatgttaataatttgttcttgttttttttaataattacaaaatatatatgaagaggtatttcaacaggaaggcttgcaagccagctcgagctggctcgagccaagaaacgagccgagccgagctcaagttttagcttgttttcctaaccaagccgagccaagccaagccaagtttgttgcgagccactacaagccgagccgagctaggcttggctcggctcgtttccaccactacctgccactgagccaatccttgcgacgacacgcatcccgtgacatctcctccgccgccgacccacgagtcactcaccaacgagacttttgtggttggcgatttgccgtcgtctcaaactccaaatctccaatgcggtgggacaacttagcaaacataacataggataggctgtgtttagtgggtacacctaatgggtgggtgatcgctccctcctctccccccttcctcctcccctttttctcttcctactacaccataaatatttaaatttaaattcagaattgaaacgggtatgtgaacttttgacttataaactttgggtcaataaactaatatttgaattcaaattcaaatttgaatcgggtaggtaaacttttgacttataaactttgggtctacaaactttaggtgtataaactttagatgtatagaaatactatatataaaaaatatttgaattcaaatttaaatttgaatcggatataattcaaattcaaatttgaatcgggtatgtaaacttttgacttataaactctgggtctataaactttaggtgtataaactttagatgtatctaaatactatatataaaaaatatttgaattcaaattcaaatttgaatcgtatatatttcaaattcaaatttgaattgggtatataaacttttgatttataaactttgggtctataaattttagatgtataaattttaaacgtatagaaatactatatatatcaaaaatatttgaattcaaatttaaatttaaatcggatatataaacttttgatttataaactttgggtctctaaactttagatgtgtaaacttgaggtgtacaaactttaagtgcataaatttactaaaataggaaagtaatgcggtgccaaaaaaggaaactaggtggagggagggaattgaatcggatcgcccctagcactcaatcgctaggtagcattcccggtgtttagttcgtgtgctaatttttttttgaagtatacagacacacatttgaagtattaaacgtagactaataacaaaacaaattacaggttccgcatgtaaactgcaagacgaatttattaagcctaattaatccgtcattagcaaatatttaccgtaccatcacattgtcaaatcatggcgtaattaggctcaaaaggttcgtctcgcgatttacatgcaaactgtgcaattgatttttttttccttccacatttactgctctatgcatgtgtccaaacatttgatgtgacggaaaagttgaaagtttgaagaaaaaattttgaatctaaacacggccatacatgtaaaaactgggatgtattatctctttgtattgactgcaaaattttagaatatatcatagaaacagtgtatgattctgtcatcaaaagaaaggaaattttacaggatcggtgattgtcccatcgaggaaaagacgaggaactaaccagtcagttagacagttgtttgctgtcaaaacacaaaactgaagggggaaaaatttacagtacaacagaggttaccaaaacaacttgtggtattattagttgtagactctttatcatggttaagaccgtcctgatctgggattctcgtcttctggggaagggcatctatacacatgctgttgtactaactccgatcgattctgtgaccttgacgggaatcatcaggttttcagttgagcaaccttttctgagacctcatcagctgtttcgtccatgctctctgtaagggaatcctcctgctgagaaatagactatcttatgtcaaaattttattttaaatcttacgtaaataaaaaattagatagactagaacatatattgtttccttcctcgacaaacaggaaccgtcctgacatgtgtggtgcaggaatgagatactacacttacatctctgtcttgctttgggttttcaccaatacacttggaagcgcttatgctttcactcttcaacaagctccgagcactcatgagcggtttgctaatgccgtctgtcactgatgcatggcatggcttctcgcctacattcagctttgcgtggtactcgtcatctccatgcttgttaccaattgctctttccctggaaaaagacgcagaaaaatgttaattccaagggcacagaagagtgattttcaacttataggtcttctgattactcctgagatgcgcatcactcttttgtactcttggaattaacattttctagttcttgtttgccttcttcccatcatttttccttttcaaggcatgtaaatgtaacatattaactatcctggcttaataaaaagatacacaaatcctatatgtattcctgaaaaaagaactcctgagatgcacagaaaacattgaactcaataccatgccatctagtcatatgctacatgcctaaacaatcaatgcccctgccttgttggaataaaaaacttccttaagaagatgttggtaaaagacaaacaattcagctcagaagtctccagtcggaaaggctgattcgcgatcaatcgccagggccaactggtagcgatcagttcccccctccctccacctggtttccttttttggcaccgcattactttcctattttagtaaatttatgcacataaagtttatacacctcaagtttatacatctaaagtttagagaccaaaagtttataagtcaaaagtttatatatccgattcaaatttgaatttgaattcaaatattttttatatatagtatttctatacatctaaagtttatagacctaaagtttatagatctaaagtttatagacctaaagtttataagtcaaaagtttatatacccgtttcaaatttgaattgaattatatctgatttaaatttggatttgaattcaaatattttctatatatagtatttctatacatctaaagtttatacacctactttagatccaaagtttataagtcaaaagtttacatacctgattcaaatttgaatttgaattcaaatttttttatatataatatttctttacataaatttttctaacttttgttttttaaaaacaattttgtggtgtactgtagtagggaagagaaaaaagggaggaggaagggggagaagagggacgtataggggaggggggtgcgggtgattggtcccagcgatcacccgcgcattagcagtccccgtctccagttgctatctggctcactacatatacaaagacatatttcaggggtgattgtatattaccttggtaagaaagcattctgccgaagctgtggactggatttttcaccctttaaaactccttcctccaaatgagcgaattgacgcttgaagcgatccaccccactgtcaagatccaacatatataaacagacatcagaattaccacttgaatatgtccttgacctaacgtgtagcaattttttttgtgtgattatttagcataagtcactaatttaatacagcatattgatttatgtttgtgggatgcaacaatacagaacagtgaattagttaccataaaatatgccaacaggtgatcaacttcgtaaaagaaatactggagttacctaggatacatgaaactcatctggtctcccccgcgcaaatattcttgcagcatatggggatgatactctaaaatctaaagagatttaacaagtatattagtacagtaaagagtcaagtggcagctctgtcgtaatattcacaaaagaattcatcagtggcacctctcggtaaattaattcccggacatcatctttggccaatttcctcttctcgaactcaaactcaagctttgagataggctgtgctattggttcgcgttcagagtttgctagcccattaaagtaggggtctgtcagggccttgaataataattccatatctcagtattcaggatagcaatgtatccaacatttcaaagctggaatgtctttacaatcaacataagttggctgtgaacactcctacctcttctgcacttggacgatctttgggatcaaaagcaagaaggcgttcaagcaaatggagagccataggatccacacctggaaattttttagtaaaaggaacccgaggctttttcctcatgttgctcaggtatcgtcgagctttctcattccgtatctgcaacccattcaataaatgaatgtaaagcacatcaatatgcattatttctacaatttacacctcgtttttttacaacaaatacatggaagaaaatagagtctgtccttgtgcactatgaatgcaatatgaagtcgctcaggaaaatataccactcaaaacagtacattaataactatatgaactatatgattcactgttagtgattttggaggaaatttgtacagaaatatgaaacagaggctgatgccaagcttaaatattaaatatagttgcgaagaattctgcataaagaagtgaacacacagactagtgaggagtcaatacattgcacttgagtgaaggcacaagcttgcaaggattgaatataccttagcaagggattctgctgaaggagtgccaagtagatcagtcatgagatccaattgatgcacaacatttttccctggaaagagtggctttcctgtaagcagctctgcaaatatacatcctacactccaaatatcaattgcaggggtgtactgcaaaagccaatgacaaaatataaatcaagatatcacctaatgcgacaatgtctaagagaacattctcaaaacactgttgctacattgatccaaacatatcatagtaatataacaatgttggaagaaaaaataatatagccatcaccatgttaaatggaaattcccttacctttgaaaaaaaggagccacacaactctggggcacgataccatctagttgccacataatcctagaacgaagcatggaaaattcattagatgccaagatatggctgttcattgttaagaaatatcttctcaacattaataaatgcctaaccgtccagaatatggctgatggggtatcgttaaatgacactcgggcaaggccgaaatcgcaaaccttcagcttgcaatcagcattggctagaatattcttgggcttaagatcccgatggaaaacacttgctgcaaagagaaaccagaaagtgagcgtgtcaaccacataagcaaaagaaattaccgatttcctactatatggaatctactacctgcatgaatgtacttcattccccggagcagctgatacaagaaaaactggtgatgctctggtgtgagatcatcatttgcttttattacctgatggagatctgactccattagctcaaagattacataaatgtccctgaattccctccttgaaggaggaagcattatgtgcttgatctcaactatgtctgggtgacgcagcaaccggagcaacttaatctccctaaggatgcgggtggcatcagagacatgatcgaaaacatcattgatcttcttgatcgccactcgctcgccggtctgggtgtcgacagcggcagccacaacaccataactccctttgccaatgacttcactgactttataccggtttgcttcaccatattcagtgaagaagtcaggttcctggaatggaagaaggtaaagttcactatagtaacagtactgaatgctaggtggtatgaacgggttgatgacatatttcttgggaacgaaaccttgtgccttgaaaacacccgggtacaaacaatgtgatgtgcaacagataagaaaaggaacttcaagggcattaggactactgtaaaatgtactaaagacatgcagatttagattgcattagatatgtaaattagatagtgaccgagcatcaataaattttgcaatctgattcttccaagtacagtgacaaaccttatctgtacgcccttccccccccccccccccccctttttttttctgaaagaacgaaaataaatctgtacattgtgaaaagtcaaaataaaagcagctgttactgaattttggtttttcccaaacgagacagaagcaagaaaagcagtaggccccattttccaatatgaactactgcccgcagaattatgcctttagtttccgtaaagctctacctttatctggaataaagggttcctgaattggcatacttggttatcttggattcatacttagttatcctgaattgacatactcggttatcttggattcctgaattgacagcactcatgtaagtactatatcagcatcacatcagcaatgattccgcgcgttggcttatgtaagcatgtgaatgaacatgccatggattgcaaacgtatcgttcaaatgagagatggaaccagatccacactaaccggcaacaacgcaatctcatgaaacagagatcgcaactccatgtagagcatttaccattcattcatgcagtaaacagttactactagtaaataacagttcagaggaatccaagaaaccacaagaatccaagaaaagcattcaggggagaagagaagagaaggccatccccaccttcttgctcggatccatgcgtcgcggctccgtgcgcaccggcaggtgcgtgcccgcgtcctccgacaccaacgcaatgtactcctcggggtcggactcggggccctcgtggacctcctcccacccgtcgcccttcgcgttctctcgccgcgggtcgtggagatccttgacggtgtcgtcaccggtggtggtcagatggaaggaagaggaggagacgcggcgggagcggtggtgaccgagccagcgt

SEQ ID NO: 5982 - DNA, 22247 bp, Oryza sativa
cccccattggcagggcgatcgatcgcccattaggactgcccttcttctcttcctactacagtgcaccacacaatttttttttaaaaaataaaaggttagaaaaatttatgtatagaaatactatataaaaaaatttgaattcaaattcaaatttgaatcagttattttaacttttggcttataaaattcaaattcaaatttgaatcaggtatgtaaacttttgccttataaactttagatctataaactttaggtgtataaactttagatgcataaaaatattatatatagaaaatatttgaattcaaattcaaatttgaatcaaatataattcaaattcaaatttgaaacgggtatgtaaacttttgacttataaactttgggtctatatactttaggtgtataaactttagatgtatagaaatactatatataaaaaaatttttgaatcggatatataaacttttgactaataaactttgggtctctaaactttagatgtgtaaacttgaggtgtatggcaatgtttggctaatgggaaatagaaatgatttcccacccacaaaaatacatctttaaatcctaaccattcattctccatctttcatttaatcctaacccttcattcatttcccaattccaatcccaccctccatttcccattatccaaacacaccttataaactttaggtgcataaatttgctaagatagaaaagtaatgcggtgccaaaaaaggaaaccagttggagggagagagagggggaggggggaggagatctgatcgctacccgatgggtcgggcgatcgatcacccattagagcaggtacaataacgtgattaagctggctcaaattttctctcaccttcccaatcctagattaagctagcaaaattgaagagagagaaacgagcaggcgcttaacttggcgccgggcgctagcgcttcatccgacgccgtatcgctcgcatgcagcccacgaaggcttttaacgctcgcatgcaactcactacagctggtatattcctacacgtatttaatgcttctgtgctttaaccaaggcagcttatagccaacttatagctagcttgttgtatgagttggctcttaagttagctctacctcagttgacaaaattttggagatatctgctagctacactattgactttcgctgattgatagataaaaatcagatcaagggagtcttactagactttttccttgagaaaccagcaaaactaattcctcagtccaccacgctgcatccttttaagactcccgtggtagccagctatgggtcataaaacgctcaacaatgtccagctatgggtctgtaagcgggctctaaattaatgtggaatatgtaggtatgcacgaatccacttgggtgttaaataagggtcctcgaaaacggaacagtccattagcacgtgattaattaagtattagctgttttttaaataaattaatcaatatgatttaatatgattttttttaaataactttcgtacagaaactttaaaaaaacgcagcatttagtagtttgaaaggcgtgcgcgtggaaaacgagggagatgagttgggaaaattgtgataagaacacaacctaagtgggtaacccgtagtcctcatgtcgtgatttggcttgccacatttagggatacaagtgggtcaacccgtaaacttatttataggagcatctatccatttgtcgggtgattactaataacccgtaggataccaactaattttacttatatgtgggttcgcgggttggtccacttacatcccttggaatacggcccatctatcggcttgcgtgaagattatactatctccgtcccaaaaataagtgcaaccgtagaaatccgtgtccaacgtttgatcgtccgtcttatttgaaaaatttatgaattttttttaaaaaatagtcacacataaagtactattcatgttttatcatctaataacaataaaaatagtaatcataatttttttaaataagacaaacggtcaaatgttggagatgaatagtgcaaaacttcacttattttgggacggagggagtagtacacatgtcctccactctaaaataagttcattatttatccagcatctcacaagaaatagatcataatactcttagtttcttaaataatgtaattagtttcctctttatttatttttaatatatttatttttcatttttataaatctcaatacaataattacttagataaatttattttgggataaccggttaaacggttagagctaaaagtgaacttattagtgtacgtgattctcctgtgaacacgagcaccagtataaatgtgtttagttcacgttaaaattaaaagtttgattaaaattggaacgatgtgacggaaaagttagaagtttgtgtgtgtaggaagttttgatgtgatgaaaaagttgaaagtttgaagaaaaagttaataactaattaaaccagtccttcgaattaggtacgacagaatcagtggcgaattggcggcgttttacgctgcccgattggcctgggggttcgagtacaaatatgtacctgacaagtttacaataacgaaccacaagtccaaccgcgatcgcacgtacaatgcaaaacgcatgtaacccttgcacgcgtattaattagtgcattttgcttctttaaacaggaggcaccgccacgccacaaaaaggtgatataacctgacgaaaattccatcacggacgccgtgcgatggccgtggttccgtccaaacaccggagccccaaaacgtcaaaacctgcgtctgattgccatgacccggaagccttttaattttctgtactctcgtcggccaacgcagccagttagacccacgtcagcgccattcaagtccattcctccgtcaccatgtttgcacctgctagctgagattaacaaacgtgaaacgtgtacagtgtactcgagtctatggcaaatcgtgcacaattttttaaggtgagtgatgcatgcgtcgtcagttttaatttgagcatttgaaacacaagctgctgacctgatccctaaacctgaatactcaactctcaacttttcagtgaacagattattcggcgatgatgactcctggtatttgtctgaccacgtgcataatgcattagtaattcggaacgtcactaatactttgaccaccaattctagatgtcatccagttctgataatgcacgcgcgaaccatccaggtaatatcaaatgtgataacacaagacttttccaagtagtttcagctgaccattagtcacaaacaaagtgaaattaaacaagcaagagaatctttccatcgttcaaactaccactaattcaagctactgcgttctagtcttctagacgttcaacgtacaccacatccctttcccgttaacttgggccatgcagcgatgcagtagacggcgccgtgggcgagacaacgaccaccacgccacagcgcgaactcgcttacgtgcccttctccacgacgcgacgcgacacgagcgaacgaatccccacctcgtcgcgctcgtctcgttactgcgcgctcctactccccaccaaccacgcccccactcctctccgctgcataaaaaccaagcccgcctcgccgtttcaccaaccaaacccaaaaacccaaaccaaacgcgcgacgcctcagctttctcctgctcctcctgccactcaccaacccaacgcaaagcatcgcggccgcgaggtcgtcgacctcgtcgtcgtcgtcgatggaggtggaggcgttcccgatacggttcacgaggggaatacggtcgcactgggggaggcgcaagtaccagcggctggaggcggcgaacggcggcgggaagacgagggcgacgcagcagctgggcggcgcgcgccgcggcggtgcggggtgggggctgcggctgcggcggctgctccgcgtccgcgtgcgcgtggcgagggcgtggctgtcgtccccggcgcggctgctggcgcggatccgcgacgcgtacgtgggcggcatgctcgccgtgtcgaggaaggcgtcgggcatgtcgctgccgaacgcgcccgaggggctgtggcccaggcgcgtgccgcgccggaagcagctcccggcggcgcggccaggccagctcaccgacttcgagcagaggctcgtcgtcgagatatacaagtccatcgtcgcctccaaggagctcaccaccatgctccaccactccaccgcgcacctgccgcagcagcacaacacggcggcgccggcgtccagtggccagctgctagtcaattagcgtgctgtctgtatccaccatcgacatggaaactgaaccgcgagagctcctgcaagttcgtttgctcgatcgctgctcatgttgatgattattactactgctgtttcttccttgtaatttgtaagaagtattagttaggacaagatgatgatgtacacttcaatttctacctggtgcaaatcaccatgccgccgcgagtatgtttaatttcgtaaccaagaaatcgatcaagcaaagttcgtgcctccgcgcaccttgttcttgttcttcttgcatcttgtgtgcttgttacttaaacccaatcctcggccatctcagagggttgatcaccatagtggaaaaaaaagagagataatgtcactgtcattgtaaaccctaccagtatcactggtttcgtcgctgcagcctctgcggtcaaacttcaacacatcaaaaaatcatgtgttttgaaaaaaatgagacgtggaaattacagacgaaaattctctgtgaccaaaacatgctattggaaaattttggagcaaatgcttacctgttggctcatgatcttttttttttaatctaaagtttcttcaccgtcaacgcatgcacgtgggattcctcatgttctaatgttacaagtaaaatatggccgctcgcttgttcatctagaagctttaatcaagacttgactcaactgaggctagacaattattctatcatgcgtcacgcagttcgtcaggcctttgtttatttgatcggtgcagttcgttaggctggtttgcctccatccgtttttcaatagattagctgaagatgctaatcgaaacgtcaggtctacctagagcaacatagattgattcttttgtcctgtcaggcgaggcaatctgctttcaccatacggtcagcctctaatttgtcgttcctccaactattgctcacggaattactgctaaaatcttacttcctccctcccaaaatataagcatatgtggactctgacacggtctccgagatattactttgaccaataatacatataaaagtaagatgttttaaataaagagagttacatattatgataatctgtttaatgataagtctaataacatcaattttatacgattgatcttttttttttttgctattaatagtcaaagttgaaaatgtttgacttgtcactatgctaaaaatacttatattttgggacggagggagtagtgtaaaatcacagcgttttaaacgggtggcacataaattttgcagcattttggttgcaatgccctgaataataccctaaggttataagtttaaattttcacagatgcgaatttcagattgagttatttgcggggctaaattctcaatttaaatggctgcatatatccgctttgatgtaaaggctaggtaacaaatacttttctataaaaaaaacgaatttggcagcattttgacacaaatccttagctttggaggtctggtctagtcatagaagaacatggctacatttgctacggcccatttgtcttctgtcatgggccctgataattgagaaacaaagccgagtctgaattccaacccgtccaatttacccacaaggcgaatttttttcatttttcattttaattttttaatatttacataaatattataccatctaaaatatttacacaaatagcccctgccgcccaagtggagagaggcaaggtgtgcgtattttgcatttaggtcccttgccgcactctacaaggctgaagggggtaaatgcaatttttgctctgccaaaaatgcatttttctattttttttcaacttgtccgtccctcaagtcaccctgccgccctcccagggtctacttctgtaaatatttttaccggtacaatatttctgtaaatattaaaaaataaaaatttaaaaatgaaaaaaaaatccccacaaggctacgacgtcaagtagtcaacactggctgctatcgcctatcggggaccattaacgtggaagaaagaaggaagtgagctcatcggtcaatccccatcaaagctgggagctcaagctgccttgctgggacagtgtcacagtgaacacgatgggcggcgaggcggcgcagctcacaccggccaggatcgacttctccggcgtggacccggcggcgccggggaccgggcggtgggcggaggtgcgcgccgaggtgatgggcgcgctcaccacccacggctggttcgacgcgcactacccgcagctcacgccggagctccgcgccggcctgttcgacgccgccgtccggccgctcttcgcgctccccgtcgacgccaagcgccgcaactaccacggccccgagaagcccttccacggctacctcggcggcctcccgggcctcgactcctacgagagcctcgccatcgttgacggcctcaagcccgagagcgtccgcgccttcgccgacctcgtgttgccccgcggcgccaacgacgacgacggcttctggtaataatcaaaccaatatatccccatcccattctcctcaaatcttgatttaatttggtcgatttgctctgcgacgacacacacacagcgagatcgtcaatggcgcggcgaagcgcatcgcggatctggaggggatggtgcggcggatgatcctggaagggctcggcgtggcggagcaccacgaggcgcagggcgagtccttctggcacctgttccggatgtccgagtacagggcgcccaattccgacgagaaggtgaccgggtacatcgcccatcagggggggaattgcatatgtaccattgcaaaagaatgacttcactagaatgctatccttaaaacagtttcagtaaaataccacgttcaacgaagacggcttcgccgaaatgccatcctggatgatattacccttggctccacttcttcctcctccatgagccggaggagctcaccggcgacgactatgtgccatggccaacactagctgtagcattggagaggagatgcagccacgacggtaaaccacgatggtcagcagccaattcattgaggacaagcagagccaattcgtccttctcaaccagcaagcaaacaagcagaacaagcagcctcaaacagccacaggtcaaccacgacgccatcgacggctccgccgcctcgtcgtccatcacggcaatttttcgctgtcttccacagtggctccaagtctgggtccccgcatcaccagctactaccgctcgccgccgtctcattgtcctccatcgtcaattgcagcgctgcccttccgtcgtggtcatcagctgccgctcatcctcacccgccagcaccagatctggtagcatgcctcgacggtgatggcagcggtggtcgttgtcatcgcgcccgcggctggcgagagcacgtggtgggcgtgcatgcacaacgcgactgcgcacggcctcgtctcctccgcttcccgagtccgaccttgccccgagccggagtcgcctcctcctcgcgcgcagcgcacggccggtgccaagcaggttttggaccgagggcggacggacgcgggcacggaacttgctccctccactagcatatgtacctgctgctgcaataggcgggtgccatggccgccggtgagctacaggaagatggaagaggtgccgaagggtggaagaagatgcccaagggcaaattagtccagtagggcattcgggcgaagccatcttcgttgaacgtggtattttaccgaagcctgttttaaggatggtattctagcgaatccattcttttgcaatggtacatatgcaattttctccccatcaggacaccaactggctcagcatcgtgtgccagaacgaggtgaatgggaacgagatgcagaccagggacggcgagtgggtcctcgtcgagccgtcgccgacgtcgctcatcgtcaacgtcggcaatgccctccgggtaagcatcagtgtaaattctaccatgtgacactgataatgctgtacaaaaaaaaagtttgtttccccatcattttggatcgaggatttggtggattggcggtcacagatagtagctaagtgagacgatgttgtggatatcgaatgtgtaagcaacattcttagtccgtagttaatgttgcttacacattgttagcccggcgaagaatgtgtaagcaatattaattatggactaattgaattcctgaaattcagcaaaatgactagagcaaacattctgaaaaaaaaacattgtaaaacaccgtagtagatgtcaattggcccgttcctaacaaattacagaatgtgactcttctgctgctagctgcaacctttttgagtttcaggcatttcatgtttgatagacaagaaatgtagggatagtttgtacgagtattcatatacacacttcaacactcacctgataattgatgcttgtccttaattgttcaagagaagcaaatcgcacacttaattttcgaattttcgcaatcttcaggcatggacaaacgaccgtctgcacgcgccatttcatcggataatggtgagcgggcatgccacgaggtacacctgcatgctcttctcctcccccaatttcatgatccaggtacctaacgagctcgtcgacgagtgccaccctccccgtttcaagacgcatgacaacgacgatttcattcgcttctgcgtttctgaagaaggagctcgccacgaggataaactcaaggccttctgtggcttatagcctataggcaacatcagaatctgcagctggttgatccccaataaggtgcactatcaaacaaagtaaccctggacatcttgcacaggccaaataggatatcggttttgtgctgcgttttgtacttcgggaagagttcattaccgtggcgtgctgtatgtgaactttgttcggctatacttgtacttcatcgtcaggtcaaacaaacaccttgcttccccaaccatcttgcagcatagcagcagccttgtgatgaacatgaccacagcattgtctatttcgtccaacacctggctggcatgtccaatgaggcccatcatatatagaagtatagatcgatcaactagctctggctgctgacaaaaacaaccccaagtcgcagtacctgaaataaaggggagttgggattttgtccccttttattactcattttgatatatttttatctttacatttttttcaataaacttgtacttgtgtgtcttatgacataaagccagatatataatctattttcattatctaaaaagtcgtagtacctgacagcagggttaactggtttgtaaagccgatcggtattaactggttttcgtacaacgttgattgaaagttgtcagtttttaccgactttcagtttttacttaaaaaacgaaaaaggtaaaccctgcctggcagcgcgcctgcctgcccagaaccagaaggcggtcaccggcgcgaccatgaccgtgccggagcgagttatccggcttggcctgacgctcttctcctggagcaagcaacgcgcggtaagcctcgccgcccggcagaacaactgtccagggtccacccatcacaatactcatcgaaaattcacaaggcaccaaatctccgaagtttacgcattgccagtatcacaagctttgtccgcagaaagcaacgaaaaatactcccattgcaatgcatttatacacaggtacaggcataaagtagaaagtagaaacagaatggcatcaggcaccgaagcttcacatcatcttcagtagtgtagcactgaagagtgaagacatctgaacaaatgtcataagacgcaggatgcaaataacaacaaagtgcatacttaactatccatcatagacagcaagatcttaagtccttgtctgccttagttaaagacgacagacaaatcaccaggcagcacacacaccaggcaatgcagtcatacactgacaggcttcaattcaagttcatcaaatcaaaagtatataattcattacatgaatgagcatagacaaaatggcaccaatgcttcaattcaagttcaccaaaaagtataattcattacttcaactgctcataaaacattacaactgaagaatgaagatgcctgaacagtgaaccctcaccatacaagtgttccaacacatcaatcaaattgcaaataacagccttcaggcactttcatagcgtacaagtgttccatacataattcagatatccaaataacagccttacttacatgagtccaacaatttgtcacccggtttgcttaaaacgaaacaaggaaacaagatcataataacctatataacaatatgaaccataggacaaataacccccaatgtaataactcacatatctgaccacaacttaatagctataactctctagtattcacatttcgcctgtgtgctaattgtataattcagttctcatttgctttgtgcaactaaatagtataccttatttacggcctcttctttttttccccctcttttcatgtcattatcaaagagagaggagattaggagggagtgagagagtggcgatcggtgatggactgacacgtatgatcaatggccgaaggagaagcggtcggcgggggtgatggagtggcggaagtggcagcggtggccgtaggggcagacgccgccggcgagcaccatgcggcagacctgggtcttgtagcgagggtggcggatgacggggcggagctccgcgacgccgtgggcgaactggcactggtcgccgtaggggcaagccccggtctcctcccacttgttgcacagctccgtcttgaacatgccctggttgtacacctcgaactccagcccacccatgggcggctcctccttcttcacaccaactttgtgctcgcctccctccgcgccgtcaatgcccacgaacacgcgctgctgcttgcattgtcgcatcaagaacatcgtactagttaggattgggattttggattcagcacaggagtcagtgcgctgcaagagtgggagccagacacaacacaatggaggaattgggggatttggtctcaccgagccgacgttcaccggcttcgacacgcgatgcttgccgccctggttcagcttctggtatccggtcgaacggatggagatgctcttcggaagaacagcctgcttctcggggacggcgacgggattcatcagtgcggccggcggagactgcggcggaggaggaagagctggcacggtctgctccttggggaggcggaggcggcggaggtcaccggcgagggcgatggcggagctctgccttccgccgaacttggcgatgcggcatgcgaggtcgttgttggcgacgcggagctcggcgttctcctgacggagcgcggccgcctcgtccgcggcatcggcgaggtgggagaggcagagctcgaagcggttggccatctcctggtactggagcgcgaggtgggcgaggtggaggcggtgctcggtcgctgccgctgcccccgcaccatctccgtcgtcgacgacggagtcggaggaggacgagcagtgggagaacgaggcggcgcgccgcggcggcggcggcgagagcacgcgggtagggctgaagggggagtagcagccgtagaagagatctccaccgttggtcagcaggttgggcgaggagagccgttgatctccgctgccgaacggcttcgggccaaagtccgagtagaagcggcctggatgagccggaggtagaagagcttcctgcatagcggcgatctccgcgaacaactaatccctgcaagtaaacggatcaaaatgtcaatgaaaattccaacaaaaatcacactaaattctccacacgaagcgaaccaaaataaaaaaaaagtagagatgctttccacagaatctagctctgagaacaggaaaatcgtatcatggaagcaatcaaaaatcgcattcgaagacgcgatctcatccactgtaacagtgagaacaagtaatcaactagtttctaaatcgagaaccagactgattccacaccaaaaaacgggacaaaaacgctaagaaaaaacggaaccggacgcctgatcgcgaagaaaacgctgaatccacgaacaaaaactagtttctcaccaatgcagcacgagaaacagcaagcttaaaaaataaaaaagcaaaatcgatcaaactcgcatcccaagtggagcagaacagcacgcccaacccccaactatccactgattaactaactagtggcgcaagcgcaactaaatcaccaagcggttaaccccaagtgtagattggatcaagcagcacacctctcgattagcgctcaccacccggagcctttgattttgagaaggatgatttgggggagaaggggatagggagaggaggaggagggtgtcgtggggctcgcggctctgcctctgaatctctctggcaatctgaagaatgcaagtgctctgcacctgcgcatatataggccgccattccgtgcggtggattcggtggggccggtacgcagtacacacgctccgcgaaatggaagtacgtactgtgttgtacgagaaatggatcgcgcgcggcgaactgtttcttgccgcgcgtgggcgtggcggacgacggtgtttgggatttgggaattgggcgctgtgaccgcgggtgtttttgcacccctctcatcccgctacgcgtacgcgcacaccagcgaatacacctcttaacacacgctcaaatagagatgaaggccaacagtacttgttaatatcctattgaaaacacacccatcggcttgtgtattatatttatgagtaaattttactttcagtcacttttattatcggtatgtctatctgaatcactctttaaccaatatttttgttttagatcggataatcttatctttgttgtattttggaccaccctaactttcttatatatgaacaatctcagctatacttactcttacccgtcaatgaattcccaacctattttcttgacatatgagatgtagatcaatagatggataatataaaggatgtaagagtggtccaaagtgtcacaaagttacgattattggttaaaaggtgatctaatatgaaacaccagtaataaaagatgactcaaagtaagattcactctatattttggatatatcctagtgggtgaagttctgtacccaagatttcacctcagcatcgttggtgctttccattattcctaactattttcagtacgttaatgcaatatatcattattacaaggtccatggtcaattctcaacttgaaaaaaaataaacaagcagcatgcctaacatattcttaactcgatgcttcataacaaacaaatcgtcgagggtccactctgcaaacaaataatccaggtagctgagctactagcaaaatatatcccttgcacgttagacacacgacacacaacaacggtatgctaatatgctactcctatctagtgcggttcttgatgcaagggatcattacaaagcttcgcttgcttgctttgcttttacgggtccgtccctctctcggactccgattgatcaagcgagctaaccaacgccgtctcgggaaagatagttaaccaacacatgtacagaaaaaagaattaagccgtcaccttcccttttaacgttgcttccttgatacagctttaactaacttgccccacccatctcaagccatgccatgccatgcacacgtacgaacgaactacacacatcaccaaccccgacctccagctgctaaaaaaatactggggatttttttttttttggctcctgctgcctcgcgatatgatctcccgtggccgcgacgcccaaacgaattcgtgaggctttttaggtgcgtcgtctctgctttcgtttggcggcgacggcaaccgggatcaggtcggctagcttacacacatgtgctcggcgatccaaatcaatcagattagttatggacttgtttgttggtacgtgcgggtgaagacatgcacgcacgcgatggcgagcgcactgatgtgcaggttggacctgaaattaattcaaggggatatgcattagtatttcttttcaatgttattttgtttttcaagttccctggattggtagtgtactattgtccctctgctcaaattaagcatggttatttggacatcgatttcgtgccgaagatttcaaatcatgcacttgaaacgggtaattatgtgccggtacgatgtacggatatgtccatgagaaacttgttggagctgaaccatcattgtagcgagcttacaggctttgttatgggcctggcctgcttacgtgggctggtcgatgtcaatcgtgggccacgaccagagccacagcgatacggcataggaaaaagtacaccgaaggtccctcaacttgttatcgaattacaaaatcgtcccccaaccgtaaaaccagatatatgacatctcttaacttacaaaaccgttcgttttacatccttcggtggttttcacccggttttattcgacgtggcgggtgagtcagcatgggacccatgtgggtcccacatgtcaggacgccacgtcatcaggctctctcttccccctcctctcccttcctctctctctctcactcatctccctaggcaggctggtcggcagaaatctttacaaaaatagaccctgcggccctccatttaggcggcaagctgacgtggcacacggcgtcgtgacgtgccgtgtgcgcattttgagcttagacccttggggctaaatgtaatttttttccatgctaaaaaaacaattgactagttctttttgcatctgggctccttgccgcccttgcgaattttgcacggaggctccttgccgcccagacagagggcggcaagggggccacgtgtcgtagccccccaaaacgaccgtcctgcaccgtgtgccacgtcagcttttcgctgatataatatttttgtaaatattaaaaaataaatctaaaaatgaaaaaaatcagtgttcaacagctactctgaaacagagccaaatatttcctgtagtgccaaatatttcctgcatccttcgtacggcccacagctaaatatattttctccactacaaaatgttggtacctagaatgaaatttagacaacgaatctggataaacttttatccagattcgttgtcgaatctgtacataatttctatccaggttagttgttctagtatggattaaatctcattttatattacaacattttaagacgatggtaccttcagaatagacaaaatgccaggtaaaacctcaataatataaaactcgaaaatgtaaatgaagtctgctctgccttgtgaggctacgctgttcagggaagcaggaaccaagtcaagcatggactgtaacatatccatcgtggcatccaaaaagcatgaatgaacaggacaatctgcagagtgcagttatcaaagatacagggtatctcaactccccaacgttgagatgcattgcaactctgcaagttcagtaaaatttaaaagaagcttagcatgaagatttattatcacatattggcagaaaaggtgtcaactgtaaggccttagttgtatttctgcataatctgacctttaaggctgtcataaatagaacagtatctcagtgccttataattaatggagagctcataagataatcacacctcacaatccatgcacgtaaactcggttcatacaagtgaaactctcatccatcagaaatgtctaaaactattatcccatttacaagtggtcctatttattattattattattattattattattattattattattattattattattattattattattattattattattattattattattattattattattagtagtagtagtgattgttctttcgtgtaaacaccatatagtatgaagactaggttaatgtaccacatgagtaaataccaaccttagtactgttccgtgagtctttttaccgggtttaaccgttgagagagtcgttatacccaattttttttacgattgaggcgaacgatgatcgtacagagtcaaactagactttatttaaagcttttatcgatcgtagtaggccagggcaaaatcacttctctatcattgcccagctcttgatccgcaagtacgttcggcccaattcctagcaactttgattgtttaggcccatatttcttgcaggatactggatttcgctctcggtctatcccgtcttcgtcttcacgcgcggggactcggggaggctcaaaatttgccgttgcgaagtgtccctccttgtcgccggcgccggcataggcgaacaccatatttgtcttgagacccagactgtgcctgtgacgtcgttgcgttgaggacaagaaaacaacatgggccatgtcctgatcgatcgatccagaaataagttcactttaggttccttactttgatggtgtttgaatcttctgaagatgaagattaagcgttaaacgaggtagaaataacgtttgaataattaagttttaattattataaacttgaaaaatggattaatctgatattttagaacaactttcctatagaaagtttttacacgaaacgcaccatttagcagtttgaaaagcgtgccactttgatccaaaatttaatccactatttttagtggattcgaacagggcctttatcaacgagtatgaaatttatccctaaaccaaaataccaaatataacgagtcttccaattcacaaaaccgaatcactcgaggttctagacagtattatgggcatgttcactttgatgcaaaaaaaaaaaccttaccaaattttggcattgtcaaaattttggcaagatttcttatacagttaccaaaatttggtagcaaactaaatgtagtcacttttttgataattttaccaaaatttggtaaggttgaaaatggcatcaaagtgaacaggccctatgtctggttttaattgacatggcaagctgagtctgcgtgggatccacacgggccccacatgttaattgaaacactttcttccacctctcacttctctcccctcccttcctcatcctcaccgcggatcttctcaccggcttcttcccagccacacccctcccctcctaggtggtcgtgcggccgtgtgccgctgttgccctcaaaaccattgtcccacctacgtcggtgataaaatagtagagagaaacggagagagggaggagaggatgggtcactaatgtgtagggttcgccaaatgctattttttttatttagactgaattgccctgacacgtggatctcacactgactcagcttgttacgtcagctaaaaccggatataatactacctaagacctcgggtgatccaattttacaaattgaggaacccgttatatctaatattgcggttcatggacgaatttcggatttgccgataaattaagggacctaaagtgaacttattccatcgatcgagcatgagcagcaaggaaggccctggccggctgctcctcgttgggccttgttcttcttcgaaggtctctccaatccaacccgtgtcagctccttccctcccattcgaatgcgcctgcaagtgccagctatataacacaccaccttcttcttccttccgctccatctccgccttgctcccaatccctcctcttcctcgtcctcttcctcctcctcttgcagtgcgagctctcccaccgccccatcccctatccatggcgaccaaagcggcgctccgatcgttgtggtcggccttcgacaagcaagcgtcatccatcattgacaagctcgtgtggccttggctgatgccagcggacgataccgaggagggcgcgaagaggcgcgcggaggagattactgaggagctcgcgcagctggagaagaccaggatgacgacgtgggcgcgatcggtggtggagagcttcgacacggcgcctcctccttcccctccgccgctgagcgctactacgcctcatcctcctcctccgtcgcctgcgaccagcagcagcaggacggcgacggcgacggcgacggcgacgccgacctcaccgacaccgacacctcccccgacctcggccactttgctgtggccccggcctcgcccgacgaaggaggaggagggggagggcctgcagcgacgcacggacgcggtgctcgtgaagaggctgaggagggcccgcttcgcggcgtggacgagtgcggcgctgcacaagttcgacttcgacgacgccgcccccacggtgcctcctccgccgccggccaccatgatacctcccccgacggtgacggctacgatcacgccgctgtggcctccgcctcccccgacgaagaaggaggagcatgagggcctccagcgacgcacggacgcggtggtcgtgctcgtgcggatgcagaggagggcccgcttcgcggcatggacgaatgcggcgctgcacaagttcgactttggggccgctccccccacggcgcctcctcctcggcagccgctgcctgttgggaatagtcccacattgaaagtttagggggagtggcaccaacttaaaaggggaggggtcccttacctcatgagctagcttttggggtgtagaaaggctttctcccggttgggccaacgtctaccggttttgggccaacaagtggtatcagagctcaggtgccatgtctggagatggtgtgtacacgccgccaccgccgccaccgatccgtcgcagcagcggtggcggtggcagcagcagcggcaatggagatggtgtgtacacgccgccaccgatccgtcgcggcagcggtggcggtggcagcagcagcggcaacggcggggatggcagcctaggcggccatgagctcgtcgtgcagcaagtgaaggaggcgggggtgacgttacgctaccccatgctcggggagaacaactacggcgtttgggcggtgaaaatgaaaatttttatgcgtgcacaaggtgtgtgggctgccgtggagggcaacgcagccgatgagaagatggatcaaatggctctcgccgccattgtccaagctgtgcctgaggccatggtgatggccatatccgagaaggaaacggcgagggaggcgtgggacgccctcaagcagatgaacatgggtgaagagcgtgtcaagaaggcccgagtacaaactctcaagagagtgcttcatggtatgtacatgggtaatagtgagaaaattaatgattttgctttgaaggttaccacgatcgtgaacgagattcattctctcggcacgaaagtggaggagaccaccgtcgtggagaagctcttgcattccgttcccgacaagttccaatccctcataagcaccatcgagcagtggggggatgtgtcggagatgacggtgacggagacaattagacgtttgcgggcgttcgaggagtcctccaaggggcgacgtcgtgaaaacgcaggggaggagcagctgcttattgcaggggctgagcaacggctcacacgcactgagtgggaggccattgttgctaaagagaagaagagtgatgaggcctctggcaatggtgagaagaagttccgcggcaagttcaacaaatcgaagattgagtgccgcaggtgtggcaagttcggacacttcgctgacgagtgtgatgagccgcggaagatggccaaggcagtgacgcagcttgtcatcgcggacgcggatgatgagccaacgttgctgtgaaaccggttgtggaggtggagaataaaatccaacaagattagagggtgattgttagagttaatcttgttgtttatgttttcattatattcagtcatgtatacgtagtggtctgagtccaaattagctagtgtgttgcgtggcatggtgagctgatcagccgttagtgaaagcacaaagtggtgcagcactacactggccaaggtcacctgtgacgggcccaaaccctcatctttgacgacttcgcgcatggtcagtgatcagtggtcactggtgagtccagtcacctttgacgggtggccggccgtcacaggtgacacccacctctgacgggcaagttactagaaggccgtcagaggtgttggtctccgctagccttgagcgagttaggacccgtcacaggtgactcatctctgacggccctttaaataaaggccgtcagaggttggggtctccgtagttagaagctgtcacaggtgatctacctgtgacggccccaaaagtaaaggcccgtcacaggtaggtcacctctgacgggcctttatttgctagtccgtcacaggttatgttacctttgacggatttttgttccgacccgtcactgatgagttaattccagaaaaaaaataaatgctaaatattggctagcctcaggatttgctagccatgccctctgaaaaatagaaacatcacagatatattccagtcacagatccatcacagatacatcacccccccaatataacatcacagatccccaacaacacatatatgcagttcaaatgccacaattttgcacagcaaattcacaccccttgaaagccacaatttcgatcgttgctcatagaaccgcatatatacttaccaaatggattaaagccataatgtcatcgacctgcacaacctgtcaataaggaaaaaaaaaggagaaaacagatgaatagtacaacataaatcgtagttgatcaaatgtgatgacaatttagtaaagtaccataaatattgcacatatgaaagtaaattacattgcactctataaaaacataattttttacatcgccagaaattataaaaacatcttttttacatcacaataaattatctagccaagttcatgagtctatttggcatgaaaacgtcctttcttgttcattatttctgcaagaataaaggcgcacaattcgcctctgatagcgggggggttgatgggtgagatcttgaagccagctctacatttctgtttaataaataagaggttaattagcacgttttgaatagcaatgtagatattgaaatgagcttattcgccattagcaacaacctcagggtcgaaatctttcacctctcttagaagtgttgacatgttgtggcacacgtggaaaccacattggtctccgatctgttgtgcgcatgcaaacttggtgtcatgataaagttcattcttgccctccttgtgcctaccacccttttccacatatgggcctcaagccatatttaaggccttggtgatttcactgaaatcataatctttggacttattggagttaaggtaggtaaccctactccacttaggtacgatgactaggagaatccaatgtcgcctgcgcagtggttatgtagcgttagtactaagaaccttaacttcaaaaacaatatacacgaagggtattgtcctcttactcttggttgtgtgcgcacatgatgtactccttgtcttgatgggcccataaacaccggttgacatagtcaaccacctcagtgaagctctgtcgtaaattaacctcattcaccatggatggatcaaggaacccaacctgattaccatagcgacgactctcgatccaacacaaccttaaaatatttacgtattagaactaatttaattaggagatatagtccagtcatatcacaagtatagaaggtatgcacttacaaggagtagcattttagaagaccagtgtccaacttccggatcctgaaaaggtcgaagaggtcatcaaagcctatagttatataggcaggcgacgataggaacggctggtggtcgtgatgtccaactatggatgactccctcattttccgcttggcattgcttagctccatgtattgcttatgtagctctcggcaagcaatacccatcacagctaacacattgtcctccaccaatggcatgcctagctcaaattgggctggcgccctcacgaccttccccgatttgctcaccggcatcgacgtcgcagccttgcccctttttggctccggcgccaactcctcgaccttccccttgccgcgttcacgcttctggcccttgacaagtggtggggagctatcggcctttcttgtggtctttattggagc

SEQ ID NO: 5983 - DNA, 5812 bp, Oryza sativa
  unsure (1)..(5812): unsure at all n locations
tcatcacgacctgcaggcatgcttagatcttatacgggattgactatatatcagtcaactaaaattttaataaccctgtatctaccgtgagccgttggatcgacacctaacaaattcatgatatacatggtttatcttctccaatgagacatgttatattttttttctatcttcttacttcgaatgaacttccatgaaaccatgactcaccggtgtcatctagcctacctcatctccggcggctcacttcacctaatacataggtacctccctccgcctcatggtcactccatttcgctcaacccctgcgactagctaatctaccaaaactatgtactgctgccacctagctgcaccacccgactaccacacatcaccgaccgcccgaaccaccactcccctccccgaccatccctctaagcttcagaacacccctctccccggcccatagccacactcacactaaccctcatcccgaatcctaatctagcgatgccgacatcctctcatcatatactaacgtttacattgtaatgaaagtggaatgatggggacattggtgttgttgttattagtgaaaaaaaagagagataaaagccggaggagagttgaagaaaaggtagaatacaactcacaatgatcggattttagtccaatggtaaatacaaggtgacactgtgaatagtttactgtgatacaaatttataacttattaaaaatgccatgatttatcttccattatagggcaacattttcgagtttttattctaataattctatttcaaatttattctagcgagatggcttattgtaagggtcagcgaattgctcttctatctgttcagtttgctttaggcttgatgatttgatccttaatccttcttccgaggccatttatactcgaagaaataatcatggaatcctttgatatagttttggtcgaggtcgagtaggtcatcaggattttgccaaagttgattttttttaattcagaatcctatcctcgttatacgtatgtgggtgaggatcctctaccataatgccactgccattacggccagtgatgcgtggatcccaccgtcctattgccccacatgtcaatctctacgtacacatattgggtatgatatatgtggactagcacatccatacatctatggaatatctcatactcccttcgtctcataatataagtatttttggagttagaaacgattattaagaaagcatgtagaattaaatgaatgagggttgtgattagataagaagtgaggtagatggaaaaattgaatagcggagggttgtgactagttgtgaagagaatattggtaaataaattgttatattttgaaataaattctaaaagagttgttatattttgggacggagggagtattatacagtacaccgacaaccatttgaagacaaaaaaaaatactggtgtggaaatggtttgaacatatttttttcagacttttttttcccgctggacatagaggagcaagttcgccgcacatatcctaaccagaaagagaaaaaaaaaagatcggacggtcgctccagcagcaagatagattgtgcgtcgacatgcatgattcatggcaatgatagtgaaccccagaatttagtacagccggagatcgatgagctcacaaccttatctcatctaatcatgatttgattttttgattagttagttttagtggccaccgcgtcggctcgcaggacaggacaaggacggacagtgctgagcaaaatggcagctgcctataaaccaactgcggcagattgtttacgacgcattacatttgttagcccatccatttaattatactattattatcgaacgcacacactgcacgcacccatccttttgctgcgatccgccaatggccaccaccaaatttgcaagattctgcagatcttgtcgctaccagggccaggatgtatgtttctttaagaagggtattatttcctcgacatttacatccaactggatatatacaatcatttaaattgagaactttgtttaaccaaatatgaaattcgctcctataaattaggaacctagtcccgcaaacaatctaatctgaaattcactcctatgaagatttaaactcagaatcttatgatgctattcagatcactgcaaccaatagattacatgctctttttgcattgttactgctgctgctgcttattgccaatcattttatttggtggagaagaggaggacggatcggatttctctccttatctccacttgcagtactcaaaagaaagtctgatgaagcgtttgcgagtgtgtgtgtatgtgttggtagtgtttgtctggatcttgagacagaaatgcttttgcatgatcgatatggcgtcggtttcggcagcactgttgaggcacgaacggcttcgtttctccgagaaaagtcgttctggatttcagtgggtactaggctgctttctggcgacgtgatttgtcgtctccaattatccagagagagagagagagagagagagagaaagcaagtagaggtcatgtttgctcttccgaattgttcttgttgctgttccgcggctgcacgagagcttgacgcctcaacgaccaccttgttctcatgatcctcccattcatctttgattttaaaattttaaggagtgactacactacatatgcaggtggttggtagtcagtttttaaaattttgaaaaagttaaaaaaaatccaaagctcttgacttctagttttctgaattgcttgagaaagctagatattttgaaaaaaaaatttgcaggtgcgagaagttagtttagtggttgtgacctaagtagtacctcaagatactgagttcaaatctttatataaaagaattttagattaggttgtttgagggacaaaattcccaatttaaaaagaccgcatacatctgttttgatgcaaaagttgggtaaaaaaataccattctctaaaaagagaagttaaaaccaaagctttcatatccaaattctgcaaatcaagttcaaatagggttcaaagttgcgaaaggacctgtaacctagtggttacaagagtctcagtagcatctgaggtcctaggttcgactccccgtgaaagcggatttttcaagatttaacgacgttgtgctttaataaaaaaaatagggttcaaagttaaatccactaacacttcgggatttgactgaacagatggaccgccggccaaacgaacaaacccaccactcccactgtcccacgcaacgaactgaagctcatgcgatcaaaaattcaaggaataagtccacatagactcccttaaaagtgacccaaatctaatatgtaaccctcaaccgcaaaaccggataggataggatgactcccgaactactgaaatcagtgcaatttgactccctcagtggttttgctgatgtggtgctgacgtggaaatattgacctagttttcgtcacacgtggcgcttacgtggcattacaattaaaaaaatatatgtgggacccatctgtgattcacacaaaaatatattgtggtccccactgacatgtgaggcccacatgtcatcctctctctctctttcttcctcctccctctctcccccttttctctccaccttctctctcgtggagcaatagacgggcaggggtagcgacagcgggcgggagctggagcggcggcggccggcaatgaccggagcggcagcggcggcaggcgggctcgacgaagcgggacttgagcttggtgagcgacgaccggcggtggagtagcgcggcaacgacagcggacgcaatcccgtcgcgccgcggccgcccatgcgacaagaggaacgccgtgccgggggagaaaggggagggaggagaaagagatgcggatgcaggggagtgggtgggtcttcctcgccggccgaccggtcaagggcgtcgagggctccgccttcgtccatggcgcttggattagggcgcggcggactccctcaaatataggtcaagctgcagtttcactaattcacaacttccaccgcctctacctcgccacgagcacgagccaccaccacccctcgccgacatcgcttcgtcctcgtcacaggagccgttggcttcgtcggctgccacgcaactgccgccctgcaaatcacaacactactaaaatctgaactctgaattcctgaatgcccagttgtttggtcttcacaaatgctcctatatatacaagacaattactaccgcaagaacacagaattagatcggttttgcagtagcacacacaatgatccaaggaaaatggattaacatcaatggcagtcgttttcagcacgcggaactcaggaggcagatcggcaaggcgatcgtcgtcgtgagtagtctgaagctctgaaacgaactaatcgacgagcggcacatacaggagaagataatcggtggagagagatctcatgagctgttgctatcgcattcaagcgccatgaccagtacgccgttgctatcggttttggggaggctttgcaacctccggcaacggcgtcgtcggcgtcaacagcggtggcggcgcagtcggaaatcctcctcggggtggcgctcccggacgacatcgccttcctggctggaggtggagcacggcgatgggatcggggcggccaccgcttcagctcccgccggctgccaccactccggcccccgcccgccgccgctccagcctgtgctccccgcagccggccgagagaaaggaagaggggaggaagaagaaagagagagaggatgacatgtggggcccactgacatgtgggccccacaatttttatgtgtgaatgataaacgggtcccacgtatacgtttttaattcaaatgccaccaaagcgccacatcaaccccacagattaggtcaacaatgtcacgtcagcgaaaccaccctccaaaaccaccaagggagtcaaattgtaccggtttcaatagttcgagggtcaggatatccggttttgcagtttaggatcatggattagattcgggtcatttttaagggagtaaaagtggacttgttccaaaattcaaaatggacagttttttttaggaataagttcacttggtgaccctcaaaagtgattgaaatttaatccgtaaccctaaaccataaaaccggatatcttaacccccaaactatggaaatcggtgcaatttgactccctcagcggttttggaggtcggtttcgctgacgtggcggtattgaccgggtcttctttacacgtggtgttgacgtggcatttagctggcatttagaattaaaaaatatgtgtgggacccatttgtcaatgacacagaaaatagattgtgggacccacatgtcccttctctctcccctccctcagttccctctctctcctcgtcgttccctctctctctcccgcagcaggcggagacggaggtgcggcgacctgcgagcggcggcggcacccgggctgagctccaccacggcgaagacggaggagaccacagcggcagcggcgggaggcacacgcggcggggtacagcgagctcggcccagcagtgggaggacgaggggagccggcggcggtgtaaccggcggctgaggtatgggggccggcgggcgggagctgccggcggcgggagagcgggtgggcgaggncgccggtggctcgtggcagagccagcatgagggaacgcggcggccgaggtatccgagttcctcttcgaccgcttcgccgcggaccgcgccgccatcaccatcgccatttcagcagtcanagtcgaatgatgaacgtctgtcccanccagcnggtcatcaaaaccctg

SEQ ID NO: 5984 - DNA, 7838 bp, Oryza sativa
agacatgcttaaagtgcttttgatggtaaatctagtaatactccttttgctttacttaaactaagtaattgtataaatattggttgttatatattaaacacttgatcaaacaccaccggtccaaacactcaggaattataacattccagtccttttgaaataaaccctgttaaagtatataagaatggacacctaggttaacacaaaccccgaagttggggtcaacaccataccttgtgggacctcttgggagttcaatagcaacaaaccattgcaccacctagaaggtgatgacatgatgtggtatattaagtactagcataatgcccctgcgttgcaacggattctaaataacatttattgacataaattaaaatcctaaaccatgcatatatcacaattagactgaagggaatatgatcacagaaataacagtattaaactacaactaactttggctggaacgatatttcaatatcagaaaaaattatataactaaatccttattttatttagctataaataattcaatacagaggaaattgcaagttacaataattttttagtggatcaaatagcactaaaactaatatcgcaaacgaaaaaacaaatgaaattaactagaaattaaaaaagaacctattttagcccattgatgaaaatttgatccataaaatctgaacgggtacccgtttcattgatataaattagaatttcatgttctgatcatattcctatgatctcaatattatgtaagtggtccaggagcatggttgggctagaccacgaaggattagagccttcgtccatagatggtggaggttgccaatgaaaaaaaaaatcaaaacaacatgaaacaagaaacagaaaaggagggaagatggacatcagtcctccggcgaccaaactgtggtgagtaaggtggccggacatgccccacgatgtgactagttcgtagatggtggtggttggcaatgaagaaaaccagaatagcaggaacaacaatgatgtggtcctgatagagagagaaacagtaacgacaagctctggtggtgaggacgaccagatgagtgcgtcaaaacgtgttcctggatgaggaggttccgttttccttgaatgtgtaggaagaacgaaagatggagaaaggcgactaacgttgttcattgtcttccctagcctaaacaaaaacagaacatgagtgaagatgggcgctcatgctctggcgaccaacggtggtgagtaaggtggctggacgtgtctcatgatgtgactcgtccatagatgatggagggtggcaacgaagaaaaaccagacataggaaacacgaccagcaacaacgttgtcctgatagagagagaaacaacaacgacgagctcttgtggtgaacacggtcggtgagtgtgtcaaaatgtgttcccagacgaggaggttccatttttgttgaacgcacaggagggagggagtgtaggggagaagaggagcgctgggaggagggggcgacggggaggaggagcgccagagaggagagaggccgtggggggaggagaggggccgggggaatggggagcatgtccaatggggttggatcggatgattttttgggattgtgagagagagatagaggtcgtcgggaggaagggggatcaggggaagggaggaggtggaggcgcacacgagagggagggagggagggaggcgtgcggcgcatgggagggagagggcagccaaaaatctcgtccagaagccttacgcatttttaattaggtatatattaattgtcgatatatgagttcagcgtagtgctgacccgatgccacttgtgcataaggttccgctaacgtggtagcggttactataccatgctcgctggcgttgagccattggaactcagtgcctttggccctggttctgtcctcgaagtccattttttatatagtttttgtgcagggttcatttataaaattagttttgtaaaaggtcaaagtgttaaaatttcagccaaacacttgaccatatgcccataataaaagtaaaatgttgttacacaaagtgcacatgcacggatcatgcttctttccctccctacttgaccctaagttcggacttcgcatgacgtatcaacaccgacaaggtgtgcaatggggtgctaaccctagcagtggacatgctttgtggcagttctgacacataatctccttcagaggttaaggaaaatggttacatttttatccccatttagtttaaaagggctaagtccatggtgctatggttggagcacaaatgattgtatgttggcttgaaattatctaaactcaggttagactaaactggaaaactagagcaaacacatggcaaaataaaaaaatattaatgggcaaactagaaagtaattcgagcaattttgttttttcccctactttgatgtctaatactgattttacccttactttttagggtttttgtttttgcccccagttttttgaaccggacgatcatccggcccctattttggatggtgaagttaaaggtgttaagtaattgtcacaaggacatttataccctcttatattttttttattaattgtgtttttgcccccatcttatacatgttgctttggaactttatttttttgaatatatttaaaattaaatgatacacattgactaatataacaattaggacagattcagacctaattgttgtggcaatgtatgtcctgtctcctgtcctaattgttatattagtcaatgtgcgccatttcattttaaatatattcacaaaaataaagttccaaagcaatatgtatgaaatgggggcaaaaacgcaattaacgaacagaaataggagagggtataaatgcccttctgccaattacttaacattgttaacttccccatccaaagtaggggcaaacgatcgttcgtttaaaagaagtgagggcaaaaacgaaaaccctaaaaagtatgggtaaatcaatattagacattaaagtagggcagaaacgaaattgccccaaagtaattagagaatatcacaccccactacagggtgtgacctcaggcaacatattgcatatatgatagggctaattaatgggtgaataggaaaattattatctaggatattactctcatccccatccccatcactcttcaaggctaatgtccttggtagcttagcatacaagtacataacaatgggcatacctcagtggtacgaaagcacgttggcatgaacacacacccatgccatgtttacgcaactagaataggaggtgccggtggtggatgttggattataggttggattaaaagatgctctcaaaagctgctagggtgcaacttttgtaaactagatgaataccccgccgcgttgctgctggaaattaagttgcataatatgtacaaagaagatgaaatatgaatattaaaactaaaacaaattgatacttatgaattttgaggcctaaaaatgattgagattacttggtgttatgagaggaaagaagagaaaatttgaaccatagatctatcatccaatggctagaaataattggggtgatatggcttaatgagagaagagagaaatagcattaactacacttagtggggatgaactatataagtatataggataagaggactcactcctggagcttcccgtagtggttgttaggcaagctgcaggttgagcacggtgctcaatataacttagttggctactttgaagccgtgcacacatagagagatagagagagggggaggggagcgcggaagggagggagagagagatgaggtgtggtggctgagggtaaggtggccggcaggaagagaggggaaagaataaagggaggatgacacatgtgagggcctttttttagcttcttcttttttgtctgatttgattgccactcaacaccacattagggaagaccactctaactttaatataggatatatgcaaagtgattttttttaaaaaaagttcaatgttgaacggtgtccaaatgaaatttaggatttatttttagagttgtaaaatggattattttcctaatatatttcacttaactcgacagacattaagcatccatggcttttaattggctatctatgttttagttcaaaaatcaactttcccacctctttattctaaatactaatggtgcgcatgtgcggggaaaatcccactaaggttctatttgtaaatatctattctagcgcttcagtgtataaatatatgttttgcaggtttccaaggtgggctcaaccatccatgagatatgttgtaacctttacaacgcaagtaccaatgcgacgcattctctctaaaaagataatggctatcaacaccaggcttgaggaaattattcaaaacaaagataggtacaagatggacgatgtgaataagggaatagaagtgacatggaaggcttcaacgtcaatatccgaaagcaattctgagctgtaagtgtgcaaaagtgcatttttccttgtgttttacatgcttctctagttggttctccattatccaacatacttagtgtgcacttaattagatttaccaaggtaaattgtttatataaattgttagagaggatatataggtgtaatttctataagaaatataccaacaaagcaccaaatgcattgttgtccatcacacatgttctaatatttatggacagaactattaaaaatacaatcatgtttgaaagtttagccacacacattccttgaacacagagatatgtagcctaggggggggataggtttacctgaaattctaaaaacaaatcgcagcggttaaattaacagggtccggaacatcctgatgaagaacgccagaacttccggtgttgcaagacaggaacttccgagcaattggtaaatcagagcaaagattcaaacttcgactcaagaaacttgacctattagagcaatataaaacataggataacaaaaaagtaaatggatcacagagacgagcacaaaatcatcatagagaggacaagagggattttttttcctgaagttcggatcgcacgtatcctactctctgttgaggaactctgaagagttgggtctcgattaacctcttgcctctcttgtgcaaagattccagaaaaggtccacagccttcaatccaacacccttaggttattctctagaatttgagtgaccgccaagatccaactcaactttcttctagagaggaccacaagtgagaattgctctactaggacgatctctgaaaccttagcacattttccttaatcacttacctcgtttccttgcggaggtgaggaataccttcacaaacttgcccgggacatccacaatctcgaaggaagctcatgggcgacacctaaccgtctaggaagagacctccaagagtaataagctccaaatgacagcccacgagataccccaagtgctcaattcatcctaaccttcaaaaccttttgcaaatctctctaacaccctcacaatcactctctcacacaagaatggctcaagattttgggtgggggaagcaaattcaccttgggagaggctagaaataactagggaacggaagagcaaaagtgaaatgtccaaagaatgagctgggtctgagtttgatatatataacaaatatgtgacgtcatctagccgtcactcacagatttgaactgaagggtggaccggaagttcctggtcctggggctaggaacttccgaccaacatttaggaaaatgtcgacttcacctcagctaggaacttccggcccaaagtgccaggaacttccgtccggcccttgctgtcttgagaagacccattctaaaaatggctcttaaaaatatttcttcgcttggacaggagtaagagcacttgtactatctcagaaccacacctagaatccctcttaatagtatgatttttcctaaactcgaatgcaaaaaagtaaactagtctaatacaactccgagttctttcgccattttaaatttgttgatttgggggttctccaagcatcctgggactaaaacacttgcattttactccataaacacattgatcccttaaccacttcatcattaatcaccaaaaaccactagggggataaatgcactttcaattctggaagagaaatatttgtgaacaaacaaaaagtaacaaagaataaagtatgaaactatagtgacagcattttggatgtaaatatataatccaatggcctagaatcctgttggacagtctaataagtagatagatcaaaaattaatgttcccaatgatgaaaaatggtggaaatggcattccaatccagacttggtggtgtggttctcttctattttccaatctgcagatggcatatgatttctttaactacatatagatacaactgtgttttcttaatcacaccgaacactcgtaagtctttgacttgctaaaaagtggagatgtatattaataatgtttatatcttaattagtgtccacatataattaaacatatatggaattactttaattgttactttgaaaatttaccgcacacaattctctcagggcatgtgttgtggtgtgcatatgttgcatgtaaatggagaaaaaatagtagctttagggctacttttgattgaaggaaattcaaataaattttaaaggattctaaacacaaggattttttttgctctatattattgtttggaacaaaagattttagcataccaaattcccatggattgctatgctctggacccattttatatatagaaaattttacactaagcttaaaccttattttacatttcctttgagaagtccaatatacatcttatctctcttagttccatcaaattcctatggttatattccaatgattcatccaaacacaaatatgtttcgattcctatgttttgaattaccataggatttgttcacatgtgacactctaatcttgtcttcttttctattcctgcatttttgaaatcttgcattccaaatgatccctaatacttttcatgtaaaaggggttaagccactggaaagttgtcatgtttgacattggtagttatagcacaaactggtaaaccaaataatattggtaatttctttaaaaaattacacttatcatatcattaatgaaaatataactcagcctctacaccaaccattaatgtatagaggcttttaattatgggacttaagtaccatatagtcataactccagtgtcagaccaaatatacttcgtgatcaagcaagagcacatcgacgaaacactttttatagctccatgcatttttacaagagaaatgctatataaattatagaaaaagaataaaaacaaataatgaacatcaaactgaacattattcaaacctcaactgtcatgcatagttttttacctcggtcttgtttaatagtgattttggatgacatggtgccaagatggtataccaagaaaaagtaggtttttgagtaaaatggatcttatgaaatctcacttatagaaaccaccaatattcttgactaattttgtacatacaaaataaagtaggttaattgagttataaaacattatttaaaaccgaacgaaaccattttttttggggaaacaatttatgtaggttctaaatactctaatgtgcatgcgtgttctaactttttcagtatttactactccctccgttttttaatagatgatgccgttgactttttctcacatgtttgaccattcgtcttattcaaaaaatttatgcaaatgtataagatataaatcacacttaaagtactatgagtgataaaataactcataacaaaataaattataattatgtaaattttttgaat

SEQ ID NO: 5985 - DNA, 10276 bp, Oryza sativa
caggtttttgtggggtgccgcgccttaaggcggtttcattgagaaggaagtgcggagcccttttgggacattgtgtaagagcgggaaggctaaaccttagtgttatgcgggatttttgacgctaccagcgacctcgttggaatatggttaactgccgggctgtcatttaaggttaggtttcgatcgagtctctcacccggaaaacaatgtactatcgcagactgaaccgacttttcgcagtctattgttaaagtagaaagtcgcaggctcttccctgaagccgttgggccattttggcccaacatccctcccacatcccgtggccgagccggcccatccggcccaacccgccaccaccgcccttcctcgcgtggaggccgacaggtggggcccacctgtcggtggtgtctcctacctccggccggctgcaagccgagcccgagccggccgagccgccgccttctgcctccgtttccgccccgatctctccacccctagtccggatttttgaggggtttttatccccacatcttcctctatctttcccctcaagaatcggagcaaatggttgagtatcttgcccgaatcgaactcgttttcgagtttatctccaaaaccgagtttttgattttcccgagtcgatttcttgcgggaggagtccgatctcttcaatccaaggctataaataggaccccctagtcctcctctttcgtttgccccaactcccgtcctttcccgtgctccgtagctccgtcgccactgccgcctagcaagccacccgccgccggccggactccggttgcgccgccgcgccgcctccgccgtcgccgtcgcttgccgtcgccgccgctggtttcgccaagaggtggggaagctcggccgcctcctccccttcgccgccggccgccgtagcctcgtcgccgccagtcaacccgagccgccgccgccgccttctcgacgccggctatcgtcggtggtcgttcggtgtgttggtaagtaccgtcgcgttcgtctcgtcgttctctacgtgtagatgccctccaaagttccggccgaccgccctagctccggcgaggtcgtcaattcgggccggccaccattgatgacgtcatcgtgacatcatcatcttttctttttcccgtttttctaatagattaaaacttcagaaaatcataactaaataaccgtagatccgtttcaggtagttcaagttgctaaatttttctaaaatcaagatctacatgttaaaaatatccacatgtactgtgtatgcttgtttttgtactgttttgttaatttttgtttaattgctttagtttccgacgttccggaggagagcgtttccgttgaggaaggttccgaagcgtttgcggaagcccaaggcaagtcacacagatcccaaacaaccctttgaacatgttgaacccatttaaagctattattttatttcagctatgcattgttttcgaatgtcatcgggtggtaaacctttcccaattaattaatggccgaagatgatcttattttcctataggttataatttgattagcatgaaccttatatgttggattggttcagctaaatgctatatgcaagtttgcttagccatgcttagaaacgttagctaactaaagggattaattataaactatgttacattattattttaattatggttacattaaatggtagctcacgatggttaatcgtgtgatgttaattaattgatgattaaaacctggttaaggtgggttgtgagcatatggttttgatggttgtgctcatgacaattaaggaccggttcgcgagctactgttgtaaaacttttaccgtgccaaccacaagccagcgtgggcaacggctttatcttttgtatagcatgattcattatagtgcgccagactgtgaagcggcgagaagtccgtgggggtcgctggggagtccattgcctctggttttgagggggagattatgatccaggaacggtgcactgtggtgagttgtgttgtgcaaggggtattgtcacagttcttttccgaggtatcgtggtggtactaaggcgcatggtaacatgttgtgggattgtgtcttgtgggtacagtggtacacctctgatcagagtttaatctattcgaatagccgtacccgcggttatgggtgagttgagcaatgtttttcgtgattagtcgcactactcattaatggtaataatgtggtaattaatttgactcctggtttggaatggataattcctggtttggaggtttaatttgttcaactggggttggttgttcaaatgtggttgggcctatgcaacatgggtgtgttgtatggtgtttatttaatattgattcattatacaactgttttactattctcttaaatatttgttaaatgctgttatgcaaatgagctatattatgccatcctttgttatcctatgcacttgcatatttgctgtgtggcttgttgagtatgtcatatgctcattcttgcaatattcaatcatcagaagaggagtatttcagcgaaggtgatgatctgaaggattgagcttgttctggttaagatgcctgtggagtggagtcgccatagctgttccgtagtttgttatagttttatttttccgctgcgtagaatgttattctttgagaggaactatctacctctgtaataatttattatttgcgaatattaaatagttatttatttgtactctattatcaatttgttattgtgtgcctcggttgattcctggacgagggtttaacacacatgtaagcgtttggaattttggatagaaattccgggcgtgacattggtcgcgcccatggcagttaaggaccggttcgcaggatgccctggaagaacttatcgtacttaccacaagccaacgtgggcaacggctgggcttatagtgtagctttcctctagttgacgcatccaggcaagggtgggcgtgatggagcggggcgggccctgcgacggcctctgtcgcttccggattcacctaggcacgagaggggactgcccgttgcccgctggggacgggggtgaaacttgaggtgtggtgtgcttagctagagggggttatgcgaagggtcctgtcacagtctctttctggtatgtcgtggtggcatgtcggcgcacagaaacgtgttgtggggctgtgtcttgtgggtacagttgtacacctctgatcagagtaaaactattcgaatagccgtgcccgcggttatgggcggtcaaccagattcaccgtgattagtctcaccctagtttagtctaatggaattagatagtataggtggatggttgggcctgtggcaacgtggtatagcgttggacagtggatgattaatattgattaattgttacaactgttttactgttctcaacttctgtttataaatgcccgttttacgcaaataaaccagtatagctatcccttgataattccctgcatcatacccctattccggtatgacttgctgagtacagtgggtagtactcagtcttgctctatttttccccaaaccctagagtatgagtatgcgtcagatggtggtttctccgaggagtaggcttcgtccgtgccgtcgaggatgcctgtggggtggtgttcccgctgcagatctagtcaaggcttagccccttttatcttttgtttttccgctgcatttatgtaagacttttataatgtttgtaagacgtggatctgtatgtcaactttgtcgcttgtgtaccccagccagtcctggacggggattttaatgcacattctgcttggaattctattcgggaatttctgggcgtgacacgcatgggagaggtgtgtgcaaagctagggccacctatcggcacggaaaagaagcgtcgtaggggcgtgggatcggatggtgactttgcctgtccaagtagacatttaccaccttttagttgtagtgaccttttagttgcagtgacagagattttgactgttgcgcctcgtgagccatgtgggccacacccatcacccacccgcacgcactcgatcgattaaccacccaaacaacgccaatgcaagcagctcgttcccaagttgccacaacacaccatgcatcttcgagttcgactcgcgggcgcacttgtggagattatgggtaccccatacccacacggcacggttatccgactagttataggggataacttatatatatgaaatatgtaacagatcatgacttgggtattacgtttccttgtatattacggaacggcctaaagtcctggtttgataagattgtaaagtagatttaggaaaccgataccgtattggataaggtttctatcttgtaatcatgtcccccatcctatataaggtgggcaggaggccctctagggggcatgagacaattagatcgtcagatctatactacactcggcggattcaaatccccaaacaggagtagggtattacctctcattgagagggcctgaacctgtctaaatccttgtctctgcatccatatacttttaggtttcgtgcgctaccccgttttattattgccgaattcatgttttgacagctggcgcgccaggcaggggatgcgtcgagtttcccgtcgacgagtgcgatggaatcaattcaagcattgagattaatctcaacgagttcgacgactccaaatgttaatcggtttgtcgtttcaatatattgttatcagattgatctataatcacaattgattttctgttgtttttcctctctggttacatgtgccgccgcgctgtgaattcttctgatcactgcgggttgaaaaaaacataagccatggggaaaacggccggagttacgcggggtcatcagatcggttctgtccatgcaagcacgggatcaatcaactgaattaatatgaatggcttttgcacctatctatgcaaatatgcatctacgttacatgcatatacagtataagaaacatatatttctgtgtactttgccattgctaatcagattgatttgtctggttgcatgtgttatcggagctgtcatcggattcttctgagttatggccacgcgtgaacgcggctatgccacctcgtcacccgagttcgtttcccatcatctgaaccctccggctagaatttaatccagactcgggtcaatgatttacacacgcatggcagcagcatggatcggtccaatgacatgcacgcatccgggaagaccaatcttggcgagttcaacgatttaatctcgacttcgccgggttttttcctttcaacttattgttgtttattagattgatctctaaatatcagattaatctcttggtattttctgatgtttacatgtaataccgcggcactactgttgccgactggtgccttcgtcctcatggctggcctgctatgccgctgctgacgggcgtattgatcttcaccgaccggtagcctccgtcgccgccgactggtgtcctcgcctatatggttggttggtcacaccaccgttcatgggcgtccacatcttcaccgaccggctggccttcgccgccgccgactggtgtttccgcctgcacggctggcctattatgccgccgttgttgggcgtctacgacttcaccgccggcctgcctccgtcgccgccgactggtgccctcgcctatacggttggttggtcataccaccgttcatgggcgtccacgtcttcaccggccggttggccttcgccgccgccgacaggtgtctccgcctacacggctggcctattatgccgccgttggtggacatcttcgctttcaccatcgaccgccttcgttgccgccgactggtgtcttcattgttattgatggacgacttttttcccacattggccacctctgccatcaccaaggggaatattacaaagctaagtcatcattgttttattccttatatgatattttccttttcctctgcctcactacttcaactggttcgctgttgactagtgagtcggaggctacagatgttatatcatatttttcaacatttttcataatatttatcctgattggttgcaaaatactccgagttcaaataaagtgcctatcgagttatggagttctatcttcctatgccttccatttggtttgtcgatggatagttgcctttgggccgattcctagcacccgggggctcgttggatggaccaagtaacgcaaggtgctaaatattattcggaataaatcaaaagcatagagataagataaatctattttctgctctctacaattgcaaaagtacccgagtagtaaattctgattcgtgaaactttgttccattaatgacgaactcatgtcactcatatgcatgtttgggaagtgcctaggccgactcccgatgctcgggggctatgactagtcggacagagtgtttaaacgtacggagtcatctgctcggggaaatcaaaattgagtagaggagaaatacatatttataaatattttaaaatacttgaatttttctcgagtattatatttatatcagatactactcatcctatatgtttgttttacaggatccagatccagatatgcataaaagggattcatggctttaagcttatctcttacgcttcaggaatgggatcagtcagaacatcaccaccggcttgctttcgccgccgccgactggtgtcaccgcctgcacggctggcctattatgccgctgttgttgggtgtctacgtcttcactgaccggcttgccctcgtccgccgccgactggtgtttccgcctgcacggctggcctattatgccgccgttgctgggcgtctacgtcttcaccgaccggccgcctcatccgccgccgactggtatctccgcctgcacggctggcctattatgccaccgttgttgggcgtctacgtcttcaccgaccggccgcttcgtctgcagccgactggagtttccgcttgcacggccggcctattatgccgctgttgttgggcatcatcgacttcaccgaccggccgcctcgtccatcgccgactggtgttttcgcctatacggttggttggtcacaccaccgttgttgggcatctacgtcttcatcgaccggccgcctcgtccgccgccgactgatgtttccgcctgcacggctgacttattatgccgccgttgttgggcgtctacgtcttcaccgacaggccgcctcgtccgccgccgactggtgtttccgcctgcactgttggcttattatgcctccgttgttgggcgtctacgtcttcaccgacaggccgcctcgtccgccgccgactggtgtttccgcctgcacggctggcctattatgccgtcgttgttgggcatctacgtcttcactgaccggtcgcttcatatgacgccaactgatgctatcttcttcacggctggctacgtcgtcgtcaccgctaataggcaccgtcatcttcaacgcaagctgtctacgcctgctgccaactggtttattcacttccatggctggatgattctgcccctggttattggccttatcgtcttcaccaccggtcgtctcgtctgctgttgactggtgtcctcgcctctacggctggtttatgccgctatcactactgatggacgtcattgtttttattgctggtcgccttgtctgccgccgactggtttgttcgcctccacggctacgcgtcttcgctaccggtttgcttctgttgccgccgactcgtgttcacttcatcacggctgtgcaactttgtcaccatggtggagctacttcatcttcattattttcggcaccggcaaactctatagcctctacttcgcatgatttgccacttcaccaaccacgacgtctacaatagcctcgacatctcggcatgtgtcacaaaatatgatgccgtgttattttactacaacaagtgatgttccaatcttcaatatttatcttcactcaagcaatgattacacgacgacaagaagctacagttctcgactctatgttcagttgtttcccaactaactaaagagtcgggggctacacaaatacaagactctcaaaattcgacaagctgaagcaatcaattaatcagccaactagtcaactccaggagtcattatcttcatctttgctttagagcagagttatcaaccaatcagctcagtttcgatgagatggacaacatcatctactttcctccaagtgaagcatctacaacagctataacaccaatttgatggattattgtcactgacttcatcaccagcacctctacttcattggccctgacatctctgccgttgctaatggatgactacgtcttcgccaccggttgcttccgtcattgccggcttgttatttcgccttcacggttgacctactatgcaaacgctgatgagcgtcttcatcattatcattggttgctacactgctattgactggatcaccgacatcgtcatcttcatcatgttggttgcgtttgtcgtcgccgactatttccttcatcttcatgattggtggatttcgtcattgcctttgatgcgtgtctacatcttcaccgttggcttgctttcgtaaccatcgattggtatcctcgccttcacgaatggcttattatgtcgccactaatgggcatcttcatcttcttcaccagctgcctcgtctgtcatcgactgattatttcgctgccatggctacacaactttatcgctgggcgccttcatattcattgctggctgacctgactgctaccgactggtttcttcgcctccacggctatgcaacttcatcacttttgattggtatcattatcttcactaccaccaatatttttgccacctctggtaggcaatattatctctatattggtcgtcttgtctctatgccaactgcgtcagctacgatcaatggacaactgtgattacgacagaaggacaagctatatgctcaggggcttagctcaaacacaagtatcataccttcaatttggacttgctctggatacatgcaacatgaattcataaacatgggtctattttctatgctcaaagactggactatttattattccctataagggttatcaaccgaatacttgtgtcagtcgggattcaattattatatctatttcggagtatcccataagggataatcactcagatcagaagctattcatatgagctatacttggtctatatcacccggaagatttattactcgggagcatgttacatgcgtcatcctttaaagggtgtcgaaggcatattttttggcctaggcctaatatgtctgcagcccatattttcaggtgtggcctgtcacgttcttttagggacttaggcatctttttgcttaggcaaaagtgcgcgtgattatgtgcccaataccttaaaatccttttatatcgcagttactcaactttttaggagttggtacattgcattttaaaaggtgccaaacagtaatgctttatatagctgcccgctgacttttttatataaatcaaggcgttgtttgggttcataaagcaattgattggatacaatatcattgctttttgccacgtaagtgtgcacttttattgaccaatattatggcttaggctgattatatattttggtcattttccaggcggttggtaaatcctttatgagtttatttactcgaattttacaccacatatgccgtatatttttgggtgtagtgaaaccatgtgtcttttagggacttaagcacatctgttaaagcagtgtgcgcatggcgtatgtccaatactttggaaatttctttactcacagcattcgagcttttttatagttgttttgctatgtgaattttcaatgatgtagtcagctttaggttgcatgcatcaatttttacaaagcagtcggtatatcacttggatcatgttgctatatattaatattaagtcacttggttgactacaattatcaaaaccacttggttggttggattatttattccttgactatatgcttggtttgttcaattaaccacatgatcgggggctaaaccaattaggtgcatctagtcgatgcacctgactttatttttcagccatccacagtcttctgatttagtaaaagtactcggaggtcatggcgaagatgattgaagcactcggctttggagtaatctagttcgagagaagattatcttttcgactgtgaaggtctcaggggctactgtggagattatgggtaccccatacccacacggcatggttatccaactagttataagggataacttatatatatgaaatctgtaacagatcatga

SEQ ID NO: 5986 - DNA, 30374 bp, Oryza sativa
  unsure (1)..(30374): unsure at all n locations
agctaagtgcctttatttttcctctttatgtgatattttccattgagcaatttttttatatctactcatgctaactactcgtccagcgccggacgcctagttttatcattatttatcatattgatttttaatctcagattaatctcttgttattttttgttgttgttcgcatataattacgcggcactattgaggcgattaatgctggtcatggagtcgaggcgtctcagctttccggtcgatcggccgcgagtccactttgccggcttgtcttcgccaccgccattgctgataacaacaacgacttcaccgccggcctgcttccgtcgccgccgagtggtgcctccgcctacacggctggcctattatgccgccgctgttaggcgtctacgacttcaccgccggcctgcctccgtcgccgccgagtggtgcctccgcctacacggctggcctattatgccgccgctgttgggcgtctacgacttcaccgccggcctgcctccgtcgccgccgagtggtgcctccgcctacacggctggcctattatgccgctgctgttgggcgtcaacgacttcaccgccggcctgcctccgttgccgccgagtggtgcctccgcctacacggctggcctattatgccgccgctgttgggcgtctacgacttcaccgccggcctgcctccatcgccgccgactggtgtcctcgcctatacggttggttggtcacaccaccgttcatgggcgtccacgtcttcgccgaccggctggccttcgccgccgccgactggtgtttttgcctatacggttggcggacttcgccgctgttaatgggcttcatcatctacaccactggcttggttccactggcgccgactggtgtttttgtcaccattgatggactgcttcgttcccacatcggctacttttgctgtcatcgagggaatacgacaaagctaagtcatcatttattttattctttatatgatattttgctttttcctttgcctcgctacctcaactggttcgccgttgactagtgagtcgggggctatagatgttatatcgtattttttaaacaattttcataatatttatcttgattgcttgcgacataatctgagtacaaaagtacctatcgagttatggagttctatcttcctatgctttccgtttggtttgccaatggatggttgcctttgggccgattcctagcacccggggactcgttggatggaccgagtaacgcaaggtgctgagtattactcggaagaaatcaaaagcatagagataatataatttattttctgctcttaataattgcaaaagtacctgagtagtaaattctgatccgtgaaactttgttccattaatgacgaactcatgtcactcatatgcatgtttgggaaatgcctaggccgactcccgatgcttgggggctatgactagtcggacagagtgtttaaacgtacagagtcatctgctcggggaaatcaaaattgacaagaggagaaatacatatttataaatattttaaaatacttgattttttctcgagtattatatttatatcagatactactcatcctatatgtttgttctgcaggatccagatccagatatgcataaaagggattcatggctttaagcttatctcttacgctccaggaatggatcagtcagaacatcaccaccggctcgcctcgaccaccgccgactggtgtttccgcctgcacggctggcctattatgccgccgttgttgggcgtctacgtcttcatcgaccggcttgccttcgccgccgccgactggtgtttctgcctgcacggctggcctattatgccgccgttgttgggcgtctacatcttcaccgaccggccgcctcgaccgccgccgactggtgtttccgcctgcacggctggcctattatgccgccgttgttgggcgtctactagtatgagtcttatcccattatagattgctatattctgggacggagagagagagagagtagcttttaacaaagatatgacacatgcctgtacatgtacggttcttgttgcctggctgccacaatataattcagatctgaactgggttggcaactgctgcctttgcctccattctataaaaatgtatggctagatttatagtattaaaatgtgttatatcagtactaggttgattttttatgggacggaggaagtatatcatactaaattacatggagtcatggatatatatttttgtacacctaccacgtttcaaatgcataacttaatttggaccattgaacgactaggctaacacacattttgttgttggagtgtgacgtggagtatcgtggagcacagatatatatgagcagcttaattagctagctagatcgtcatctttcgctctcattaattcccattaccgttagcctggatatgcaacagttttgcatttaaggcgccaaagctccatataggcatcaaaattttgcgaacctttaatcactgtcactgtatgaatgaatctttaattaggctgatatatatatgcggcatgtgtctaaattaattatgatcgatcagtagccatgaattaaatggttgatgcatttgcttgtaccttctgttggcccgttggagcgcgagtatcatgtagtgccacaatatgctgacataacaaatattgcattatttattattattattattattattattattattattattattattattattattattattattattattattattattattattattattattattatttcataggttagtttgattggatgcgcgtgcgcgtgcgtgcgtggagaacgagttacagtggagtacttatataatcgtgtatactgttctcacaacacgatacatcagtctgaattacgaaagctctcgagcataagtaagcttaataatgttgtgcacatgtaactaagatcatggactcgtggatgtgtgtggttgcccaaatttattttagttattaaaagaaaaggaaaaataaccgtgttcgtctatttatatttatgaacgaagggagtttgttacaatgatttattcgtgaactgtttctattcttcaattaatcgagagaaagggacacaaagtaacactcctttttgcccacgaaccgaaaaaaacactgctaattagtcatccatggatccatcttctcccttccgacaagggcaatagagacgacgacggttgctccactgctctccggccgccgtgtcgtggtggtcgcctcgtcggcacggtggtcaacttggcccatctatgtaagtcggttgatcgtcggcacggcgccattaattaattactccggccgaaagtgaccatatatacgtactgtacaactctccggcatgcagatttgttgatccgctataagttaatatcactcgcgttgttcttttcatctacttcatcgaatttgaagtaattatgtagaaattattggagaaatgttgtgattgattgacaagataaaaatagatgaataatttaaatggagaatgcttgtaaagaaatagtattattttgggtgaacagctaaagtgatcctccaagttttattctaggctcagtttagtccttaatgtttcaatttgtccatattagttcttcaagtttttattttagtttaaacttatccttaaacccacttagaagccacatgactaaacataacgaacaactcttaataaataacgcttatactccttcattcactagaaaaaattgcatgcaatgattttttttatagataatgcatagtacttatgtaaaacaaaaataaattatgtactttcaattgtatagatagccattaggcttaagtttcatgtgcacatattaaaataatagaaattacatctgcaatattgtttattcatcttgtttttctcttttatagtgtagtatacaaattaaaggcgaaagggacattttctaataaaaatgttgactaaaaatagccatatggcacatcaagtgggtaaaaggatgattttaatccaaaacaaatacttagaggacctatatggacaaaacgaaacctaaaggatcaaattgagccttcggtgaaacccgagggactgaattagctattcaccctattattttaagacaaaatactatactagacatatagctatattttaaaatgaaggtggtagagatcaatataaactgttgatttgattctatgtaaggggcaacatttatttatactatcgtctcaattaattaattgaaggtataaatattagagggtatatataatcttcaataatacaaatatatagaattgggtacttcaaaatttgggaccaaaatagccaatcgatacttcccaaattgtagcgataaaataagatatcaacgggtactttctaaacagtccaaataaatcgatatacttcacaaaaataaatgggatgagtagtaagaaaaataattatcgttcaaactatttcttctactattaatagtagaatattatatagagaaccataacaaataaagctcatggaaagtgtccacgtcgcaatgacggtgggaacatgtgggcggagtgtccatgctattttaatcccagcagaacgggagatgtaaccgacatacgggcggctcccctgtgatgaaaaccaacgtgatcatgatgcgtgcattatgtcagcttacacgtaatgtatgtacccctctgtctaaaaaaatattaatcctacctacgaatttagaaacatatatgttcgagttcgtggctaggaattcattttttaaggatggaatagtacgtttgaaatttggctggatacatttctatataaaattagaatcacccgtagtattctaccgctagtagaatactactatataaaccattaatttatgggcatgttcggctgcccgggctgcagctgcgccgcagccggcacgaacagtgccgcactcactgtgcgcagccgcagccacggctgcagctatcggcctgccgaacaggccctataagggcacgtaatatattctattaatatatagttagagataattgcaacattatttttttcttttcgagcctcgctacggtgctttctactagtagccgaaaacaatctgaagtgttaattttattttatcgaaggattccgatctatttatactaccaccccagttagcggtagtagaaatatggagatacattattgtcaaaaaaaataagtgtggagggatatatatacttgttatttagcaatgactaaactttttttcctcttttttggctttttgatgaaaaatgagtgatgccggcgtaatagatgatatgattacagatggatttagttgaaaaaaataaaagataaagtaacttctaatcattatattaataaattactctctttgttcctgatatttgacgtcgttgactttttttaaatatgtttaaccgttcgtcttattaaaaaattaagtaattattaattctttttctatcatttgattcattgttaaatatatacttttatgtatacatatagttttacatattttacaaaagttgttgataatatgaatggttaaacatattttaaaaaaatcaacaatgtcaaatatttagggacggatggagtactattttagctctcataatatactaccaataaagttcttttctttatagtgaccagtcactggtcctttcgttcccgcgtgcgctcaactccagcggcagtgccctctctcctccgtcgaacagacaaaatcaggcaagctattactatactgaacaaatcaatatatatagtcaacatcgagcagcaagaacacaagtaattaatgttagacactccccatgattatctttaaaacacatatatttgattagtttctccacatgctgtgttctgttcttaattaagtcgttaacagtgctgaatttctccaaaggatcgtacccaagtatttcagttcagaatagtcatttgcgcagttcagagtgcccattagaatggtgctcaaaacactgtaatgttgattggcgcttaaatccttgaattgacaaggtttcttgccctagtctcaaggtgcaccagccctggccagcgcatgacctaagtcacaaaagttaatggatggatggattgagaaactggaatgcaggacattattttctaaaaaaataaaacgacgaggtatacctcctcctaaaatatggaacgttagttggaacgtgttcctaagttatttggaatgcccctctatctcttcatggtcatcgcacagcgcgacaagagcaatgcttgtccagtctccactgcatgatggtgctgacgcccgtacatacacaacatgatattggcgagcagtgagggagcaacaacagcgcttgtcccatccagatgagttcaaatttagtgaaagttaatcaaattatagattttgcttgatttggattgtctttccatcattcgctccatcgtgttgtatttctttatcagaccgctctattgttactccatcataccttgtactaggatgacaagttccatccattttcgggacaaaaattccacatagttcccgcttctcaatccggaacgaggaacacacttaagttccacgttctatgtgacatagcgcatgacctccttatgtggtttccaacttatatttcaaaagtacaaatttacccctccacacatctgtattaatgtggactattataccctcttatgtttttattgttgttaattgaggtggtggtataataagatttgatcccttttgtagaactagcatagtggctcgcgcagattgcgcggctagtatcattatattttctctcatataatagtatatatgttttctcattatattattcaaatatattaaaatgataacataattttaaattttgcaataactttacaaaactactaatgtgtaatattcatattatattttatatacatgttagttattaattacttttaatatcaaattttagttatttgtaaattatatatattcctatatggactctagactcgtcttttaatatttctttttttttaattctgaattttctgtaaattgtatttctatatagactctatgctcttcttccaatattatttatttttatttttgaatttttattttttctaattgtattcttatgtggactctaaactcatctttcaacattctttaatttttaatttcgaatttcagttacttctaaattgtattcctatattgactttaaactattcttccaatatttttcttaatttagaattttagttatttgtaaattatatgtttatacggactctaaaatctacttttaattttattatgtttattccaaattttagttagttttaaatttcaatatggactctatactcaacttctaatatatatttttaattccgaatttatatgtttttcttaattgtatttctatatggactctatactctacttctaatattccttgtttttaattccgaatttcagttatttcctaattgtatttctatatggactctagtctcctcttctaatattccttattttttaattccgaatttcaactatttctaaattgtatttctatatggactctagtctccttttctaatattccttatttttttaattccaaatttcagctatttctaaattgtatttctacatggactctgctttttttttctccgattaatgtgagaatttataagccatgagagcgaacgtggaggctcatttttctattcctttaataatataatagatatgatcaacggattagattaatttgtaataccagtatagtgcattgtagtgtggcttaaagaaaatctaaaatgacctgtgtataatggaacctatataacatgttcacttctttttttttcttttttttttgaggagaacgacggcaggagatctgccggaattttattagagggagaaaataaagtgcttacagtccagagaaaatatgagagacttgcaccgaaacaaattaagattttcacggaatttcattagatgctctctgtttgttttttccttttcttctggcaatgaagtatcacggatgatgatgacttgttgctcacaacaatcctattatagtcacgaacaattcgccctgattccaagaaagttcgtcaactcgaaatatggctagaaaagcaacaagcagaactaggagctttgggtattcagaagctgacaaacacaccgcccacacacaggattcggcttcagaatagcccctgctttagtgttcaggccaaggactaggcaggattagttttctcaatgaacaaccaagcaaagctgattaacaataatgtgttcaggaaacctagctgtaatgaatgtgcaaggggaataagaatccatcctaagttgttcttagcctctgatgaggaatttgctatattacagtcaaactgaatggcctacattacagtattacactgaaccaaccctctgctgcttctgtcctaagctggctacgcaaagaaactaaacccgtcatcatcttgtccaccttctcatcatctcctaaaccggaggagcacataatctattaatcttgtccagaatcctcatgagcttcttcttcttcttctcatcatctctggacacaaaagttttgtctctaccaaatccacaaaaaccaacaccttcagctgccgaagaagttgcattttgttctgatgatgatgatcatcatcagctccggttgtgtatcgggtcggagcctcgccggactcgccacttgctcgtctgcgccgcggccgtcgtcgccgcgaaccgctccttcgccgcgtcgacgccgacgacattgttggccggaggcgccggcgccggcgccatagccggagccggagccaggacgagctcggctctcgtcaggccgtgcaccgccgtggcgtggtgcagcgccacaaccacgacgacgacggtgcagaccaagaaaaggtcgagacggcttgtgtgctgcaccatgttggcttctgctgctgctgctcagatggagacaaacaagtctctaccttggctctctctgtagctagaatggtttgtacaatgatcaatcatggtgatgtcttgtctctagatatagcaggggcaggcagtgtcgagtccaaaagcacaaagggacaagtgaagccaagcacagcatattagcatagcatgcctaaggctgtgcaatggaaggttctgaaaacctgaaagtttgagggaggcagattttggcaaagtcatgaattggggggggtacttatctcccaacagacaaaacctaaagttgcaattgtagatttgtaggggataggaggagcaacagtatgctagaaacaaagacttgctttagctccttgttgttgttatcttccccttcttggccactgtctgcagtaaaacccccaacactaaagcagcaggcacagtggtgagtgaaacaagtgaggcttttttgcttttctatctttttttttgttgttgtttgttgttcttggttgaaacacacttttctctttgaatcttcttccaagctaaggccaccaaagatgggggagcattcaaaacttaaaaggaagtgcaccaagtttcaatagcctctttcctcacaattttctatgtgtgctacttgccatgcatcccaatgctttagttgctctcctagctttggtgcaggaatggaaagaatggtgaatcttaaagcattttcaggatccaacgacggttgtagcttcttggagctgtgtatgtgttggactggtcatggtctaaggaggccgttttattggtaccaaagcgaaaaaagaaagagagaaaacagtagctactgaatccttttaaagtggaggcaggccaccttagcttcaaatttgtaataaacacagcacttagatgcataaattttaaaccagaagaaaatcattataaagagatggaagattatgtaaagattgcttcttgctaagtgggttagggagcccacaaaatcttcctagcaagctgcaaaagaaaaaaggaggggaaattaaaggtaacagaatgaattatcaatggtttgcccttttgtttgaagagattcttaaagtgctaactcaaatacttggtaaagtcactatttgaaatatatgtatacttgctaaagtgcccagaaattgataatgggaggcttttgtccgggacagcaatctacaaaataggattccattagaaaaggagtaatcatattgtgctggttcatgacactaaattaggtctataggaatactctatcagaaagggcacagcaaataaattaacaaacaaatatttacttctaagttaagcaatgcagcatacaaggaattgatacaatgctggaaaagatcatgatcttagcagagacaagatattgatcttatcagagtaatgatgacaccgtgattaaagcagcagcacagttcaattcaaaaaaaaaatagcactgttatttttcctgctttcgtagttacatggaaagtttatgatgtgtctttaagtttatgatgttcataaagacactcaagtacagaacaaacaagcttttaccaaagattgcagagaatctaatactagtagttttacccacccactctttgagtatgaactgtaatgacctcccactttttgctatcggaggtaatcaaatatgaaacagtgaagttaagaaggtgcatttgtcatgtactcctgccagataaagttagaaccgaaagaacagttaactgttcacaaatgacacgcattgaactatagtacagtaattaactagccacaggacgaatctctatgtaatccacgatgcgtggcctggccaccttgtaggcttgtacctcctccccttgtgattgtgaggatcgaagcggccacaggagcacacgtccgtcgatgtacgatgcggtcacgcagactgtggaatcacggcgccggcatggctcctgttatggctcctgttgagccgagtttagcgcctgttcagtttgatgctattttcaatcttaccaaattttagtaaaattactaaaaaaaataactacatttagtttgctaccaaattttggtaactatataagaaatcctgccaaaactttggcaaatggcaactataccaaaattttgaaatgtgtaaggtttttttagcatcaaagtgaacaggcccttagtttcaaactatttcttcaaacatccaatttttccatcacatcaaaactttcctacacacacaaatttccaatttttccatcacatcgttccaattttaaccaaacttctaattttggcgtaaactaaggccgagtttagttctaaactttttcttcaaacttccaacttttccatcacatcaaaactttcctacacatataaacttccaacttttccgtcacatcgtttcaaaccaaacttctaattttggcgtgaactaaacacaccctaaacacacccttaggtgtcgtaaaacacgtgaatgttatggaaggatctaatatcaaataaatagaaggggtgaggtttcgaacccaggttgtctagcccaccaccttgtggagctagctggaatacctaggtgtttctccactttaggtgtcgtaatttgtcaccgagttcaaaattaattcctaaaccgtcgtatccaagggtggagctagaacgaaatggggagggggtggcactgcttgctttactctgctttaggtcgagtttaagctgatatgagtgtttgagtttgggttgaagagggcgcatatacggtgaaaatagatgaaatataactaaaaaatttcttgaccgggtttctgggcaccccctcttttcaatgtagctccgcccctggtcgcatccctcaacttccaaaactagaacacctcaaagcgttttcggctaacgtggcgtctaagtggtgtcgacaaagttagaaaaaacataggatgtcccgtcattttccctcttctttccacatcatcggcctcggcaagaactcctgcatcagcagcggacaagggtagtcctatcaacacatcctcctttcggcgaccacacgaacatcagcttcacgagcggcatatccggctgcagcgccgccgaccgggagatcacctgcaccacctctgtcatgctcggccagtccgacgggttaggattgctgcacaccagcccaagcaaacagtaacctagtggcatcatttgcatcaaattcttcggtactagtatagaagaagaagaaacgccattgtcgacggcgttaagcaacctccaccccagtcgacgagcaaatatcaattcagagcaacatatccgaagcatagctaaccaattcagagcatcatatattacatctaactgttcattgatttgatggttaactgtgcttcggatatactctctccgtctcataatataagggattttaagtttttcttgcactgtttgaccattcgtcttactaaaaaaagtgaaattgttatttatttttttgacttactttattatccaaagtattttaagcacaacttttcattttttatatttgcacaaattttttgaataagacgagtggtcaaacagtacgagtaaaaactcaaaatcccttatattatgggacggagggagtattgctctgatatatcaattcaatcgacggcagcttaaacatctcctggaacatgcagagagctcgttcgtcggtgacgatctcgagcaccagaactccaaagtactccggcacgatgaagcccaagcgggtttcatggttttctgtgactttgttaacgctacgtatacatcacatcagttaaaatcgtcatctaaacagattaggatcttatttgcactggttttgagagttgagggacacgtcatatctggtattgttgttcagggatgaattccagactcgacgacaaattgagggacctaaagtaaacttactacggaggaagaagaagcacttactgggccatggcccacaacatccggtccatctattttcatcgccactatacctccggcccacggacgcgacgcgcttacacacatggcccacatgccatggtgcgcaagcgcaaccctttcttcctcctctgtcgctctctctctctctctctctctctcctcttctccactttctccctcctcgctagtgcgctctccttggcgagctcgctccgacgaacgccaagcccattgctccgcgtgtggttgggagagtgagaagagaggagatattttcggtgcggtggggaggggggattgagagaggccgaatcaaccaaccaacacctgcctgattcatcttctcgatcgatcctggggggtctaagctaatgcgcgccgccccgatctcccgatccggtccgcgcgcgctcgatccccgcgcctgatttctcctccccgcccgtcgccgaggagagctccgtccaggtagcgcgcacgcatacgcaaaattttggcgtatttaatccatgatctgtgtttgcatcgaatggataggacgtgctcttttgacttcagtcggtgctggtaggatgaaacgatgcaaagatactgtgttgttgaagacataatccgatttaaaacatttcttgttaacttggaacaagttatctaaattttcggtagtgatagtttctgctgtacatttttttccttaccaaatctaattcaattgcagaatgtagtaatgtattgatgcctttggctggcaacatagagaggttcatggactcgtttctagttctgctagtttcggtacttacatattttctgcacatatctgcatgttttttttttggttgaacataattcagttgtataatggactgatggcttgattagtaagtttcattggaaatataaggagcggaaatcaagaattcattccattccttgcttaatgtatgccattgatgatgaacttcagagttattttttagagtaaattgcacagaaccccatgttttatggtcaacgttgcttaagagtaggtacaatagcaggctataagccagctataaacatattttaaagagataaaggaagagagagaacagcagcgggctacagatttgtagccagctgcagcacggactccaaaacgtaatgtgtgtatgacaggtaggaccagatattaatagtatagtaagcaactattgtatgaattggctattacattggctatagatgatttggagctaatagttggctatactattaaacttgctctaatctatacatgtggttttctgcaactttgaccatagattgaggggtgttctaaaatttactcttatttgtaacttgtcggtttgtccatacttgtgctatacacatttactgaatctaattgtatttatcttacagtgaggtatggcgcggagttcaactgagagcaggaccaggaccactgtatctgtagttgttttatttggcctttgttccttcttctatctcttgggtgtgtggcagagaagtggtttcggaagaggagacagcatagcagctgtggtgaacgaacagactaaatgcgtggttcttccaaacctgaattttgaaacccatcatagtgcttcagaccttcctaatgatactgggagtactgaggttaaaactttcgagccatgtgatgcacagtacacagattacactccctgtgaggagcaaaagcgtgcaatgaccttccctagggataatatgatatatcgggagaggcattgcccacctgaaaaggataagctctattgtctggttccagcaccaaagggttatgctgctccttttcattggccaaagagccgtgattatgttcattatgcaaatatccctcacaagagcctcacggttgagaaggctatccagaattgggttcactacgagggtaaagtgttcaggtttcctggtggtggaacacagtttcctcagggtgcagacaagtatatagaccatcttgcttctgttatcccaatagccaatgggaaagtgagaacagcactcgacactggttgtggggtacgtaaaggattcaactctaaagatgcaaacttagatgagcaatcaagcattagtttttgttgttcttatcatgttacggagtttaatcttttaatgctttttcctgccacaattttgttcaggttgctagtctaggtgcttacctgttgaagaaaaatgttttgaccatgtcatttgcaccaagggataatcatgaggctcaagtacagtttgcactggagagaggtgttcccgcatatataggtgttctcggatcaatgaaactgtcattcccatcacgtgtctttgacatggcccactgctcaaggtgtttaattccatggagtggaaatggtaaaatcacttttagaatccttactgtttaaaatgttctcatttaaagtttacacatctgaagcaagctggttgctctggttctgcagatggaatgtacatgatggaagttgatagggtactaaggcctggagggtattgggtactctcaggcccaccaattggctggaagattcactataagggatggcaacgaacaaaggatgatcttcaaagtgagcagagaagaatagaacaatttgcagaacttctttgttggaataagatttctgagaaggatggtattgctatatggagaaagagaataaacgacaaatcctgccccatgaaacaagaaaatccaaaagttgacaagtgtgagttggcatatgacaatgatgtatggtgagtgacattctttctgacatcctccacaaaaaaatatgccgttttaatctatatgatcttttttttttgccttcatttttctagcacttacattcttctgaattcaatttccttcactaaatacaggtataagaaaatggaggtctgtgtaactccccttcccgaggttaaaaccatgacagaggttgctggtggtcaattagagccatttccccagagactcaatgcagtacctcccaggattacccatggttttgtacctgggttctcagtccagtcatatcaagatgacaataaactttggcagaaacatattaacgcttacaaaaagatcaataacttgcttgatactggaagataccgtaacataatggacatgaatgctggccttggtagttttgctgctgcattggagtccacgaagctgtgggtcatgaatgttgttccaaccattgcagatacttctacattaggtgtaatctacgagcggggattaataggaatgtatcatgattggtatgtaatgcttctctgtattgctctcctggactcatgttttggtcattgcactctatttttctcacttattcagttattcttcgtgccattgtttctgcatactattttttgctttttagaggagacacattttactttaccaacatggaaaacctattttttttaatggttttcatttgcttcagaaacatgtcaaaaacggatcaatttatttacttctgtagagactgaaggataggattgaactttagctctgccaatatcagttcaagctcttcatggtgaagttgcataataataaaatcagtctgttagttattctgctattgtaaatatgtgtttgttttgactgtgctgactgttagctttgatcagttgaaatctgaaaagcattggttgcttcttgttacataggtatatgtgttgaccatagtttttttattctttgtacaggtgtgaaggattttctacatatccaaggacatatgatctcatacatgctaacgctgtgttcagcttatatgagaataagtaagaatgtcatacattgcaaaaacaagaatgtgctcctaagttggtacatcttcctaattgatattttctatttacaaaaaacaggtgtaaatttgaagatatactattggaaatggaccggatcttacgaccagagggcgcagttataatccgtgacaaggttgatgttcttgtaaaggtggagaaaatagctaacgccatgaggtggcagacaagattgactgatcatgagggtggccctcatgtgcctgagaagatactctttgcggttaaacaatactgggttgttgaaagcaagagcagctaattacatatgctgggttgtttttttccactgagctcccaacaagacctaagacatgacttaattacatatgaagggtatgcatcatctacctcctctgtaaacttatagccactgtagtcaggaatgaactcttggcagcttgagttttccgaaaagttagcacccttgcaatgtggccttgccagttcttttcaaggtaaattgcactgcaggtataaatctttttcaaaaccggctgcctcagtcttgacaatctcaaccacaggtttcatcttttgatgtaaatggcttggatttgaaagttcatgtatgcaaggcttgtcatgaccgtatttcttttagccagttttgtctagccttagctggtgcgacaatttgagaatgctcaaactggcctctaatcttgcttgtttggtgcatttgtgctctaaggaggtgtcgcactgtaatgaaactgagatccataagattctagtattctgatcgtctgaaccgaggtgaccaataatcaaatttagctacgtatgtaatagttttttttctgttggtaacagacgaacgatttatttttagtgctatttgaggctgtccttttgagattcagttatacaaatgttgttcgattttgatggagctgcaacttgcagttcgtctgttgcaggcatttctctactgaaaatctgaaatgggtattggtctgtcggagtgttttgttttaccgggaaaaacaatttttctattgccagtcacctgtttttttggagggttttgcttatgtgtccgtattaatagtaattaccaaaattcaaaatgattttattctaaatggttttaacttgggctaaccaaacggatggttagatgtattcactctcgtgcatgcaatgtacaaaacttgcgtgcaggaattatgtactatgccggatggttagatggttaacttgggctaaccaaacggatggttagatgtactatgccggtttagaagcctcatattattttttttttcatactttgatggaaattcgggttccatgacgcctcacacttttaaccctaaaaatagaagtgacggactgtagattatcagttaacaaatagttattttattattaaataatagtcccagcaacatattgcaaccaagaaatagaagcacctttactttgtaataactggaagtccctaagacaatctttagcctttacaccatcttgcgcatgcaatgtacaaaacttgcgtgcaggaattatgtagcaaggtttactcaacaagtcaatatatactgccagagaaaactaataatggatgcatgaataataatttaacaatttatattttacacttccatcattcataactcatcatcgagtctaaatgtatttttgtaaaagaggttttcctaaaaagatttgaataacaagagaaatgcgtgaatcataatttgttataacattgtgaaagctcgtgggccacatcttttgtcttacaacgtatcccctccatcccaaaaaacataattaaaccttaggtttgaatctggacacacacatgtgatgtgtttagattcaaactcatagtttaatttttttctgggacatagtagtatatgctcataccaaaatttaaatcttaaaacttaattttagaattaattttaaggtttttattatggcttctttttttaatatcggagtttaaatcattaaaaacacatatgtaaaagttttaaccatatattatttttttacgctaatatgtcttttggcgtattatcagcaattggccaactgatggcagcttgtatcgcattacaaatcatgtatttgtaaatacttgctttctcttttttatataatggaatgtacttccggcctttactcaatgagctatagccaattattacgtcaaatcgctcaaaagcgctcacaatctaataagaccacaaaacacaccaatttaacataaagcaacacaaattaataagcaccaacacaagatgaaagacccataattattgaatcatatttgtaaatacttactttctcttatttttcgcccatcgaatgcatcatcgcaaaaaatattttctctataccaaacaataaaaaataggtctttttaatgccctgtttatagtccagataatttatatgaattttgaagaaatcaacatatttagccaaatggtagtactaggcttgacagcaaggtgtgacatgcatagccattatccagtcaccaatatccccattgttttacttatgcttacccttctaagccaaaatttaaattttaaaatttaatttcagagttgattttaagggtttgtcatcgtaatttattttacactatttgcttttgaacgctaacgacaagtatacagaacatttatcataaataagattttcttacctataagcgatatggataagcataagtgaaacaatcgaactgcaaaactactttgcgtgagagatgatcacgagcacttcgatgccaaacttcacaacgctgccgactataaatcatcgtatatcactaactttgtgttcatatatcgaagaaatatctatttctaaaaaagtgcctattttcaaaactatacttaaaaaatttaaaatctaaatcttttcatgtatttggattaggggctaaaattttagtccatgtcacatcggatgtttgacactaattagaagtactaaatagagactaatgataaaacccattccataacctagactaattcacgagacgaatctattgagcctaattaatctagtgatactacagtaaacatgtgctaattataaattaattaggattaaaaaatttgcctcgtgaattagctcttatttatataattagttttattattagtctatatttaatatttttaatatattagtcccgatatccaaacaccacctttaaaaaaaaactacggaggaactgggatagttgatgcgcaccggggcacgcacgcgccgtgcgttgggcgtgtggcgcaaccccacgcaccggcacgcgccaggccggcgctcccgcctccagaggccgccaccggccacgcgccccttcacgtggctcctggcccaccaccagatctctccaccgacccccacagacaggtgggcccgttcactcccgtggcccccacgtgccagtgagaaaccacccgccgccgcaacgcgcgcgccacgcgccgcgtcgtgcccctcccgcgcttgactcgcctcgccgccctctcccccttgctgttattgctcccttcgcggctctccttcttcttcttcaatcttcgccctcctcctcctcctcgtacgcgcccacgcggttctctttctgccccctcgatcgatttgaggtttgcccttgtttgctgtgatgttttgcgctgttaattgggtgattaatttgggggggtcgggttgggttgggtggatcgatggctgatgggttctttcttggtcgattggttttcagcagggaacggaagggggaggtttttggaggaggccatggtgccgtcggagaggggggacgtcgccaccgccatcagacccgccgctgccgacaagctcgtccatgggtgagtgactgaagtttcttggttgtctcgtttggggacttgggggatagttcttgttcttggaggaagcaaagagatagatgctctggggatgctaaaatttttgtttcatgatttgtctcgaggcgcagtttgtttgttaggcatcataccatagtgaatctacagaattagtgatgatgctcactactcaagcagcaaccctgcaatagtaaatgtggaagcctgccaatcatactgcgttagacgccgttggtggcgtagagctatatagtggtattggcaaattatttgtcgtcaggtttattgacttagttgttatctctgcatgtcgatttaattcttatcccttttccatttgggaggaaatgaaagttgagaattgtgcattgttgctaatgttgtaagttcccattgaaaccttgtgcaggcctatctctgacaagaagtgccggaagaaggtcccgaggaaggttcacaaatctgagagggagaagcttaaacgcgggcatctcaatgatctgttcggcgagctgggtaatatgctaggtaagctgttttgatcacaaggcattgcgtcagttctatgtgtctgaattggaaatttattatagcttgttgcgcagaaatacaaaccacatatctctctcttgaatgtcattatataattcgtattactagcaactggattcatcattgcttaaatttgctgctatttagcatctgatcaaatacaacaaccttctgcagaagcggataggcagagtaatgggaaggcatgcatactaactgacaccacccggatcttaagagatctgctttctcaagtaaaatctctccggcaagaaaacagcaccctccagaatgaatctaattatgtaagtaatatttgctatggaaaaaaaaaactgttgatttgttgcagttgtagaaccatttccctttctttggcgtgcttgatgatttacattgctaacttgtcgtatgcataatgcaacactcattccaacattgttttttctcccacaaacaggttacgatggaaaggaatgagttgcaggatgaaaatggtgcgctacgcagcgaaatctctgacctccaaaacgagctgaggatgcgtgcgacagggagtccaggttggggccatggcgcgactggatcacctctccccgttcctccctctccaggcacggttttcccatcgcagcagccaatgcagccatctcccatgacaacaagcacagtgttccccttgcagcagccactgccacaaccaacagtcattgagccctctgcaagacagccactggaactgaagctcttcctagaagcaccccccgccgaagaccctgaaccatcagaagaccaggaggctccgaacaatgtggcacgaccgcagccgaggtacccaacagaggcatcttcttggcctattagcctgggacttccaagaatggaagatgagcaaatgtagtggtagcacgatagatgatagcacaggtagagattgagagggtctgtttttaatgcatgcaggaattccacacgaaaacacttctgtccttgcatgaaaactggaaaatttcctgcattccaagtaagacctgagtagatcagctccaaccaatcagaaactcactttgagcctagaggatatactactgaatgatgtgcatgtaaatatttcaatctcccttttgtttctgtaaactctagtgagaatagaacccgttttatccccttgcaaatattgatgtccaattaaaatgcatttatgcgataattgcaatcgaaggaaaagttatgaaagaacaaaaattgtaagactatacgcctgtaaccagcctccaagccaacattatcacaattctatcgagtctgacgaaccagcaacatctcaatacaactatgcagcacctggcaaccaaacaggctgatatatagtagtatagcattaacattgaacacttgaatattttccattgctgttattcagaagaacaatccgtacaaaattttatgaactactccactccgtagctggaaaaagtcaccatgtcctttcgcacataatgtatctactgatacatcttcaaacacaccaacggaaatacgcgagagattatggccggtttcctctgaatggcgaaccagatgcaattgcaggtggctcttccctgtacggctgagtagcaggatcagtcacactgggcagtctctgtacgctccccttcccttttctagcattagggccaatttcttcgatcatgtacttccatccgtcaataggacgcctccggctaaatatgtgtgttttgatgaagctagcaatctgcagtcgcatttcaacaccatgtcagaaataactagaataacacaaaaaaaattgtggagagagagtgattgtggacctgctgtttactgaaagcaatccgcctttcgaattcttggagaagaatgtcatcttcccgctgtgagatatcccatatgctaccatcctgtcctctagaggtggtttcccaaccatcaggcttggttttgatctcagcagtgcttggaatctttgaatcgccaaaatctgtatttccagaatcgaaaatcctgtatttcacaaaattataagccagctacgtgttatagattgctaagcattttgctcacatgaaaaatatgcattcctaacttagcaaaaccaagagcttacggaaactaaaacattgtacaagccataaagcctccccaatcatgcagcaaaaaattgttatggcaggaagatatgcaaaaatgacaaatagactgacagtagcattaggagttttggagtgctgccataataccgagactatgagagtttatgttttaatgcctgatatgctgattactaagcaattgtagcaaatgaaaagaaaactgcataactaatgtcattccaaatgctcctgcttctatcaactaaatggtgagcagcaaatgacgctaacatatgcttgttcctaagcaaaatcaagtaaacatcgaagcacagtacttcctattttttgagaaaaaaataaatttgagggtgaaagatgtgaactgtactagatccagaagaaattcacatagtacgcataatttgtgaaaccaagctgctacattggaagcttggagataaacaatatatgcaacacggttatattttgaatgaaccacaccagatcaacatttaatttgtacatcatgcaacaaaaaggttatcaatttgacatgcagcaggtgctatgcatcaaaaaaataatcggaggcataatatacactattcaagtcccaagttatcaaacatatcagagtttcaccaatgagcaactataccagatgaaaaggaaatcacagcttttccaggctctagctacaaatgaactagccataattcatagtattgcccgacagtctaacacaatacctatctaacttataaaatacagctgaaatttgatacagattcatggtctatcagctccagattccaccaccaagtgcggtgcacaacgaggaatcaaataatatgcaagcgacattttggcaggcaaatacagtttaaatcgcaaatttgtctaaggggggaaaaaattagagcagcaacttactcagagcacgagtcgaggagtcggtcgatgtcgtcggcgccgccgcctccgccgccgaggcgcgcctcctccatcttctcgatctccttcacccacagcgcggcgtgcacccgctgcttcctcgccctgtactcgtcggcctgcgccttcttggccggggcgccgcccgcaccctccgcgcgaggagcggggcgcggccgcctcgacgcggcgcggcgctcggcccagcgctcgtccatgtcggccacgaaggccttggtgtcagggtccacctccgcggagatggccgggacggtggcggcccccgaggtgggggactcccacggcgcggcgggcgccggggaaaaggtgggggagtcgcccgggagccatgaggtctcccaggcgtcgttccactcgtcgtcgccggtggtcgcggtggcggcgccggcggcggctcgcgacggcggaggcgcgcggcggttagaggagaggcgacgcaggccagaggcggaggtggggacgcggagggcgcgccggagcgagtgcatggtgtgtgttcggtgaaatgcgcgcagagaggctctcctgttccggagtataggtagcaatcaactaagaaatcctctgcaatttgatacccatcttatcataagccctcctaaatacatttagtttggtaaaaaaaattcttttcagaaagccaatccaaatattgatgctcacagaagcgcgcacaaccacctctatgaacgtacattcggaaaactcatccgacatacgttgacattaacgaagtcatcacaggcacatcgttgtcgggtgcatcatccaccgctggaaaaaagaattagtcataaatgcaagccctcgtatcaagtttaagacttaaacccgagtggactatttccaacctaactagtcaaactacgttacagtgcaaaattccattaaaaacaactattttgaaaacgttgttataacgtcattatacccatccacaaaactcaaaaatccaaatcattaagaaactaactggcagagatgggggagatcgctcctctctcccccctcggtgctcctctcgacaactgagtgatattttgccaccgcttcacattatatattttgtacgctttgatcaatgagaatccatccctctcgctcttgctcccacactctcagctgtcttttcaacacaaattatttcaataacttcaatcaaaaccttttatgtacttatggacagttcgactgaccatgctccttttataagatttgcatatttggactctactactgtacttcctaaaggattagattctgaaggtatttatcctacagcatatcttaagatttaaacctcaatttgccaacctggtatttcttttttcaaacattatgaaactacataacaagttgaataaactttacagtgttacaaagaacttcaagacattatcacaattcttaggtttaatggatcatcggatcagtaccgtttaattgttgcaagagcacggaaaattaagtgcttcttatcacagttgatagcatactaggattaattaattggaggtcatataaaaccaagattcaatgtattatactacaccagtgttagtaaaatatttgtaatgattcttttttatgcatatagcttcttctttagaagaatttggaattcctttaccacacgtaaagagtagaagagataaagaaaaaaaaaagatagaggagaaaacaaagcgagaggtgttcaaccataggcccataagacagcccactatatcatctaaaaggccacaaaagataggcccaccaaggcaaaagctctagggttagggtttagcgcctgctttataaaggactccgcccccaactctcgtccgcctccactgcctccctaaccccacaatccatctcgccgcggcggcggcggcggccgagaccggcggcgagcggcgggggcgggggcggcgtcagccatggtgcgcgttagcttctatcgcaactgtaagcaacatccttgccttgtctctctgtacccgtgatccattggatcacagaacgtgatagcagtagcatctgatcccgagctagcctcttcagcagttttgataagttttgatacttaattacttggttccgcatttgaatctggagtccgagatctcgtcatttgaatctgttttggtagtccacgggcagattaagggtcttgcctgatttcacaaaggtaactgatttggtacatttgagtcgttttggttaatcggcttgctcgagtttgccagttgtcaatagttcgtttatgtgaattaataatcacagtagtcgtgcttgacgtggaaatgaaaactgcactctgaaatgcaccttttgaatcctaaccgaaagagtaaagtgtttgactataggggcatatatcttggagacgttcgctcatgatatgaggatcagtagctcttgatataaattgactgttgtttcaaacgtggttttttatttgatgccttagattttcgtacatttacctgatactcatggtgtgttgggctatacatgtctaatttcgcaatattaatatttctcagatggcaagactttcaagaaaccaaggcgtccatacgagaaagagcgtcctgatgctgagctgaagctgtatggtgagtatggcctcaggtccaagtgtgagctgtggcgtgtgcagtaagccctaagccctatccgcaatgctgcaagggagctgctcacccttgatgagaagaacccccgacgtatctttgagggcgaggctctcctgcgccacatgaaccgctatggtctccttggtgagggccagaacaagcttgattacgtgcttgcgctcaccgttgagaacttccttcagtgccgcctccagaccattgtcttcaagaacggcacggtgaaatccattcatcatgatcatgtactcatcaggcaacaccacatcaggtatggatttcaaatttcttatatgactggtgatttaacttaggtacactgctgaaatgcatatgcataaataaacatgggcttgattgaacattgattttctgttttgataacctcatagctcagtattttcgaactgcacttctgtttttcattctgggtcatgtgatgagaaacaatatgcaactcacgacggtcgtctgagacacttagtgtgtaatggtgcagtcatattatctctgatgccctgccatttctctttaaacttcttacattgctagggtcatgtatgtttttagttttatgtgaaccacatactatttttgcagaattttataatatcttattgttggttcataattgtcattaagttggtttggcacttggcattatgtagtagttccattttgttgcccttttttgcacatttttcttggagtttgtatttggtggcacaatgaggaactaactttgctaatgtatctatgaggccattaggctaatgactcaaaatgtccttttcattctgagtgccacattgtacatgactttgtttttctcttaataatggatctcacttgtctttcattatttgcatgttaaggaattgcgtgatcccatcatgtccacggtgattgctaggatttaatttgtgtttagtctcatattgatgcataaagctatcacagctatagtacttgtgtaaataggtcctgcaaaatgtgcaaaatggatttagtttgtctttgcgtagttgaagcctagattacttgctaaatgttgggttgtgcagagtgggaaggcagcttgtcaacatccccttattcatggtgagacttgattagagaagcacatcgacttctcccttaccagcccactggcggtgagcctggaagggtcaaagagaaagaaccagaaggaggcctctggtggtgatggtgatggtgatggtgatgaagaggaagagtgaatatgtgatgtcagctcggttttgttataggacctaattttgcgggaacttgtcttattagggacctaatttttgttacatgagtagaaaacaaaaattagccaccgagggttgtcaaaaattgttgtttgcgctgttgaaattttgatttgaagtttatctcctcatgaacatgtgaattcagtgtacccaggaaatatatcccaggtctcacaagctaatactgttgggaatatttgaagtgttgggtaccttgtcttttgaaaactggctttgattatactaaagcggatactaaatctggcctcaaaattgttctaataaatctggaattcgaactcgcaaataatttgttgtcacgcaggcatgtatattctagggatcttttgagtttgttggtgcatatgcgaaaagtggaaaccgctactgctgttgtgaagcgcttcagaattacccgttactgctgttgcgaagcactccagcattacacgttatcgcacgacgaaacgtcctaatttcagcttgttgccttcgttcctctgccttgccgaaccctctctgtcttcttcacttttattttttctatgatggattaaaactgcctctacaccacaaccaactctcttacggtgccatgcgatgtgttatcgttcattcgtgttattctaccatctaccgcctcctaatcactttcccagggattcccctagcgcctaaccactatatcttagttgttcgatagcctccactatccaacacccttctctgcttgttctatacccccatggcttcaatggtaccatcttcatctcatcacgttgtgtttacaccttccatattgctggtcctccatcaccttgacctccccctctaaacctagagccagtagcgcttggcaatgaccctcaacccttaccccgtcttgtcgatagagaagataaggaactctccaaagataaggatgcaggagggcaatagtaacatgaaaattgactaacctgacattgttagccaaaggtgtatcttgcatttctggaactacaatggaagtcatagcatgtttagctatctaatctaagctctcaaatttttaagtggtcctgcacttggaaaagtttggagattgagataggatcattatgctagagccttttgtaattgctctctaagtttatttccaatgcggtaagttggtaagtaacttcaactcagtatgttggagacatattgctttggaggagagagtggaatatgttggcgacatactgcctaggagaagaaaggggatgggggcaagtggcttcatggggtccttgtgccttctgcaaggcacgttaacctcacctggcattctatgtgtggtccaagaaggagggagcattgacctaagcatgaggaagtggtgatggagatcttatagcgatagatttggcgagcctgtagccacatcaggcgtagtcattgagctccactcaccatccgcaaatgccatcgggatcctcatcgtcatatccactccaccaagcccctagtctgagaggacaaacaacggcggagatcatcactgcagcaccaaggagatctgagataggatagctagccaccacaaatcttgtcaccacagtgcttaagaagggagcaagcataggcgaagaggagagaggcggcgaccatggtggcagcaaagaagggagaggagagctgatggagtgaatgagtgggagagagtagttatattgtttagtttatggaatttaggaagtgtagtgtaaaattttgaacttccttgtcatttagaaatagaagaggactaaatataaaatgttagaggctttgaagctacctatataggtaatcaaatgagccccatgacatgattaggcatggctagtgctaaaatccataaaatccatgccaatccacgggctacaccaacggctcaggcatgacctaataagactcgggccgtgccgtgccgggccgaaggcacgacaagcccagcgggttcttccttggaatatatntttttgcatgnggggtacggaatgtctactac

SEQ ID NO: 5987 - DNA, 40027 bp, Oryza sativa
cgcgtgcccgagccgcgccactcaatccgccgcgcctcccgttgcaagccgcgcgcgcgtgccgtggtggccgaccgcctggtcgccgctgtcgttagcgcctgcccacgcctgtcgcccgtgtcaccgcttcgctccaaaccgccccgccgtcatcgccgtcgtcatcgcctcggccccgccactccgagcgcaagccgccaagggacggaggcagagcccctcctccctctgccgcgtcgcccccgctcccctcctccttttcccaaagaagcaaggggcgagcccccatttctctccctccttttccccttttcctcccgccggcgtcatcctccctccgccctgtcgccgatttggacgcgagcgccgagcgccagctcgcgccttgaccgcccaaagtcggtttccaaaccgacattgccgcccttaaagccccgggcgccctccctctcttctcctttcatcgcctccactccattgttgccgccgccttccgagctctgtctcgcctccgccgttcatcgccaagcgccgggagagccggtgcgttcgtggacgcggaaggggactccgggcgctcgtctcctccctcttccccggcccgaggccggagagattactcccgcgccgtcggcctctcgtctcttccccggcccgaggccggagagattacttccgcgccgtcagcctctcgtcacagcgcccctcctcatctcggtagtgcctccctccgttcttcctccccgctccatctcccccccttagttttcggtagtagctcgagtagcctccccgtagctagccggcgccgccccgaccgttgctgccgctcgcagtgtgctcgccgccgtcgccgcccgtgctccgtagcacccgctcgtcgccggcctcgctcggcgtagctccgctcaatccgacgctagcaacggattcccgtagccgcgtagatgctctcaccgccgggaatcggcccctcgagacctcgtcgccgtttcccccttctcccgccgccggttgccgccgccgcaattcgccgccgtcgggcatcctccggtgaatccgagccgttggctcgtctcccctcgtcctgtgcaaccacccggtgtgctcgctttcacctgtatcgccgtggatcgctccgccgctcgccgctgtcgtccgccgtccgttccggccggcatcgtcgtctaccttccgccagaccgcgtggcagccacgtaggcgccacggaggcgccacgtcggcgccagctcggccgagatcgggtcgggccgacccctgtcagcccctcccgtgcgcgcgttccaccgcgagccgtgaggctgcacgtgggcccgccgcatccgttccaccgcgaaccgcgcgcgtgcaccgcgtccctcccccgcccgcgcgcgtgcgccgcgtgctcgctccgcacggtgaaccgtgtcaccgacaagcgggtcccacccgggaccacgcgtggtgagcccggtccaccgactctctctctctcctcccctcccgcgcgcgcgccttgggccgccttgggccggccggcccatttagctcggccggaccgccccatttctctcgggccgcgccctagccgccgaggaaaagtctatattccctccctcttttcttttcttttcttttcttttccaaaaaggatttaattaaatccttttcctttagaccaaaaatccaataatcttagaaatttaatatcttcccaaccgtaaatccgtttgactccgttcaacttccaaaattcctcaaatctcgagatctatctaatggcacgcttagaggtcattaataaggctttatttttgccgtttgttgagttgtcccgtttcgcgtgtagtttcagagcccgaagacccgcagtgcgaggatttcgaggatcaagctccagatctcgagcaaggcaagccacctttgaacatcttgagcctatacttgaaatttaattatgttgcttgaaaaatattatgcattgataggatcgcacttaatctgttgtcccgtctacaaggcagattggcggacctacctaatttgttgcatttgatccttcctttgataattgttatatcgtgtccccttgtaaccatctagttgcgtctcgatattcgtgcaccctgtgcgagtatcgacggacgccttcaaacttaaaatctgaaaaacttcttgggtaaaacttgggttatacaaaagacttggaaaacccgacacctgggtcggtgcttgcgaactaaatggatttccaaaaccgcggaccgggaaacgtactgggtgtacggttttcccgctcttgcacctaaggaccgtttccttggaatttcatctgaacataagacaagtacgaccacatgggtggaatgggacacccctggctgagtaactagcttatcaggggagccttgatgccgagagacatgtggattcgccggggtggtgtcggggaggacccctgggcttcctggcacagtatggtctgggacctaacctgttgttggtctgggacccctctcgttggcatatggtaaacctgtgtcggctttggaaatgccttgtcatgaaagcttggaggtctcccgacgtggctgatccccacgagctgggtgatccgggttagtaatgtcgtgtgggtaaagtgtaccccctctgcagaggttaacaaactgttcgaacagccgtgcccacggtcatgggtggatgtgaggtgattcctagcgtagttttgtttgactactgcttgtgaaattgctgttgtggaaaggggttcgatgattgaaaaatctgcagctgatgggatcagctaggcccaggtggccgtttgaaagttgttggcccgggtggccgtttgaaaagctgttggccgggtgccaaccttgaatcatttcaaaagactgatacattgcacaaactccgaccggacgagacacactgtctcatccgtgtcgtttgagaagcactcacttagttgtttttagagaagagtttaaataaaatcaattgcaaaaacaacagtctttccttgaagcctgcattaaacacttatttcccatggcttgctgagtactcccgtactcacccttgctctatataaataatttcccccccagttgctgaagaagatgaagcggatcccgccgatgaggagttcttccaggagcaagccggctacgatgagttttagggtttcggcctagttcccaagtcgcgcctgtgttgtttggtccaagtcctggcttccgtttcccttttgtaatgcagttgtgagctcgggatctgtccgcagcccaacatgactgtacctctactctataataaagagacctctgttgctgtgataatctgtcttcctgtgataccagcactgtttcctgggactggtatcgattaacagggtaatttggagcgtcacgggctagttccggtcggtactagtccggggcgtgacattaacttaagctcatctgatcttttatataagtatttttattataaacataaaaacacaagtgctcatgacacgagcaattatccctatgaacacgcacacctataagcacctttgaaaagctggaccggtatatcgaagtcaccacatttgccttagttagccaggcgccgggtactcgtctaccacttaaagaataattaaccgagcatcgggtaggtcgtctactaccaggtagtttggttccaccacaacgaacctaactagttgagccatgctcactttgctttacataaagaatttatttggtcccaaaacaattttatcttttctctatccatttgtcttaaagaaactttatttttaaataatcaatgcattaagatttgataaatttaggacaaatacgttgagaactgataaatttagagacaaaattcattagatctgttaaagttagaaacaatattaggatttaatacaagtaaagtgtagggagaaaactacgcatcggatgatcgatacctaaaaaaatcaggtggccaaatgtttcagttgagcaaaaagtgaaacatcaagttatacatggtgaaaaaaaaaacagaaacatttaaatattttatgaaataaggtacacatgttgaaacatatctctatcacatatgaaacaactaatgttaacggcttgaaacatatatttttcttttatcagaatataatcatatgatatctggttgtaaagatttagattagtagtttatgaaaaaaaagttattttaaaaattaatacatgtatgtatataaggatggagtgaaaagagcagttggatggaccggtccatcggtcaaccgatcgggagttttctcccaagtgtattatagtatcttttgaattttatattggtatatgttttatacttttattgggtagaaatgaaattatgtttggagggagctaatgttcacgttttaaattgaagggagctaatgtaccatatattgggggtaccttttaaattgctggtactcaatcgatcctaatgttcacgtttcatatggatcatcatctatcattcttttaattcacctgccggccggctatttaaattttactttttgtcatttaccacggacgacgaattaataatgaattaaagagaggcgtacttacattgggtatcactcactatatagtagatcccaaagccacgagctcgatcgatcggtctcgtcgcaattaagctagtaacttaattacatcatcgaccgatcgttacctaaccgatcgatcgagcagacgtacgaatttttccgttccactctccaggaaaccatgcctcccatggatcgccatcgtctcgccgacggcgacgattcgtcgatcccgttttgccattaaagggattattgattaattgtctgctgatcaaccactagatagctagatcgacagaaaccttgatcatagagtatacatagtgaaaaaagttcgagcaattcttaaacatatatagaagttagggtctgctagattttaagcaatgcacgattttagttcaatttatatttaattgtgttattatataagattttattttattttattatctattttatgtacttttgcatatttgcgtatgttaggataatttattatattcaacccttttatctaaagatgtgactttgtttataaataaataaaatgggataaaataaatgactgaacttaaaattttctttttttagataatggaaataataaaaaaaatctaaacactcttaattagttgtactttctttaagcaaacggtgaaaatgagctggagataagtctggcaccactaactctccattgttttataagaaaacaaaagtgtgggttaaacgatctacgtgtcaaccgaaaggtacgactaagtaatacgatgtataaaaagtaatgaaaaataaattaatgataatgctaagtttaaaaaatgtgttgcaactcgcggtccacgggcaatatatgctattactccctcggtaccagaatatagcaactaatgggatgagacacatcctaggacaatctaaaaaaatatattacctctcattgagagggcctgaacctgtctaaatcctttgtctccacatccatccacttttaggtctcgtgcgctacccccttttattattgccgaattcatgtttcgacagttggcgcgccaggtaggggttgcgtcgagtttcctatcaacgagcgcgatggaattaacttcatgagtcgccgacttcgttttcgcttcgggagttttcacttcctttccgtcgaccacttcttcaagctcctcttctctgacttgatccaaatcagtcagggggaaactcaatcgagggattacaacaatctaccgcggcaagtttcagattcaatctcctatggctgccgtcagcaccgccttcatcttcggaccggttcttttcttctggagttcggcttgcatcgccgccgccggaaattccgacgggacgtcagtcgtcaacttgatcgtttgacatgccgagtccatcatctgatgatgtcaaatctcctggcgatattcaattactaatctaaattggagtcgacgtggaatctgagccaatcaataggagcaattttcacgcagggaagtgcagcactcatgcatgtattgcatgtttgtcacaagctgccgatatgatctcctgtccacccattaacacatatatacggaggacactgagaaaaaagctaagtgcctttatttttcctctttatgtgatattttccattgagcaatttttttatatctactcatgctaactactcgtccagcgccggacgcctagttttatcattatttatcatattgatttttaatctcagattaatctcttgttattttttgttgttgttcgcatataattacgcggcactattgaggcgattaatgctggtcatggagtcgaggcgtctcagctttccggtcgatcggccgcgagtccactttgccggcttgtcttcgccaccgccattgctgataacaacaacgacttcaccgccggcctgcttccgtcgccgccgagtggtgcctccgcctacacggctggcctattatgccgccgctgttaggcgtctacgacttcaccgccggcctgcctccgtcgccgccgagtggtgcctccgcctacacggctggcctattatgccgccgctgttgggcgtctacgacttcaccgccggcctgcctccgtcgccgccgagtggtgcctccgcctacacggctggcctattatgccgctgctgttgggcgtcaacgacttcaccgccggcctgcctccgttgccgccgagtggtgcctccgcctacacggctggcctattatgccgccgctgttaggcgtctacgacttcaccgccggcctgcctccgtcgccgccgagtggtgcctccgcctacacggctggcctattatgccgctgctgttgggcgtcaacggcttcaccgccggcctgcctctgttgccgccgagtggtgcctccgcctacacggctggcctattatgccgccgctgttgggcgtctacgacttcaccgccggcctgcctccgtcgccgccgactggtgcctccgcctacacggctagcctattatgccgccgatgttgggcgtctacgacttcaccgccggcctgcctccatcgccgccgactggtgtcctcgcctatacggttggttggtcacaccaccgttcatgggcgtccacgtcttcgccgaccggctggccttcgccgccgccgactggtgtttttgcctatacggttggcggacttcgccgctgttaatgggcttcatcatctacaccactggcttggttccactggcgccgactggtgtttttgtcaccattgatggactgcttcgttcccacatcggctacttttgctgtcatcgagggaatacgacaaagctaagtcatcatttattttattctttatatgatattttgctttttcctttgcctcgctacctcaactggttcgccgttgactagtgagtcgggggctatagatgttatatcgtattttttaaacaattttcataatatttatcttgattgcttgcgacataatctgagtacaaaagtacctatcgagttatggagttctatcttcctatgctttccgtttggtttgccaatggatggttgcctttgggccgattcctagcacccggggactcgttggatggaccgagtaacgcaaggtgctgagtattactcggaagaaatcaaaagcatagagataatataatttattttctgctcttaataattgcaaaagtacctgagtagtaaattctgatccgtgaaactttgttccattaatgacgaactcatgtcactcatatgcatgtttgggaaatgcctaggccgactcccgatgcttgggggctatgactagtcggacagagtgtttaaacgtacagagtcatctgctcggggaaatcaaaattgacaagaggagaaatacatatttataaatattttaaaatacttgattttttctcgagtattatatttatatcagatactactcatcctatatgtttgttctgcaggatccagatccagatatgcataaaagggattcatggctttaagcttatctcttacgctccaggaatggatcagtcagaacatcaccaccggctcgcctcgaccaccgccgactggtgtttccgcctgcacggctggcctattatgccgccgttgttgggcgtctacgtcttcatcgaccggcttgccttcgccgccgccgactggtgtttctgcctgcacggctggcctattatgccgccgttgttgggcgtctacatcttcaccgaccggccgcctcgaccgccgccgactggtgtttccgcctgcacggctggcctattatgccgccgttgttgggcgtctactagtatgagtcttatcccattatagattgctatattctgggacggagagagagagagagtagcttttaacaaagatatgacacatgcctgtacatgtacggttcttgttgcctggctgccacaatataattcagatctgaactgggttggcaactgctgcctttgcctccattctataaaaatgtatggctagatttatagtattaaaatgtgttatatcagtactaggttgattttttatgggacggaggaagtatatcatactaaattacatggagtcatggatatatatttttgtacacctaccacgtttcaaatgcataacttaatttggaccattgaacgactaggctaacacacattttgttgttggagtgtgacgtggagtatcgtggagcacagatatatatgagcagcttaattagctagctagatcgtcatctttcgctctcattaattcccattaccgttagcctggatatgcaacagttttgcatttaaggcgccaaagctccatataggcatcaaaattttgcgaacctttaatcactgtcactgtatgaatgaatctttaattaggctgatatatatatgcggcatgtgtctaaattaattatgatcgatcagtagccatgaattaaatggttgatgcatttgcttgtaccttctgttggcccgttggagcgcgagtatcatgtagtgccacaatatgctgacataacaaatattgcattatttattattattattattattattattattattattattattattattattattattattattattattattattattattattattattattattatttcataggttagtttgattggatgcgcgtgcgcgtgcgtgcgtggagaacgagttacagtggagtacttatataatcgtgtatactgttctcacaacacgatacatcagtctgaattacgaaagctctcgagcataagtaagcttaataatgttgtgcacatgtaactaagatcatggactcgtggatgtgtgtggttgcccaaatttattttagttattaaaagaaaaggaaaaataaccgtgttcgtctatttatatttatgaacgaagggagtttgttacaatgatttattcgtgaactgtttctattcttcaattaatcgagagaaagggacacaaagtaacactcctttttgcccacgaaccgaaaaaaacactgctaattagtcatccatggatccatcttctcccttccgacaagggcaatagagacgacgacggttgctccactgctctccggccgccgtgtcgtggtggtcgcctcgtcggcacggtggtcaacttggcccatctatgtaagtcggttgatcgtcggcacggcgccattaattaattactccggccgaaagtgaccatatatacgtactgtacaactctccggcatgcagatttgttgatccgctataagttaatatcactcgcgttgttcttttcatctacttcatcgaatttgaagtaattatgtagaaattattggagaaatgttgtgattgattgacaagataaaaatagatgaataatttaaatggagaatgcttgtaaagaaatagtattattttgggtgaacagctaaagtgatcctccaagttttattctaggctcagtttagtccttaatgtttcaatttgtccatattagttcttcaagtttttattttagtttaaacttatccttaaacccacttagaagccacatgactaaacataacgaacaactcttaataaataacgcttatactccttcattcactagaaaaaattgcatgcaatgattttttttatagataatgcatagtacttatgtaaaacaaaaataaattatgtactttcaattgtatagatagccattaggcttaagtttcatgtgcacatattaaaataatagaaattacatctgcaatattgtttattcatcttgtttttctcttttatagtgtagtatacaaattaaaggcgaaagggacattttctaataaaaatgttgactaaaaatagccatatggcacatcaagtgggtaaaaggatgattttaatccaaaacaaatacttagaggacctatatggacaaaacgaaacctaaaggatcaaattgagccttcggtgaaacccgagggactgaattagctattcaccctattattttaagacaaaatactatactagacatatagctatattttaaaatgaaggtggtagagatcaatataaactgttgatttgattctatgtaaggggcaacatttatttatactatcgtctcaattaattaattgaaggtataaatattagagggtatatataatcttcaataatacaaatatatagaattgggtacttcaaaatttgggaccaaaatagccaatcgatacttcccaaattgtagcgataaaataagatatcaacgggtactttctaaacagtccaaataaatcgatatacttcacaaaaataaatgggatgagtagtaagaaaaataattatcgttcaaactatttcttctactattaatagtagaatattatatagagaaccataacaaataaagctcatggaaagtgtccacgtcgcaatgacggtgggaacatgtgggcggagtgtccatgctattttaatcccagcagaacgggagatgtaaccgacatacgggcggctcccctgtgatgaaaaccaacgtgatcatgatgcgtgcattatgtcagcttacacgtaatgtatgtacccctctgtctaaaaaaatattaatcctacctacgaatttagaaacatatatgttcgagttcgtggctaggaattcattttttaaggatggaatagtacgtttgaaatttggctggatacatttctatataaaattagaatcacccgtagtattctaccgctagtagaatactactatataaaccattaatttatgggcatgttcggctgcccgggctgcagctgcgccgcagccggcacgaacagtgccgcactcactgtgcgcagccgcagccacggctgcagctatcggcctgccgaacaggccctataagggcacgtaatatattctattaatatatagttagagataattgcaacattatttttttcttttcgagcctcgctacggtgctttctactagtagccgaaaacaatctgaagtgttaattttattttatcgaaggattccgatctatttatactaccaccccagttagcggtagtagaaatatggagatacattattgtcaaaaaaaataagtgtggagggatatatatacttgttatttagcaatgactaaactttttttcctcttttttggctttttgatgaaaaatgagtgatgccggcgtaatagatgatatgattacagatggatttagttgaaaaaaataaaagataaagtaacttctaatcattatattaataaattactctctttgttcctgatatttgacgtcgttgactttttttaaatatgtttaaccgttcgtcttattaaaaaattaagtaattattaattctttttctatcatttgattcattgttaaatatatacttttatgtatacatatagttttacatattttacaaaagttgttgataatatgaatggttaaacatattttaaaaaaatcaacaatgtcaaatatttagggacggatggagtactattttagctctcataatatactaccaataaagttcttttctttatagtgaccagtcactggtcctttcgttcccgcgtgcgctcaactccagcggcagtgccctctctcctccgtcgaacagacaaaatcaggcaagctattactatactgaacaaatcaatatatatagtcaacatcgagcagcaagaacacaagtaattaatgttagacactccccatgattatctttaaaacacatatatttgattagtttctccacatgctgtgttctgttcttaattaagtcgttaacagtgctgaatttctccaaaggatcgtacccaagtatttcagttcagaatagtcatttgcgcagttcagagtgcccattagaatggtgctcaaaacactgtaatgttgattggcgcttaaatccttgaattgacaaggtttcttgccctagtctcaaggtgcaccagccctggccagcgcatgacctaagtcacaaaagttaatggatggatggattgagaaactggaatgcaggacattattttctaaaaaaataaaacgacgaggtatacctcctcctaaaatatggaacgttagttggaacgtgttcctaagttatttggaatgcccctctatctcttcatggtcatcgcacagcgcgacaagagcaatgcttgtccagtctccactgcatgatggtgctgacgcccgtacatacacaacatgatattggcgagcagtgagggagcaacaacagcgcttgtcccatccagatgagttcaaatttagtgaaagttaatcaaattatagattttgcttgatttggattgtctttccatcattcgctccatcgtgttgtatttctttatcagaccgctctattgttactccatcataccttgtactaggatgacaagttccatccattttcgggacaaaaattccacatagttcccgcttctcaatccggaacgaggaacacacttaagttccacgttctatgtgacatagcgcatgacctccttatgtggtttccaacttatatttcaaaagtacaaatttacccctccacacatctgtattaatgtggactattataccctcttatgtttttattgttgttaattgaggtggtggtataataagatttgatcccttttgtagaactagcatagtggctcgcgcagattgcgcggctagtatcattatattttctctcatataatagtatatatgttttctcattatattattcaaatatattaaaatgataacataattttaaattttgcaataactttacaaaactactaatgtgtaatattcatattatattttatatacatgttagttattaattacttttaatatcaaattttagttatttgtaaattatatatattcctatatggactctagactcgtcttttaatatttctttttttttaattctgaattttctgtaaattgtatttctatatagactctatgctcttcttccaatattatttatttttatttttgaatttttattttttctaattgtattcttatgtggactctaaactcatctttcaacattctttaatttttaatttcgaatttcagttacttctaaattgtattcctatattgactttaaactattcttccaatatttttcttaatttagaattttagttatttgtaaattatatgtttatacggactctaaaatctacttttaattttattatgtttattccaaattttagttagttttaaatttcaatatggactctatactcaacttctaatatatatttttaattccgaatttatatgtttttcttaattgtatttctatatggactctatactctacttctaatattccttgtttttaattccgaatttcagttatttcctaattgtatttctatatggactctagtctcctcttctaatattccttattttttaattccgaatttcaactatttctaaattgtatttctatatggactctagtctccttttctaatattccttatttttttaattccaaatttcagctatttctaaattgtatttctacatggactctgctttttttttctccgattaatgtgagaatttataagccatgagagcgaacgtggaggctcatttttctattcctttaataatataatagatatgatcaacggattagattaatttgtaataccagtatagtgcattgtagtgtggcttaaagaaaatctaaaatgacctgtgtataatggaacctatataacatgttcacttctttttttttcttttttttttgaggagaacgacggcaggagatctgccggaattttattagagggagaaaataaagtgcttacagtccagagaaaatatgagagacttgcaccgaaacaaattaagattttcacggaatttcattagatgctctctgtttgttttttccttttcttctggcaatgaagtatcacggatgatgatgacttgttgctcacaacaatcctattatagtcacgaacaattcgccctgattccaagaaagttcgtcaactcgaaatatggctagaaaagcaacaagcagaactaggagctttgggtattcagaagctgacaaacacaccgcccacacacaggattcggcttcagaatagcccctgctttagtgttcaggccaaggactaggcaggattagttttctcaatgaacaaccaagcaaagctgattaacaataatgtgttcaggaaacctagctgtaatgaatgtgcaaggggaataagaatccatcctaagttgttcttagcctctgatgaggaatttgctatattacagtcaaactgaatggcctacattacagtattacactgaaccaaccctctgctgcttctgtcctaagctggctacgcaaagaaactaaacccgtcatcatcttgtccaccttctcatcatctcctaaaccggaggagcacataatctattaatcttgtccagaatcctcatgagcttcttcttcttcttctcatcatctctggacacaaaagttttgtctctaccaaatccacaaaaaccaacaccttcagctgccgaagaagttgcattttgttctgatgatgatgatcatcatcagctccggttgtgtatcgggtcggagcctcgccggactcgccacttgctcgtctgcgccgcggccgtcgtcgccgcgaaccgctccttcgccgcgtcgacgccgacgacattgttggccggaggcgccggcgccggcgccatagccggagccggagccaggacgagctcggctctcgtcaggccgtgcaccgccgtggcgtggtgcagcgccacaaccacgacgacgacggtgcagaccaagaaaaggtcgagacggcttgtgtgctgcaccatgttggcttctgctgctgctgctcagatggagacaaacaagtctctaccttggctctctctgtagctagaatggtttgtacaatgatcaatcatggtgatgtcttgtctctagatatagcaggggcaggcagtgtcgagtccaaaagcacaaagggacaagtgaagccaagcacagcatattagcatagcatgcctaaggctgtcaatggaaggttctgaaaacctgaaagtttgagggaggcagattttggcaaagtcatgaattggggggggtacttatctcccaacagacaaaacctaaagttgcaattgtagatttgtaggggataggaggagcaacagtatgctagaaacaaagacttgctttagctccttgttgttgttatcttccccttcttggccactgtctgcagtaaaacccccaacactaaagcagcaggcacagtggtgagtgaaacaagtgaggcttttttgcttttctatctttttttttgttgttgtttgttgttcttggttgaaacacacttttctctttgaatcttcttccaagctaaggccaccaaagatgggggagcattcaaaacttaaaaggaagtgcaccaagtttcaatagcctctttcctcacaattttctatgtgtgctacttgccatgcatcccaatgctttagttgctctcctagctttggtgcaggaatggaaagaatggtgaatcttaaagcattttcaggatccaacgacggttgtagcttcttggagctgtgtatgtgttggactggtcatggtctaaggaggccgttttattggtaccaaagcgaaaaaagaaagagagaaaacagtagctactgaatccttttaaagtggaggcaggccaccttagcttcaaatttgtaataaacacagcacttagatgcataaattttaaaccagaagaaaatcattataaagagatggaagattatgtaaagattgcttcttgctaagtgggttagggagcccacaaaatcttcctagcaagctgcaaaagaaaaaaggaggggaaattaaaggtaacagaatgaattatcaatggtttgcccttttgtttgaagagattcttaaagtgctaactcaaatacttggtaaagtcactatttgaaatatatgtatacttgctaaagtgcccagaaattgataatgggaggcttttgtccgggacagcaatctacaaaataggattccattagaaaaggagtaatcatattgtgctggttcatgacactaaattaggtctataggaatactctatcagaaagggcacagcaaataaattaacaaacaaatatttacttctaagttaagcaatgcagcatacaaggaattgatacaatgctggaaaagatcatgatcttagcagagacaagatattgatcttatcagagtaatgatgacaccgtgattaaagcagcagcacagttcaattcaaaaaaaaaatagcactgttatttttcctgctttcgtagttacatggaaagtttatgatgtgtctttaagtttatgatgttcataaagacactcaagtacagaacaaacaagcttttaccaaagattgcagagaatctaatactagtagttttacccacccactctttgagtatgaactgtaatgacctcccactttttgctatcggaggtaatcaaatatgaaacagtgaagttaagaaggtgcatttgtcatgtactcctgccagataaagttagaaccgaaagaacagttaactgttcacaaatgacacgcattgaactatagtacagtaattaactagccacaggacgaatctctatgtaatccacgatgcgtggcctggccaccttgtaggcttgtacctcctccccttgtgattgtgaggatcgaagcggccacaggagcacacgtccgtcgatgtacgatgcggtcacgcagactgtggaatcacggcgccggcatggctcctgttatggctcctgttgagccgagtttagcgcctgttcagtttgatgctattttcaatcttaccaaattttagtaaaattactaaaaaaaataactacatttagtttgctaccaaattttggtaactatataagaaatcctgccaaaactttggcaaatggcaactataccaaaattttgaaatgtgtaaggtttttttagcatcaaagtgaacaggcccttagtttcaaactatttcttcaaacatccaatttttccatcacatcaaaactttcctacacacacaaatttccaatttttccatcacatcgttccaattttaaccaaacttctaattttggcgtaaactaaggccgagtttagttctaaactttttcttcaaacttccaacttttccatcacatcaaaactttcctacacatataaacttccaacttttccgtcacatcgtttcaaaccaaacttctaattttggcgtgaactaaacacaccctaaacacacccttaggtgtcgtaaaacacgtgaatgttatggaaggatctaatatcaaataaatagaaggggtgaggtttcgaacccaggttgtctagcccaccaccttgtggagctagctggaatacctaggtgtttctccactttaggtgtcgtaatttgtcaccgagttcaaaattaattcctaaaccgtcgtatccaagggtggagctagaacgaaatggggagggggtggcactgcttgctttactctgctttaggtcgagtttaagctgatatgagtgtttgagtttgggttgaagagggcgcatatacggtgaaaatagatgaaatataactaaaaaatttcttgaccgggtttctgggcaccccctcttttcaatgtagctccgcccctggtcgcatccctcaacttccaaaactagaacacctcaaagcgttttcggctaacgtggcgtctaagtggtgtcgacaaagttagaaaaaacataggatgtcccgtcattttccctcttctttccacatcatcggcctcggcaagaactcctgcatcagcagcggacaagggtagtcctatcaacacatcctcctttcggcgaccacacgaacatcagcttcacgagcggcatatccggctgcagcgccgccgaccgggagatcacctgcaccacctctgtcatgctcggccagtccgacgggttaggattgctgcacaccagcccaagcaaacagtaacctagtggcatcatttgcatcaaattcttcggtactagtatagaagaagaagaaacgccattgtcgacggcgttaagcaacctccaccccagtcgacgagcaaatatcaattcagagcaacatatccgaagcatagctaaccaattcagagcatcatatattacatctaactgttcattgatttgatggttaactgtgcttcggatatactctctccgtctcataatataagggattttaagtttttcttgcactgtttgaccattcgtcttactaaaaaaagtgaaattgttatttatttttttgacttactttattatccaaagtattttaagcacaacttttcattttttatatttgcacaaattttttgaataagacgagtggtcaaacagtacgagtaaaaactcaaaatcccttatattatgggacggagggagtattgctctgatatatcaattcaatcgacggcagcttaaacatctcctggaacatgcagagagctcgttcgtcggtgacgatctcgagcaccagaactccaaagtactccggcacgatgaagcccaagcgggtttcatggttttctgtgactttgttaacgctacgtatacatcacatcagttaaaatcgtcatctaaacagattaggatcttatttgcactggttttgagagttgagggacacgtcatatctggtattgttgttcagggatgaattccagactcgacgacaaattgagggacctaaagtaaacttactacggaggaagaagaagcacttactgggccatggcccacaacatccggtccatctattttcatcgccactatacctccggcccacggacgcgacgcgcttacacacatggcccacatgccatggtgcgcaagcgcaaccctttcttcctcctctgtcgctctctctctctctctctctctctcctcttctccactttctccctcctcgctagtgcgctctccttggcgagctcgctccgacgaacgccaagcccattgctccgcgtgtggttgggagagtgagaagagaggagatattttcggtgcggtggggaggggggattgagagaggccgaatcaaccaaccaacacctgcctgattcatcttctcgatcgatcctggggggtctgagctaatgcgcgccgccccgatctcccgatccggtccgcgcgcgctcgatccccgcgcctgatttctcctccccgcccgtcgccgaggagagctccgtccaggtagcgcgcacgcatacgcaaaattttggcgtatttaatccatgatctgtgtttgcatcgaatggataggacgtgctcttttgacttcagtcggtgctggtaggatgaaacgatgcaaagatactgtgttgttgaagacataatccgatttaaaacatttcttgttaacttggaacaagttatcttaattttcggtagtgatagtttctgctgtacatttttttccttaccaaatctaattcaattgcagaatgtagtaatgtattgatgcctttggctggcaacatagagaggttcatggactcgtttctagttctgctagtttcggtacttacatattttctgcacatatctgcatgttttttttttggttgaacataattcagttgtataatggactgatggcttgattagtaagtttcattggaaatataaggagcggaaatcaagaattcattccattccttgcttaatgtatgccattgatgatgaacttcagagttattttttagagtaaattgcacagaaccccatgttttatggtcaacgttgcttaagagtaggtacaatagcaggctataagccagctataaacatattttaaagagataaaggaagagagagaacagcagcgggctacagatttgtagccagctgcagcacggactccaaaacgtaatgtgtgtatgacaggtaggaccagatattaatagtatagtaagcaactattgtatgaattggctattacattggctatagatgatttggagctaatagttggctatactattaaacttgctctaatctatacatgtggttttctgcaactttgaccatagattgaggggtgttctaaaatttactcttatttgtaacttgtcggtttgtccatacttgtgctatacacatttactgaatctaattgtatttatcttacagtgaggtatggcgcggagttcaactgagagcaggaccaggaccactgtatctgtagttgttttatttggcctttgttccttcttctatctcttgggtgtgtggcagagaagtggtttcggaagaggagacagcatagcagctgtggtgaacgaacagactaaatgcgtggttcttccaaacctgaattttgaaacccatcatagtgcttcagaccttcctaatgatactgggagtactgaggttaaaactttcgagccatgtgatgcacagtacacagattacactccctgtgaggagcaaaagcgtgcaatgaccttccctagggataatatgatatatcgggagaggcattgcccacctgaaaaggataagctctattgtctggttccagcaccaaagggttatgctgctccttttcattggccaaagagccgtgattatgttcattatgcaaatatccctcacaagagcctcacggttgagaaggctatccagaattgggttcactacgagggtaaagtgttcaggtttcctggtggtggaacacagtttcctcagggtgcagacaagtatatagaccatcttgcttctgttatcccaatagccaatgggaaagtgagaacagcactcgacactggttgtggggtacgtaaaggattcaactctaaagatgcaaacttagatgagcaatcaagcattagtttttgttgttcttatcatgttacggagtttaatcttttaatgctttttcctgccacaattttgttcaggttgctagtctaggtgcttacctgttgaagaaaaatgttttgaccatgtcatttgcaccaagggataatcatgaggctcaagtacagtttgcactggagagaggtgttcccgcatatataggtgttctcggatcaatgaaactgtcattcccatcacgtgtctttgacatggcccactgctcaaggtgtttaattccatggagtggaaatggtaaaatcacttttagaatccttactgtttaaaatgttctcatttaaagtttacacatctgaagcaagctggttgctctggttctgcagatggaatgtacatgatggaagttgatagggtactaaggcctggagggtattgggtactctcaggcccaccaattggctggaagattcactataagggatggcaacgaacaaaggatgatcttcaaagtgagcagagaagaatagaacaatttgcagaacttctttgttggaataagatttctgagaaggatggtattgctatatggagaaagagaataaacgacaaatcctgccccatgaaacaagaaaatccaaaagttgacaagtgtgagttggcatatgacaatgatgtatggtgagtgacattctttctgacatcctccacaaaaaaatatgccgttttaatctatatgatcttttttttttgccttcatttttctagcacttacattcttctgaattcaatttccttcactaaatacaggtataagaaaatggaggtctgtgtaactccccttcccgaggttaaaaccatgacagaggttgctggtggtcaattagagccatttccccagagactcaatgcagtacctcccaggattacccatggttttgtacctgggttctcagtccagtcatatcaagatgacaataaactttggcagaaacatattaacgcttacaaaaagatcaataacttgcttgatactggaagataccgtaacataatggacatgaatgctggccttggtagttttgctgctgcattggagtccacgaagctgtgggtcatgaatgttgttccaaccattgcagatacttctacattaggtgtaatctacgagcggggattaataggaatgtatcatgattggtatgtaatgcttctctgtattgctctcctggactcatgttttggtcattgcactctatttttctcacttattcagttattcttcgtgccattgtttctgcatactattttttgctttttagaggagacacattttactttaccaacatggaaaacctattttttttaatggttttcatttgcttcagaaacatgtcaaaaacggatcaatttatttacttctgtagagactgaaggataggattgaactttagctctgccaatatcagttcaagctcttcatggtgaagttgcataataataaaatcagtctgttagttattctgctattgtaaatatgtgtttgttttgactgtgctgactgttagctttgatcagttgaaatctgaaaagcattggttgcttcttgttacataggtatatgtgttgaccatagtttttttattctttgtacaggtgtgaaggattttctacatatccaaggacatatgatctcatacatgctaacgctgtgttcagcttatatgagaataagtaagaatgtcatacattgcaaaaacaagaatgtgctcctaagttggtacatcttcctaattgatattttctatttacaaaaaacaggtgtaaatttgaagatatactattggaaatggaccggatcttacgaccagagggcgcagttataatccgtgacaaggttgatgttcttgtaaaggtggagaaaatagctaacgccatgaggtggcagacaagattgactgatcatgagggtggccctcatgtgcctgagaagatactctttgcggttaaacaatactgggttgttgaaagcaagagcagctaattacatatgctgggttgtttttttccactgagctcccaacaagacctaagacatgacttaattacatatgaagggtatgcatcatctacctcctctgtaaacttatagccactgtagtcaggaatgaactcttggcagcttgagttttccgaaaagttagcacccttgcaatgtggccttgccagttcttttcaaggtaaattgcactgcaggtataaatctttttcaaaaccggctgcctcagtcttgacaatctcaaccacaggtttcatcttttgatgtaaatggcttggatttgaaagttcatgtatgcaaggcttgtcatgaccgtatttcttttagccagttttgtctagccttagctggtgcgacaatttgagaatgctcaaactggcctctaatcttgcttgtttggtgcatttgtgctctaaggaggtgtcgcactgtaatgaaactgagatccataagattctagtattctgatcgtctgaaccgaggtgaccaataatcaaatttagctacgtatgtaatagttttttttctgttggtaacagacgaacgatttatttttagtgctatttgaggctgtccttttgagattcagttatacaaatgttgttcgattttgatggagctgcaacttgcagttcgtctgttgcaggcatttctctactgaaaatctgaaatgggtattggtctgtcggagtgttttgttttaccgggaaaaacaatttttctattgccagtcacctgtttttttggagggttttgcttatgtgtccgtattaatagtaattaccaaaattcaaaatgattttattctaaatggttttaacttgggctaaccaaacggatggttagatgtattcactctcgtgcatgcaatgtacaaaacttgcgtgcaggaattatgtactatgccggatggttagatggttaacttgggctaaccaaacggatggttagatgtactatgccggtttagaagcctcatattattttttttttcatactttgatggaaattcgggttccatgacgcctcacacttttaaccctaaaaatagaagtgacggactgtagattatcagttaacaaatagttattttattattaaataatagtcccagcaacatattgcaaccaagaaatagaagcacctttactttgtaataactggaagtccctaagacaatctttagcctttacaccatcttgcgcatgcaatgtacaaaacttgcgtgcaggaattatgtagcaaggtttactcaacaagtcaatatatactgccagagaaaactaataatggatgcatgaataataatttaacaatttatattttacacttccatcattcataactcatcatcgagtctaaatgtatttttgtaaaagaggttttcctaaaaagatttgaataacaagagaaatgcgtgaatcataatttgttataacattgtgaaagctcgtgggccacatcttttgtcttacaacgtatcccctccatcccaaaaaacataattaaaccttaggtttgaatctggacacacacatgtgatgtgtttagattcaaactcatagtttaatttttttctgggacatagtagtatatgctcataccaaaatttaaatcttaaaacttaattttagaattaattttaaggtttttattatggcttctttttttaatatcggagtttaaatcattaaaaacacatatgtaaaagttttaaccatatattatttttttacgctaatatgtcttttggcgtattatcagcaattggccaactgatggcagcttgtatcgcattacaaatcatgtatttgtaaatacttgctttctcttttttatataatggaatgtacttccggcctttactcaatgagctatagccaattattacgtcaaatcgctcaaaagcgctcacaatctaataagaccacaaaacacaccaatttaacataaagcaacacaaattaataagcaccaacacaagatgaaagacccataattattgaatcatatttgtaaatacttactttctcttatttttcgcccatcgaatgcatcatcgcaaaaaatattttctctataccaaacaataaaaaataggtctttttaatgccctgtttatagtccagataatttatatgaattttgaagaaatcaacatatttagccaaatggtagtactaggcttgacagcaaggtgtgacatgcatagccattatccagtcaccaatatccccattgttttacttatgcttacccttctaagccaaaatttaaattttaaaatttaatttcagagttgattttaagggtttgtcatcgtaatttattttacactatttgcttttgaacgctaacgacaagtatacagaacatttatcataaataagattttcttacctataagcgatatggataagcataagtgaaacaatcgaactgcaaaactactttgcgtgagagatgatcacgagcacttcgatgccaaacttcacaacgctgccgactataaatcatcgtatatcactaactttgtgttcatatatcgaagaaatatctatttctaaaaaagtgcctattttcaaaactatacttaaaaaatttaaaatctaaatcttttcatgtatttggattaggggctaaaattttagtccatgtcacatcggatgtttgacactaattagaagtactaaatagagactaatgataaaacccattccataacctagactaattcacgagacgaatctattgagcctaattaatctagtgatactacagtaaacatgtgctaattataaattaattaggattaaaaaatttgcctcgtgaattagctcttatttatataattagttttattattagtctatatttaatatttttaatatattagtcccgatatccaaacaccacctttaaaaaaaaactacggaggaactgggatagttgatgcgcaccggggcacgcacgcgccgtgcgttgggcgtgtggcgcaaccccacgcaccggcacgcgccaggccggcgctcccgcctccagaggccgccaccggccacgcgcccctccacgtggctcctggcccaccaccagatctctccaccgacccccacagacaggtgggcccgttcactcccgtggcccccacgtgccagtgagaaaccacccgccgccgcaacgcgcgcgccacgcgccgcgtcgtgcccctcccgcgcttgactcgcctcgccgccctctcccccttgctgttattgctcccttcgcggctctccttcttcttcttcaatcttcgccctcctcctcctcctcgtacgcgcccacgcggttctctttctgccccctcgatcgatttgaggtttgcccttgtttgctgtgatgttttgcgctgttaattgggtgattaatttgggggggtcgggttgggttgggtggatcgatggctgatgggttctttcttggtcgattggttttcagcagggaacggaagggggaggtttttggaggaggccatggtgccgtcggagaggggggacgtcgccaccgccatcagacccgccgctgccgacaagctcgtccatgggtgagtgactgaagtttcttggttgtctcgtttggggacttgggggatagttcttgttcttggaggaagcaaagagatagatgctctggggatgctaaaatttttgtttcatgatttgtctcgaggcgcagtttgtttgttaggcatcataccatagtgaatctacagaattagtgatgatgctcactactcaagcagcaaccctgcaatagtaaatgtggaagcctgccaatcatactgcgttagacgccgttggtggcgtagagctatatagtggtattggcaaattatttgtcgtcaggtttattgacttagttgttatctctgcatgtcgatttaattcttatcccttttccatttgggaggaaatgaaagttgagaattgtgcattgttgctaatgttgtaagttcccattgaaaccttgtgcaggcctatctctgacaagaagtgccggaagaaggtcccgaggaaggttcacaaatctgagagggagaagcttaaacgcgggcatctcaatgatctgttcggcgagctgggtaatatgctaggtaagctgttttgatcacaaggcattgcgtcagttctatgtgtctgaattggaaatttattatagcttgttgcgcagaaatacaaaccacatatctctctcttgaatgtcattatataattcgtattactagcaactggattcatcattgcttaaatttgctgctatttagcatctgatcaaatacaacaaccttctgcagaagcggataggcagagtaatgggaaggcatgcatactaactgacaccacccggatcttaagagatctgctttctcaagtaaaatctctccggcaagaaaacagcaccctccagaatgaatctaattatgtaagtaatatttgctatggaaaaaaaaaactgttgatttgttgcagttgtagaaccatttccctttctttggcgtgcttgatgatttacattgctaacttgtcgtatgcataatgcaacactcattccaacattgttttttctcccacaaacaggttacgatggaaaggaatgagttgcaggatgaaaatggtgcgctacgcagcgaaatctctgacctccaaaacgagctgaggatgcgtgcgacagggagtccaggttggggccatggcgcgactggatcacctctccccgttcctccctctccaggcacggttttcccatcgcagcagccaatgcagccatctcccatgacaacaagcacagtgttccccttgcagcagccactgccacaaccaacagtcattgagccctctgcaagacagccactggaactgaagctcttcctagaagcaccccccgccgaagaccctgaaccatcagaagaccaggaggctccgaacaatgtggcacgaccgcagccgaggtacccaacagaggcatcttcttggcctattagcctgggacttccaagaatggaagatgagcaaatgtagtggtagcacgatagatgatagcacaggtagagattgagagggtctgtttttaatgcatgcaggaattccacacgaaaacacttctgtccttgcatgaaaactggaaaatttcctgcattccaagtaagacctgagtagatcagctccaaccaatcagaaactcactttgagcctagaggatatactactgaatgatgtgcatgtaaatatttcaatctcccttttgtttctgtaaactctagtgagaatagaacccgttttatccccttgcaaatattgatgtccaattaaaatgcatttatgcgataattgcaatcgaaggaaaagttatgaaagaacaaaaattgtaagactatacgcctgtaaccagcctccaagccaacattatcacaattctatcgagtctgacgaaccagcaacatctcaatacaactatgcagcacctggcaaccaaacaggctgatatatagtagtatagcattaacattgaacacttgaatattttccattgctgttattcagaagaacaatccgtacaaaattttatgaactactccactccgtagctggaaaaagtcaccatgtcctttcgcacataatgtatctactgatacatcttcaaacacaccaacggaaatacgcgagagattatggccggtttcctctgaatggcgaaccagatgcaattgcaggtggctcttccctgtacggctgagtagcaggatcagtcacactgggcagtctctgtacgctccccttcccttttctagcattagggccaatttcttcgatcatgtacttccatccgtcaataggacgcctccggctaaatatgtgtgttttgatgaagctagcaatctgcagtcgcatttcaacaccatgtcagaaataactagaataacacaaaaaaaattgtggagagagagtgattgtggacctgctgtttactgaaagcaatccgcctttcgaattcttggagaagaatgtcatcttcccgctgtgagatatcccatatgctaccatcctgtcctctagaggtggtttcccaaccatcaggcttggttttgatctcagcagtgcttggaatctttgaatcgccaaaatctgtatttccagaatcgaaaatcctgtatttcacaaaattataagccagctacgtgttatagattgctaagcattttgctcacatgaaaaatatgcattcctaacttagcaaaaccaagagcttacggaaactaaaacattgtacaagccataaagcctccccaatcatgcagcaaaaaattgttatggcaggaagatatgcaaaaatgacaaatagactgacagtagcattaggagttttggagtgctgccataataccgagactatgagagtttatgttttaatgcctgatatgctgattactaagcaattgtagcaaatgaaaagaaaactgcataactaatgtcattccaaatgctcctgcttctatcaactaaatggtgagcagcaaatgacgctaacatatgcttgttcctaagcaaaatcaagtaaacatcgaagcacagtacttcctattttttgagaaaaaaataaatttgagggtgaaagatgtgaactgtactagatccagaagaaattcacatagtacgcataatttgtgaaaccaagctgctacattggaagcttggagataaacaatatatgcaacacggttatattttgaatgaaccacaccagatcaacatttaatttgtacatcatgcaacaaaaaggttatcaatttgacatgcagcaggtgctatgcatcaaaaaaataatcggaggcataatatacactattcaagtcccaagttatcaaacatatcagagtttcaccaatgagcaactataccagatgaaaaggaaatcacagcttttccaggctctagctacaaatgaactagccataattcatagtattgcccgacagtctaacacaatacctatctaacttataaaatacagctgaaatttgatacagattcatggtctatcagctccagattccaccaccaagtgcggtgcacaacgaggaatcaaataatatgcaagcgacattttggcaggcaaatacagtttaaatcgcaaatttgtctaaggggggaaaaaattagagcagcaacttactcagagcacgagtcgaggagtcggtcgatgtcgtcggcgccgccgcctccgccgccgaggcgcgcctcctccatcttctcgatctccttcacccacagcgcggcgtgcacccgctgcttcctcgccctgtactcgtcggcctgcgccttcttggccgcggcgccgcccgcaccctccgcgcgaggagcggggcgcggccgcctcgacgcggcgcggcgctcggcccagcgctcgtccatgtcggccacgaaggccttggtgtcagggtccacctccgcggagatggccgggacggtggcggcccccgaggtgggggactcccacggcgcggcgggcgccggggaagaggtgggggagtcgcccgggagccatgaggtctcccaggcgtcgttccactcgtcgtcgccggtggtcgcggtggcggcgccggcggcggctcgcgacggcggaggcgcgcggcggttagaggagaggcgacgcaggccagaggcggaggtggggacgcggagggcgcgccggagcgagtgcatggtgtgtgttcggtgaaatgcgcgcagagaggctctcctgttccggagtataggtagcaatcaactaagaaatcctctgcaatttgatacccatcttatcataagccctcctaaatacatttagtttggtaaaaaaaattcttttcagaaagacaatacaaatattgatgctcacagaagcgcgcacaaccacctctatgaacgtacattcggaaaactcatccgacatacgttgacattaacgaagtcatcacaggcacatcgttgtcgggtgcatcatccaccgctggaaaaaagaattagtcataaatgcaagccctcgtatcaagtttaagacttaaacccgagtggactatttccaacctaactagtcaaactacgttacagtgcaaaattccattaaaaacaactattttgaaaacgttgttataacgtcattatacccatccacaaaactcaaaaatccaaatcattaagaaactaactggcagagatgggggagatcgctcctctctcccccctcggtgctcctctcgacaactgagtgatattttgccaccgcttcacattatatattttgtacgctttgatcaatgagaatccatccctctcgctcttgctcccacactctcagctgtcttttcaacacaaattatttcaataacttcaatcaaaaccttttatgtacttatggacagttcgactgaccatgctccttttataagatttgcatatttggactctactactgtacttcctaaaggattagattctgaaggtatttatcctacagcatatcttaagatttaaacctcaatttgccaacctggtatttcttttttcaaacattatgaaactacataacaagttgaataaactttacagtgttacaaagaacttcaagacattatcacaattcttaggtttaatggatcatcggatcagtaccgtttaattgttgcaagagcacggaaaattaagtgcttcttatcacagttgatagcatactaggattaattaattggaggtcatataaaaccaagattcaatgtattatactacaccagtgttagtaaaatatttgtaatgattcttttttatgcatatagcttcttctttagaagaatttggaattcctttaccacacgtaaagagtagaagagataaagaaaaaaaaaagatagaggagaaaacaaagcgagaggtgttcaaccataggcccataagacagcccactatatcatctaaaaggccacaaaagataggcccaccaaggcaaaagctctagggttagggtttagcgcctgctttataaaggactccgcccccaactctcgtccgcctccactgcctccctaaccccacaatccatctcgccgcggcggcggcggcggccgagaccggcggcgagcggcgggggcgggggcggcgtcagccatggtgcgcgttagcttctatcgcaactgtaagcaacatccttgccttgtctctctgtacccgtgatccattggatcacagaacgtgatagcagtagcatctgatcccgagctagcctcttcagcagttttgataagttttgatacttaattacttggttccgcatttgaatctggagtccgagatctcgtcatttgaatctgttttggtagtccacgggcagattaagggtcttgcctgatttcacaaaggtaactgatttggtacatttgagtcgttttggttaatcggcttgctcgagtttgccagttgtcaatagttcgtttatgtgaattaataatcacagtagtcgtgcttgacgtggaaatgaaaactgcactctgaaatgcaccttttgaatcctaaccgaaagagtaaagtgtttgactataggggcatatatcttggagacgttcgctcatgatatgaggatcagtagctcttgatataaattgactgttgtttcaaacgtggttttttatttgatgccttagattttcgtacatttacctgatactcatggtgtgttgggctatacatgtctaatttcgcaatattaatatttctcagatggcaagactttcaagaaaccaaggcgtccatacgagaaagagcgtcctgatgctgagctgaagctgtatggtgagtatggcctcaggtccaagtgtgagctgtggcgtgtgcagtaagccctaagccctatccgcaatgctgcaagggagctgctcacccttgatgagaagaacccccgacgtatctttgagggcgaggctctcctgcgccacatgaaccgctatggtctccttggtgagggccagaacaagcttgattacgtgcttgcgctcaccgttgagaacttccttcagtgccgcctccagaccattgtcttcaagaacggcacggtgaaatccattcatcatgatcatgtactcatcaggcaacaccacatcaggtatggatttcaaatttcttatatgactggtgatttaacttaggtacactgctgaaatgcatatgcataaataaacatgggcttgattgaacattgattttctgttttgataacctcatagctcagtattttcgaactgcacttctgtttttcattctgggtcatgtgatgagaaacaatatgcaactcacgacggtcgtctgagacacttagtgtgtaatggtgcagtcatattatctctgatgccctgccatttctctttaaacttcttacattgctagggtcatgtatgtttttagttttatgtgaaccacatactatttttgcagaattttataatatcttattgttggttcataattgtcattaagttggtttggcacttggcattatgtagtagttccattttgttgcccttttttgcacatttttcttggagtttgtatttggtggcacaatgaggaactaactttgctaatgtatctatgaggccattaggctaatgactcaaaatgtccttttcattctgagtgccacattgtacatgactttgtttttctcttaataatggatctcacttgtctttcattatttgcatgttaaggaattgcgtgatcccatcatgtccacggtgattgctaggatttaatttgtgtttagtctcatattgatgcataaagctatcacagctatagtacttgtgtaaataggtcctgcaaaatgtgcaaaatggatttagtttgtctttgcgtagttgaagcctagattacttgctaaatgttgggttgtgcagagtgggaaggcagcttgtcaacatccccttattcatggtgagacttgattagagaagcacatcgacttctcccttaccagcccactggcggtgagcctggaagggtcaaagagaaagaaccagaaggaggcctctggtggtgatggtgatggtgatggtgatgaagaggaagagtgaatatgtgatgtcagctcggttttgttataggacctaattttgcgggaacttgtcttattagggacctaatttttgttacatgagtagaaaacaaaaattagccaccgagggttgtcaaaaattgttgtttgcgctgttgaaattttgatttgaagtttatctcctcatgaacatgtgaattcagtgtacccaggaaatatatcccaggtctcacaagctaatactgttgggaatatttgaagtgttgggtaccttgtcttttgaaaactggctttgattatactaaagcggatactaaatctggcctcaaaattgttctaataaatctggaattcgaactcgcaaataatttgttgtcacgcaggcatgtatattctagggatcttttgagtttgttggtgcatatgcgaaaagtggaaaccgctactgctgttgtgaagcgcttcagaattacccgttactgctgttgcgaagcactccagcattacacgttatcgcacgacgaaacgtcctaatttcagcttgttgccttcgttcctctgccttgccgaaccctctctgtcttcttcacttttattttttctatgatggattaaaactgcctctacaccacaaccaactctcttacggtgccatgcgatgtgttatcgttcattcgtgttattctaccatctaccgcctcctaatcactttcccagggattcccctagcgcctaaccactatatcttagttgttcgatagcctccactatccaacacccttctctgcttgttctatacccccatggcttcaatggtaccatcttcatctcatcacgttgtgtttacaccttccatattgctggtcctccatcaccttgacctccccctctaaacctagagccagtagcgcttggcaatgaccctcaacccttaccccgtcttgtcgatagagaagataaggaactctccaaagataaggatgcaggagggcaatagtaacatgaaaattgactaacctgacattgttagccaaaggtgtatcttgcatttctggaactacaatggaagtcatagcatgtttagctatctaatctaagctctcaaatttttaagtggtcctgcacttggaaaagtttggagattgagataggatcattatgctagagccttttgtaattgctctctaagtttatttccaatgcggtaagttggtaagtaacttcaactcagtatgttggagacatattgctttggaggagagagtggaatatgttggcgacatactgcctaggagaagaaaggggatgggggcaagtggcttcatggggtccttgtgccttctgcaaggcacgttaacctcacctggcattctatgtgtggtccaagaaggagggagcattgacctaagcatgaggaagtggtgatggagatcttatagcgatagatttggcgagcctgtagccacatcaggcgtagtcattgagctccactcaccatccgcaaatgccatcgggatcctcatcgtcatatccactccaccaagcccctagtctgagaggacaaacaacggcggagatcatcactgcagcaccaaggagatctgagataggatagctagccaccacaaatcttgtcaccacagtgcttaagaagggagcaagcataggcgaagaggagagaggcggcgaccatggtggcagcaaagaagggagaggagagctgatggagtgaatgagtgggagagagtagttatattgtttagtttatggaatttaggaagtgtagtgtaaaattttgaacttccttgtcatttagaaatagaagaggactaaatataaaatgttagaggctttgaagctacctatataggtaatcaaatgagccccatgacatgattaggcatggctagtgctaaaatccataaaatccatgccaatccacgggctacaccaacggctcaggcatgacctaataagactcgggccgtgccgtgccgggccgaaggcacgacaagcccagcgggttcttccttggaatatatctattttgcatccgtcatctatttgggccttgtctgataaggctagaataagtctatttgcattcctcatttctttgggccatgctttatttggctaaaataagcctattttgactccctcatctattttgcctccctaattgttgggttgtgccgtgatgggccggcccaccatgccgaggcagaggcccagacacagcccaacagttgggctgagctggtacgggttagacactagtcgggccgtgcatgtctgggccgggtcgtcgcgccctgggctgtttagccatctataactccatgaggccattgattttgttttacatttgcacatgtagtctcagcatagatagtagccatattgtattcgaggcagggtttatattaccgtcggtaactatgcggttactgccgttaccggccttaccgcgggggtatggtaatagaaaaaccgcggtaacctacttaaatttaaataaatttaaaaaataatttgaatttttgataaattttgtacggtttcgtacggtttttcacggttaccacggttaatgcgcggtaaccgtgcttaccgccagggcacggtaaccccggtcccggcggtttgggaaaccctgattccgaggtaactcggtaaagccgcttgcacagttttgcattgtaaatgccctgatcgagttgcatatgcccgtgatgctacagctctttcccacaacttgggacaggaagactcagtgaaaaaaaaaaaacaaagaacagaatgcccagacaaccctttctaaaagacgtgaattagttgacaacccaacggcttattattccctttcatgattcctaacttcttttctggaaaaaaaagcatgaaagcaagcatataccttaattaagcacacatgacacaattaaacaaagaacaaccaagtcagagcgatatgggtacgcaaagtcagcagaggaggaatcaaaatctattcctccccgagcagcgactcaaacgtaacacagctgagcagctacctaataagctagctagctcacgtacaagcatgtcgtcccctctctctctctctatatacatatatatgtaacgaattaagtcaatgtataagcaaattaaagattgtctgcagaaaggaaaactcaaacaaatcaattagagagagagagagagagagtaaatcgatcgacaatggcggaggcgatcatcgggccgctggtgtggaggctgcaggagatggcggtggggcaggctcgggcgctggtgtcggtgaacgacgacatcgtgaggctccgggacaggctgatgtggctgcaggccttcctccgggaggccgacgccaagcgacgcgccgtctccgacgaggtcaacaaggtgtggctgctgcagacgcgcgacgccgtcttcgacgccgaggacgccctcgatcatttctatctccgcgtcgatatgtccaggtatatatagctgctactagatactccctctattttttaatagacgacgccgttgactttttcttccatatttgactattcgtcttattcaaaaaattttatgtaaatatataaaatataaatcacacttaaagtattatgagtaataaaacaactcataacaaaataaattacaattacgtaaattttttgaataagacaaatggtcaaacatgtgagaaaaagtcaacggcgtcatctattaaaaaaacggaggtagtatgttattcccttttctgcatccatgatagatattgcctctggttttaaatggacaaatcggacgtctggcatttctcagaacatcggacggtgtatttgttacaaaatgtttcagatgtttcatccatcaaggaaaaatgtttcatcgcttcaacataagtgtttcaaccaaatgcaatcgaaacatattgattgcaaagattcaatatatgcaacatcaaatcaaaacaaaatgaaacaccttaataggagtgcaacaagcttaaacagtagaatgcaacatcactaaaactccaacaaaacaaacctacctccattttcttcaactccggtcaccggcccccgaggaaactcacctccgtcgacttcttcttcaactctggttgccggcccccgaggaaacccaccttcgtcttcttctttagtttcggccaccacctctcgacacctacgtcttcttcttcaactccggtcgccgccacccgacacctctgtcttcttcttcaactccggccgctgccccctaacgagcaacagagaggtgggtgcccatagctaggaccagtcccatcaccgccggcgccgccgcataagctccatcactgtgtggctttctgcgaggatcagtgcctcaattatcccgcgtcgtctcgccctccgttgctgccgctgtgtagccaacgctggtgaagcagcaagagagaagaaagagagagaaaagaaggaatctgtggtggagaaggatgtgggatgtggctgtgtgtttggataaggtcgacgtcccatattttgcagtgtctggacgttcgtccggaagcattttcggtttttaacatatgatgtagttaaattatttctaattcgtttgagttttttttttctgaaagaaatatttagacaaatatatataaacatattagacatgcttaaagtgcttttgatggtaaatctagtaatactccttttgctttacttaaactaagtaattgtataaatattggttgttatatattaaacacttgatcaaacaccaccggtccaaacactcaggaattataacattccagtccttttgaaataaaccctgttaaagtatataagaatggacacctaggttaacacaaaccccgaagttggggtcaacaccataccttgtgggacctcttgggagttcaatagcaacaaaccattgcaccacctagaaggtgatgacatgatgtggtatattaagtactagcataatgcccctgcgttgcaacggattctaaataacatttattgacataaattaaaatcctaaaccatgcatatatcacaattagactgaagggaatatgatcacagaaataacagtattaaactacaactaacttttgctggaacgatatttcaatatcagaaaaaattatataactaaatccttattttatttagctataaataattcaacacagagcaaattgcaagtgacaataattttttagtggatca

SEQ ID NO: 5988 - DNA, 21145 bp, Oryza sativa
atgattccattcgcctctcactggtacagtcgttcatcatatttgtactactaccactattagcagtaatagaaatgtggaggggtatattgtaacaaaaaatgtataaaagggtataatcatcattagcagtaactaaactttttccctcttttttggctttttcgatgaaatatatttagccgggaaaaaacatatataaatgacaaagtaaatcataattattggattagtaaattactattttacctataataatatactggtagtataatattataggtagagagcaccgaaacatcactcaattttctttatttcgaccctagtattaagttgtagtactaccaggtttgtgagattagacacccctgctcctcctgaagcaaaattgacacccttcagatatacggagctgttcattggtttgctgcttatagagaggtatggaggagggctgggcaccccgagactgatagctgcaatgtggaaaaaaggttaaaaaaaaagacaacaaaaagagatatatatatatatatataaacacacacacaccaacgaaatttttttttgagtagagataaagcaaaaataatgtcaagtttcaaaagatctatctatcttctattttattttatatactaaaagtccatgaaacttcctacaaacgctctcaagctgccacgtggtgcttctaaaaacgctccaaagtcgccacgtggcgtattgataaatcctaaaaattctaagtaaaaaacaaaacatctaaccgttgattttcttttaatcgggtagacccattattttcaaccattagatctattttacaaaattaccaaatcaaccaccgttagatctatcttgcgagtacaaaattaccaaatcaatttatctctcttaaattatccctcggtccgtgtacctgtacagcatgtacgtttgtacgtacgtatcatcccaccctacttctttttctatttttttcttttttatttagattagatgaaaaacgaaaataaataattcaagtccattcacaaccattgattttccataaaacatggtggactaattagatttttgttattaaacaattgaaaggcccacgtgtgccacgtcctcccttccatcatgtacatgcgtacttagtacatacatgtatatatcggtccctctacccattcggttccctctctctatgatgtattattagccatcaaatcgtattcacaatggttgtgtagagcctcacacattatatataaaacgttcccaaatgaattatctatcacataatgcaaatatattggagtatacaaacccatcaatttaccatagccttatgtcccatataatccatttattaataaataatgaaaatctataccaatcttacttgcttattgataatttttttttaaaaaaagttgacacatagggtgtaatgatgtcactatttgtcatatcatacatttgaacttaaaataatatttgtataaaataaaacaaaagtgtaaaatgaaccaattctagaaaaccttataatttcttagaaccattgtggttcataactttcccttaaattgagataaccatgcataaccacttcatcatttttaagtgactacatatcaatagacttctctctgttctatgccatagcagaagatagttggctttgaatattatatttcttactattaaatttgggttttaacactcgggttgactaaatgtatttaaacaaatatatagatcacacatattataggaagcgaggtctagaatatatctactctatatttttattgattcatacataagtacgtataaaaaattgcatcaattgtgaaccaattaaaagaaggaataaaacacatttattataaataacctttttgagaattttttttaaataagagcccaaaacatttaattaaaaataaaaacaacaccttactttaatttggattaagacctacgtcttcttaaatgataaagatgattaactttatagataggtgcttatatagatgaatcaaatttacatattgtaaactaacaaatatcttaaaagaaacatttaagcaatgattcatgaatgcccgcgcgaatgcgcgagctaccatcctagttgtgagaataacaatcagtcagtgctggatcggacctgccaacatgttcatattggcgtacaaattaaacggagggggctcagatctggttttcccaaacctcgagctctctactatttgattcaaacaattcgtccggaagattccattaattttagacttaagttccagtatatatgcaaccccatgtccggaagtttcattttaatttcataaactcgaactctctgtcattaaataattcctactaagctggattttctgatctaagcgttgcacaagcgctttcccttttgggttgcctctgcagcttaggagggtgcctgcgaaaatcccattttactgtttgtatatttcaatattatatactccctccgtattttaattttaatgtatgacgccattgactttttaactaacgtttgaccattcgtcttattcaaatttgttatgcaaatacaaaaatacttatgttaggcttaaagaacatttgatgataaatcaagtcacaataaaataaatgataattacataatttttttgaattagacgaaaggtcaaacgtttgttaaaaagttaacggtgtcatacattaaaatacagagggagtaacacttttaatacaatacataaatatcggtaaaacacatatgcatatgcacatgaatacatttggtgataactgaaaaactaaaaaaaaaaaaaccatactctcgtcaacataggggctgattgaaacgctagctactgcagtgctaggctgtggccgtttttagttgctgtcgcctgcacgctgctgtaatagcaagcactaccgaaaacacctattgtgttaggtgaccattgcttattcatggaataagccaaacggcatatttaaaaacgaaaagtaatttatgaataaaacttttatatacgtattcttatcgatttaaaagcaaagtctagcaaataaactttgatgaaaaacctcaaaatcaacttcaaatttaagattgaaaatttaaattttagctgataagtataagtataaacgaaaagatgaggcacttagatttgcaatcatgcttaaacattctaggacgacacatatcctccacgtagggtgcgagcgtccatagcacatgaaaacagtttgacataaaaatacgctgtggacaatggccgtacgtacgtgtacgcagcgatcgatcgatgatgatggatatatactcaccgattaaatcgacgaagttgtagccattgctgaacctgccggtgggctttccccccgggtagtcgatgccattgtgagggaagttggccttgagcagcgagtgcagcaggtagttgttgttccctacgtctgcctgcgagtctccgagcacgtagatcgccgggacagcgccgcgcgcgcacgttaggcagcaagcagccaaacacaggaggacgacgacgacgcagacgccgccggaggacaatgtgcaagaacccatcgtcgctcgctcgctccttcgttcacagcgggtgtgcatgcatgtgtatgctgaagctaagctactagctagcctgccctattgaagctatactacacatagttaatttttcctctgattcccctttactttcggcatgttatttaatttagaacttccctattttgtttggctctagccaagcaagcgctctgcgcggtggcgaagttaatcgattagcggtggcgaagttttacggtgcctaaccatgcatggtttgcttaagagcaagggtcttcgtagttttcttaagagcaggtacattagtcaggcgacactaagtccacgtagatagcaatggtgatatagggaaaagagctaaagagagagaacatgcatgagctggcgcgagcggacgacaattttatcatcgggctgcaacacgcatctctagataaaaacgttggacgtgagagagtgagagaaatgctgctatgcaaaaattgcaacataggatcgatgctgcaattttttaatagtgatgtgaagcatataggacccaacaatacaactagatgttgcgtgtacaagctgcaaagtaagttatagatgagttggacataattggagctaaattaccttattattgatcatgctctaagaattatagatcttgcgaaagtagtacatacatgcaggcactgacacaagagatcatttataatgatcataccgtatgctcagggcgttcacagtgtgccagaagaatttggcctgcctcacgtgccatgggctaaaaccacaccttaaaaaaaattgtctcccacaatgcatgggtctctatgtgtggcttcgtttttttgttttagcccctcatattttctattttagccctttctatttctctattaacaagatggcacctctcccttccctctccatcaccggttcttctcccctccctccctgttgacgacacctctccctcccctccccatcgccgacacctgtggcgatgagtagatcggggtgaccgccgaccagatcggggtagtggcgtagtgcacgggctacgaggtccccacggtggcttgggcctacgccgctgctgagcttcgcccctcggaatccggcggcggctcgtgccgacgaggcctgcaaggctatgtgcctctcctccatcttttgtcttctcttctttctccggttagcggcggctggaaaggtaggcccctcttcccccatctcgctgttgctgccccttttgttctcttaccggagttgggtgaggtacccgcggtggcttgtgggagtgggggtgtgccgtgtgggggccggacagcatcgcaggtccaatgcagactctatcccgtcgctccgcccatcacgcggcctcacctaacacgaggttcgcgcgtcatagtttggtagcacgttcctcgcaggagcgcagcagtggcgagaacgtggcagtccaaatctctgttggcgtctcgagggctgaacgtcacggtgatgcagtgtgaacgccctcacccggggaataatagtgccttgctatttttatagcaaccgcctggatgtctatgggtgagctagagtgttggtgcatccgaatacaccaaaaagtttacagcctagttatttcacattcgacaaaaaaaattggtaaaaatcgtatcaaattttcagccaccgaatgggctatacgatctatgcatgttgtattgggtaaaaatcagaggacattgcgcgaggtgagggtcaaactgacaaccgcaggcagcccccactaagccagcacaacttttgaattttttagggacgtaagtacatgcgaattatattataattacaccataattatatatatatatatttatcgtagttatatttgatatatttttagagggatttttgcgttgaatgttagatcgattatcccaaaaatatcagctatcaaaatatatttttgactcaatatatatattactaataaacgtactataattaactagctaatgaatggccttgagatatacactcaccgagtaagtcgacgaagttgtagccattgctgaacctgccggtgggcttgccccccgggtagtcgacgccattgtgagggtagttggccttgagcagcgacgccggcaggtagttgttgttccctacgtccgcctgcgagtcgcccagcacgtacagcgcctcgactgcgccgcgcgcgcacgtagttaggcagcaagccaaagccatcaggagggccacgcatgactgtttcagtgcgcaccaggaggaagaagaagaagcagccatggccatggctagctagttcacagcgtcagcgtcacggacccacgtactccggtgttttgaatagtcgggtaagacatttagcgatgagtctgctcctatccagatatcgaaaaccctcggctcactcactgtcaccggaggagtggtgaaatgtgaatgaaactgagggcttacatttatagcctgttctaattggtacgcacgaagacgcgctagctagctgtccaaattacctatgccaacttaattataattggaggtgtagtgggctcgtattgatatcctggaaacatgcatgcatggatgctcctgagtcctgattaactgcagacattggcgtactgtcacgtactccctccgtttcaaaatatttgacactgttaactttttagcacatgtttgaccgttcgtcttattcaaaaatttttgtgaaatatgtaaacctatatgtgtacatgaaagtatatttaacaataaagcaaatgatatgaaaagaataaataattacttaaatttttttaataagacgaatggtcaaacacgtacttaaaaaaagtcaacggtgtcaaatattttgaaacgaagggagtaataaccagcacgtacatgcatgtcacgcgttctgatcattattatacgttgtacctaaagaagaaggtgcaacaaaattagactaagataatctttgcatcacatcagcagtactatgagcgagcaaatttaatacaaatggaaagtgctcggatcagcttatctgcacgactaatccggaaatgccctgttcccagcacatgtcgcgaatccatccgtgatccttttgctctcacgattttggaacaaaaaaactatttgtccgtttcacaatgtaagtcattttagttttttccatatttatattggtgctaatgaatctagatagatatatatgtctagattcatcaacatcaatataaatatggaaaatgttagaatgacttacattgtgaaacggagggagtaattaaggttccgaaaatgctatacgtccaaccgacgcgtacgaccagcgcacgactacgtcattggccgtccgccgtccgtaacttctgcaacgatcgctaattcaattgggcttgcgccgtgtatttcgccgttgagtcgtacgctggtcggacgtatagcagcgttgttaaggttcatacattgactttttgaaatgtgggctgttagctagctgtttgctaattataccacgcgtgccataataatacactcaatgatttaataaaattgtgctaattaagggcttaaggctcactgatgatctgcatcttaattactaagcagggccatgtgcgatatgttgactccgataagcattcggttactgagatcaccgccagatcgaggcatgcatgcatgcgatggcagctgatcatagagcatggccaaaattcggaagatggtcatgaagataatgtgttacaccctcgctaattagcttgatggaaacctagctaattagtgtttgccgtggaaattttctaagatactccctttattttaaattgatctatatatagttttttaggttattcctaaattatcattatatttatgtgcattcattaagcctattcgttggagtatttgtgcattaatattggagtaaatggacattgatacatgtatccatgcacacaagtatttataacccacatgcaatatcttgatttgctattgaatagaaaataatgggatggtgtatgcatcgagcttgtttttagagtaaatatagtatgagagagttattagtttttcttggttttggtgtacctatgaaatatgtagatcaatttagaatggagggagggagtaatgtgttacacactcgccgagcgaggattaattgatttgctaggtagttagacggcttgactgccatgttgtcagcttatttactaaatcattcaattaattagttgctcaaaaatacatttcccaaaaaaaacttattccattgtatagtaagaccacttatttcattattttattattttctaaaaatatctaatttatccctataatgaaatatgtaatccacagaaataatccagtcaccaatccattttaaatttatagacttcgatgtaacctatttcttagatcaactatgtacaagatagaaggctagaaacttttgagataatatagcttatcaaaaaaaaacagagagaaagctagcaataatactgtcgacgtttgatgtcgcggttctggtatttacatagtatgaggatcgttgttagtaggatatatgcgagactgaggtaaacgagacggagatagagatttttatataggttcgggtccctgaattatcaggtaataacccaacatcctgttggccgaaaccggtcgttgctctttattcaccataatcacaccagtacaatatttggggtagcctatctaactgttgtcgacatggcggtctgaagttctgactcgtagtcgacaacagggtagtcttccttctcgaatccgtgcccggcgagatcagagatagcgcttccgtctctcctgacagtatccagagacaccgtaggggactagtcgtgcttatccctgaagtcgatatccggcgtcttgtcttggcgtatgttggcttgtatgttgatcttgtgtcttgatctattattccgtagattgtggtgggtgttgattgaggtggtcgtcgattgtccgtgtcccctctcctcctagggggccttgtatttattcccataggtgttcccttgtccaagtagaactaggaaaagcaatatgtatataatccgagcagtccttgtcgtttccatgtagaacactggttgtctttccttatccggaactccctttatatccgaagtcagtttccgtataagacatggtatgtggtgggtcctgccgagatttagtcgactactattaggtatgtggtatccataaccatgacagtagcccccgacttcaatgcaaatgaacgaattcatattctcgaccgctgaccatggagtaactgttatcgagctcaagtgaccgttctcggtgagttcagagataacgttagacttcctttatcagcctcgtgcgggcacctaaagggtttgtcttgagtcaatctccgacgtcaaccaagaaagtacataacatacgactaagtctcccgtcttgctgtaatcgagaatttggattgaagtcaaaaagttttatctcggcgggtacaccatctctttattccgtattccttgtcgagatccagcaaccgttctcgagcgatcgagaaggcgtagagtctgcgacggagccttgtcaacatttgtcgtactcgccttagtcgatcttggtgtagaaccatagagacatggagttttccacaatgtcgaatagaattttccagaaatcaatactcagaaaagaatatcaaatagaaatagcccccgagcaaacgctcaaatggtgacatgttataatttgtatggaaaactaaaaatgaattaaatttaccgaccaatgttttatatatgagcgtcttctctcttaccgactttgatcagtcagtttgtagagtcatacactctccctagcccccagccttgtcgtcggagaatcgttctcggaggacaaggctcttggacccttgacctgccttggttgaacaagcactgatcctagcccccagctgtgaagttggaaaactcaatttccgattacacggcttggttaatacgcacggcgagaactcttatacgaccagatcttacttggtcttttgtctctacaggatccgacaaggccttatcggctctgggcgtccccagccgaagttcccttaggttcctcggaggccttgtcaagacggcgtaaagggacagtaggataggtttcaacactaggtgtcgtcgtggtaagggatctctgggtaaaacacttagcattattgtgtacctgatatcaacttttgttgaggtagaggtaataggagaatcgttacacctctggtcgaggaccaggtagtagccccaactcgaccacttgaagtaaaggtagtgggagaatcactacaccactggtcgaggaccaggtagtagtcgtatcttgaccacttaaagtggaagtagtgggagaaacgctacaccgctggtcgaggaccaggtagtagtcgtaaattgaccactagaagtaaatgtacgagatatcgctacgattaactggttgagaaccagtgagtaggtgtctctcgatcatttggagtcgtggtacgaggaccgctacgctgtcggtcgaagatcagtcgtagctgttcctcaaccatctgaagttaagatgcgagagattgctacgttttactagttcgagaaatagcgagcgagtagaattatctcttgaacaccaatggaagttgcggtgtgagagattgctacgtactggttcgagaaccagcgagcgagtagaattatctctcgaacaccaatggaagttgcggtgtgagagattgctacgtactggttcgagagccagcgagcgagtagaattatctctcgaacaccaatggaagtttccggtgcgagagattgctacgtactggttcgagagccagtgagcgagtagaattatctctcgaacaccaatggaagtttcggtgctagagattgctacgtactggttcgagaactagtgagcgagtagaattatctctcgaacaccaatggaagtttcggtgcgagagattgctacgtactggttcgagaactagtgagcaagtagaattatctctcgaacaccaatggaaattgcggtgcgagagattgctacgtactggttcgagagccagcgagcgagtagaattatctctcgaacaccaatggaagtttgcggtgcgagagattgctacgtactggttcgagaaccagtgagtgagtagaattatctctcgaacaccaatggaagtttcggtgcgagagattgctacgtattggttcgagaaccagggagcaagtagaattatctctcgaacaccaatgaaaattgtggtgcgagagattgctatgtactggttcgagagccagcgagtgagtagaattatctctcgaacaccaatgaaagtttgcggtgcgagagattgctacatactggttggagaaccagtgagcgagtagaattatctctcgaacaccaatggaagtttcggtgcgagagattgctacgtaatgattcgagaaccagggagcgagtagaattatatctcgaacaccaatgtaagttgcggtgcgagagattgctgtgtactggttcgagaaccagcgagcgagtagaattatctctcgaacaccaatggaagtgctagagttgttttattacatgtgtatctcatgtggccagcatgactcacatacccaacttataacatatctggatgtccgttcgcaatcatgtcaggtgatcaagccgacgacgttcgcgaggaattatccgttaacaaccttttctcgagtagtccagccatggccggtgctatgaggtaggtcgtcggtcttcgttggtaggttgggcgcgacaactccgcatttatcgagaatgctctcgatagtgggatgtactcgaccacaacctactcgagtgctcaattgttcctgaaaaatattttctagaaggcaagacatatagcagagaatatcgagtatgtacttaaaaaactgcatgggtcttctagtattatcaggatataacgagcagattaaatatcaatcattatgtaaaccgtaagtaagcatgatttatacataagaaaatagagcgagcccccagcgttaaaccgcagtcgatttaacatcggaaacactcgcacagcagatattgtataaaagacatgctgtaggtaaacataataaattatagatctgacaatatcgtatagattggaaaaagtaggtatgataaattggatataaattattgcgtacctttgtagatacatgccaaatgtatttacgaaattagtagattaatttaaaaaatcaatccactaattaccttgattagcgcgctgatatgttcctgtgtacttgggtaaagtttcgattcgtctctgagtacacgactgtgtatagagtcgctttgacttttccagcgtggcatgtatctggtgtccgtgtgcatgtaggaccaatacaggccgtatacgtacacgatacagatatttggatcaggcgcatatgaaatccaaccgacatacatggatgcatttgtctcggtagaaatcgatatcgcgcatagaggaagtcggccttcgtatgaatccaaggagtacagcgccgtgtagaccttagtctgaatcaaaccaacacgtctgtgcctgcgaggacatccgtcagcttccagaacagtcccatattggatcggtcaccaatgctgccagtatcgttcgtcctccacgacggcgataatttcgatctcgtcggaagacatactccggtcggatttgatcttccccacagtgaagtcgtcgagtagtttattgttggagaattcatctcttgaacccatctcttcaaaatcctgaagcaccaaaatcctcctacttggcgcgccactgtcgatgtttgatgtcgcagttctggtatttgcatagtatggggatcgttggtactaggatatacgcaagactgaggtaaaagagatagagatagagatttttatacaggttcgggcccctgaattgtcaggtaataaccctacaccctgttggccgaagccggtcgttgctctttatttaccataatcacaccagtacaatatttggggtagcctatctaactgttgtcgacatggctgtctaaagttctgactcgtagtcgacaacagggtagtcttcctcctcgaatccgtgcccggcgagatcagagatagcacttccgtctctcctgacagtatccggagacaccgtaggggactagccgtgcttatccctaaagtcgatatccggcgtcttgtcttggcgtatgttggcttgtatgttgatcttgtgtctagatctattgttccgtagattgtggtaggtgttgattgaggtggtcgtcgattgtccgtgtcccctctcctcctagggggccttgtatttatacccataggtgttcccttgtccaagtagaactaggaaaagcaatatggatacaatccgagtagtccttgtcgtttccatgtagaactctggttgtctttccttatccggaactccctccatatccgaagtcagtttccgtataagacgtggtatgtggtgggtcctgccgagatttagttgactactattaggtatgtggtatccataaccatgacaaatacactaagtgaggccagttgttctaaaaaaagtgaggccagttataggtatatttgttggcaactttttgtgccaagtcgacaagcatgatcgcaacacctaaacgccttgcggtgatatggagtcgccaaccacctcgatctagccaaagggccaaatcaagatggatttcgtagaaaaacagctaaaccggctaacggagccgatttagagatcaaaatcagcctctaggccgatttagatcgataagaggataactacccgtctcgtgggcaaaacgggacaaacctacaaagaagtgtcgcactctcgtagcgacggcggacgatttacggcgcaaaccgacaaagatggactaaactagggtaaaatagaaaaacatggtaaaagaacgattcaagtatattgtattcgggggttttacagtgaaccggccttgtcccttaaataagggttggtcttgccctctacaggcccttctccacgcccaactcgggatagaaaccaaaggaaacacgaaacatgccttctcgagcaatgaaacccgagacccgacgacaatagactctgactcggaccctgccggtctgaccgcccacatacttgaggtcagaccggccctactagccggtcagaccgcccacacacctgtgttctgaccgtccctgtgaaggaaacccgtcactttccaaactttggcaattttcccctatttcgtccataggtgccaaatttgggtgtaaacacgtgccccccgcctttttggtgatcatatgtgaacctaaacgcatagaatatgttgtctcagggtgataatccaattaccggccataggacttcctaatcatcttgtcaaatgctcgggaagtatttcttcaagtatttcccattaattgatctctgaaaacaccgtcttgaagtgtcttcatctcgttcaaagtcttcaaacgctcgtgatgacatcttcaaaaattgcttcccatcaaggtcgtataatcttcaaccgacaactcgtcttacttgaaataccgaagagagccaagatttacctcaactggcgaaacggcaatttcaacaatgttttattactcgacttggcttatccattagcctgagagtaagaacttaacaacttaatatcataagattgaccaatgaaatctaaagcccaacctccgaacggctatgatttgataataggattcaatacagcgataggcgctaattgaacattgccgatccgttaacaagcttcactccctctataacatttgaaacaatcatcaattactttcggccaatgaaaccccactctcctaagcaaccaatttatcttacgggccgattgatgaatttcacaaatcccttcatgtactactctcctagcaactttagattgatcattatccaagtaatactacatttatttttcggcgatataatatttgagcgcttgccgccgaatcttccgatcaatcccaagactaggatcattgaaatattctattcaaagtgattctccaatctatttcttacttatgggcacaaatgtccgaattcacaattaatccggtctttaaatcaattgtaacgtgccccccagctctctgcccaggatcggtcagaccagacacgcaatgccggtcagacctcactgtctacccggtcagactggccatgcagagccggtcagaccggccgtgcaatgccggtcagaccacctctgtctatgactttgccaatttcgtccaaacttttgaaatcaagcatcggcctttagtatataatttttcttcacataatagccagatgcttggtgtatcaaattattggaccgaaattccttctctctagacatatgaaaaaatataacatccaactaacatgtctagttgaatactaattcaaatggcttttgaaacaataatcatcatggcatcaaaacacttagccaattcaataatgaatcaccaaagtcatatgcctcacagacatgaattccaataaactacaaatgtaagtaatcggcttgagcatgtatgcaaaatattaacaatgccaatgtttctaaagaaaacaactctagaataaatcatcacattgaccattgacattagccgaattactaataagcaaaacttccatggtacaataattataaaatctatatcttatatggtgatccataaaaacacatacaatttgactttaaataaatatcaaagactcataagccaaatcatacttcaaacaaattatatgccaacctaccaatttcactacttagaactggtatttgcaacatgtatgtataatatcaatttgataagcaaacacatgtgctagatagtaagcaatgttctaacatgacataggtaaataatatgatgatgaacacaataaacccataccttgccttagcatccaacaaaatgcggctcaaagatgtgatgttgtatccatcgctgttcatcttctcttggtttcttcacgagcatagtaatgtcttgccccccaagcaaaatcggctttctcgactgcacgattttgaaggcaagacgaacaccgcaccaacatccatagcatcatgtgaaggagacttatctctaatgaccgatgattcttctctcatcaaattggatttatcactactactatgggaaatcaccggtctcttaacttttacttctttaggtctccatacttgcctaggtgctgtttgaggctctaaattattgcatgtcttgttctccgcatcttcggcctccttttctttttgacctatggcccgaagacgctgtagcctcctcttttgagagcgagataagccataaggtatccacttcggctgtggttgttttccaggagctaagcaatgattcttgatattttttgtcgaagtggaagctcatgtattgctttcaattttcccactcttctctaatgcccctcggtcagaccggcctctaggcccggtcagaccggccataagccgtcggtcagaccggccagtaaggtcggtcaggccggccgtagactggcgattagaccggccagctgtctcggttagaccaccaattttgacagtcacggcgtcggcttcgatctcctttgcttgcgtggtttccaccgcatctccagtaggtacatgaacatcttgagactcctctttgatagcaacgacctccggagttttggcttctttcctcacccacaccttttacacttttttcacctttgatccaccggaccgattcttttgtgggaaacggtcttgtcttgggttagatgaatgatttgacactgtcctaggtgattccttccatccttgataatacggcataggtggttgaggcatccatagcatataatacataaaaggataaccatatagtgacattgaatatggataccatggcatcacaaccggaggtttgtatggagttggtatagttgatggctccgattgctttgatgtttgaccaaatctcttcctacgagatgatcttggtctttttgaatcactaatttgattatcaaatcgctgaccggctaatcctttcttgaacttagcgataagcatctcaaaagtgagcttcggctttttggtcttttgggaactagattgtcgcgaccgagaaaattgccttttcccgaacgctagtgtattaatccccgtcccaggaaaagccggggtacaccacacaaacatgatataaaagacacatctttattatatcgataatatttacattattacaaaggcgcttcaggcctgacaatcaaaaataaacagcagcggactagcgggcctacggctccatcttcacaggcgctcaactggggtataagccaggactccacctaagacttcttctccaaagcttctcttactgaaggggggaaagattgagcaagaatgagtacaaccacagtactcagcaagtcacaccggagatgcataattaatgcaagggggtacaaggggataataatatcggggttaagttttgcagtaaacagcatttaaaagtcacttagttgcccaaagccattttataaaggcgatcctagagctacacagtattattaatcaaggccgtgaacccacacgaacctgccttaacccaaggcctacgatgattcagaccgaactggcaacccgaccctgggtcccagctcgtcccaagccaacccaggccaaccattccacattttagttattaagcaggttttaagaatttaaaacactaacttgggtacattgctaggcttgcccataaccgagggcgcggctattcgaataggttatactctgatcagaggtgtacatctttacccacaagacacgtcttcctcacgtgcaaccacgtgccacataccaccacggcatatggacggaagacatgacatagtttccaacccatcctagccatagacaagagtaccgacccaacctacctacggccggaacccccagacaggcaggcagaattgagcccctagcagcaggacaccagccctgtgccatgacatctcgactaccgggccgcagcccgtgtagccttcatttgtcctagagatgtccatcgacccccggcttcatccatctccatccgtgtacttttgtttataaccagactgagccacaaactaagccttacccactagacatgtggaagtacggtagtgctttgcaacagaggcccgaagaccggtccttaggtggccgaggtgctactaacaaaaccatgcaccccgagcccagcctaaaaccattttgagggttttgaatagagggggaggtatgcatccaattccacaataatctaaccattccataatgtccaagtgatatgaatattcccaaagtctagagttatgaaaccacctaatgttgcctaattaatcagcgaagcatctacctaaattcatactagtggaaccatgaatagagtgcccactagttggggttttgtttattctagggtgaacaaggtaataataacaatagcaataataataaggtcataacaaaggtaaataggcatggctaaataaaacagtgataacgcaggaatttaaataaagcgataatgcattaatttaaatcaaaataattttataaactgggattcaatatgctcaaggatgatgtgacttgccttgctcagagagaacggccttccgaaccttcggcaacgaccgcaaaccacgcttcgggaacctccggaacgacagaagctacgcgaagcacacaagcaaagctacaagcctataaagaagcaataacaatacataaaaagaaagcacacggttctttaggttataacaaacattaggagacttgaacgggtcgattcagagttcgtatgaccaagatatgatcatccgaagtttaatgctgttatatggagatttgcggattattataattaggctttgcaaccataaaacatatgtaagcgctagcctggaaaagacaggaaggctgcgccattgacatgcggaccccacatgtcaacctaaaggaccgcggtagaccgggtacacagagacggtccacgggtcgacggaagcggaccccgtgtgtcaaccgaggcgagtggccgacaaacggactccactagacaccacacgggttgcacacgtggaaaccacgcggctaccgagcggacacactaacacggtcaccacacgcacaagcgaacgactgccgacaccgatacacgggtaccggggccgacaaccgcacaacgggcacgggcgacacctaaaggacgaggacggggcagcgagggagagggatccttaccaccacgcgacgaggcgtgggaacgacaacgacgaacgggcgaggcggagacggacggcgagggaacgacttcggcggcgatccttggacgaaggcgagacgcggccggcacaaggcttgacgacgcggaggcgaggacgaagacgacgacggggctgcagcggcacacttgacggacgcggacgagacggacgagaatggcttgacggagggacgaacgccatgacgaccgggaacgacgagaggacgacgaccggaaccggcgaggaggcgacgagggcagccggcggcagctgcacggagacgaggacggcgcggaacacgccgctgcgatgccgacgacggaggcggcgccgcgagacgacgagccggcgaggatgaacgggcggccgaagggacgtcggcgacgatgaggatggagaggccagcacgggcgacggcgttccggcgaaacaaaggagcagctggaggagaggacaacgcggcgacgtcgatcggtgtaccggcgacgtacaggagccggccggaggcggggagatactggacgccgacgaggaggccactccggcaagcttcgggcgaggaggaggtgatgccggggatgagggcagcgtcgcggagccgagggaggtggcgacgacgacggctgccgcaccgacgagggacagtagccggctggagggagtacagtggcaccaatgccactggttgccggcgggggcaccgttccggcgagtttccggcgaggagacggtgagaccggtgaaggggacggtgttgcagagccgaggaaggcgacggcacggccggacggcgcgcgggcgaggcgggagaggcggctggaggcggccggcggcacgggagagagaggaggacggcggggagaggtggggaggccacgggagagcgcgggagggggctaaaacgagagaacggggcgagggggttccattttataggagaggagagggagccggccatgggggaggtcggaacggcggtggaaaaggcggccggcggccatggaagttggccggagttggcgcgggcgttcccggcgattgggggcacgattcaagggggaaattgggggcaattgaagaggattcaatggggattaaaaccccccaattaatttggaaagagccggcttgaatcgcgtggatttaggggaggaaacgacgctaggtttcacgggagagagaagagagagaggatgccgggcgggaggaggacgacgacctggcgcgtgggccccacgcgggcgcgcggcgtcagcgcgcgtgcgacgcgcgtgcacgcgggaaggaggggcggctcgggcagggggcggcttgggccgggcggccggcccaggaagagaggaggtagatgctgcccgggggatagagggaggaggagggagtgggccgttatggggaggagatgcccaccagactcattgtaatagaggtatgacttggctactttctattacattcatacacacaaagtgtactgtgttccagattagttccacacatgcattgaagattgatggaatttaatgttattaattgactgatttgataagaagatgtgcgtaactatggattctagatcgttaaatgttctgattggttttgaatatcttctttattttcaatgtgaaagttattatatttttttcttacacattttgattatttttttgcgtctcttacgggctgctaatttcttttccatttctcattaaaattattgttcttttctaacacccactaatatttcgattatgacctaatttaacccggaccatagttgtttcttgctttataactaaatatagctgtgagcataaaatttatttttttttttttttggtcaaccaaactgaattattttattatacactacttgttatagcgcttcgttacccataccgggagacgttaacttaccgttttggcattcggctcacacaaaaacccaattttcttctttgtgaccctttcgtgttaacctacatatactccatcccgttttctgtattcacctttcatttatttaatctcttttaccc

SEQ ID NO: 5989 - DNA, 17070 bp, Oryza sativa
  unsure (1)..(17070): unsure at all n locations
cgaagggtagggttgacaccaaaagagaaaacttaagattttctcactaaaatatattttaaaataattggaaaagaataaagaaaaggatccttccttgactttcaagtaacaaaaaatcttaagtctatacttgctataaacagtcatcaacccaataccccgtacataagtgtcctctgggtgtttcaagagacaacccctggtagctaagtcccttacaacaacctgtcctggccatccaaccgggggctaaatacgaaggagaaccctccccaggaaattgcacttagaataatatacacatgcagaggacacccatattgagccgtcaccatcagcggccagcttttgaaccactgtatattaccccaattaatggtatctaataaaataagcaccgtgcttatattactaaatactactctacatccttgcaaccgacatagagcatccgaatactcagacactaaacccacaccaatacacctatctggaaagctagttgcatggatatattgattcaagtatgaagtaaagtcggcactcaagtaatatgaatggaatacccccccccccgcgttttctgaatgaatgatagtacaatcctgcaatctgcatgccttcctcatgcgtcacgcgtgcgtgcatccagcctcatggctcatgcatgcatgcaaattcatggcttaattaccattatattgtgcattattgcatttcactggtgaccgatctcattcttctacgcatagtacttagctagtaactattacattcgtccacacaaagtataaggagttcgagatgagttccacacatgcattaaaaattgatggaattaaatgtgataagttgtgtgattggttaagaagaggtgggtagctagggattctagatggtaaaatgttatgattggttgagaatataataattattttagtttgagaagttattatattttatactaacaaattttgaagagttattgtgttcactaccgagctcctaagtcgaagtccataacacaaaagaattgttgcgctagcctaacgcccacgaagtttcagattagtaccaaattaaacaggacaaaagtgtttcttgtattaataataaatatgcttgaaatctaaaaaaatgatttcttataatagtaatcaaccaaattgaatcatattagagacaacgagagcgatagcgcggcgtgacccagacggcgagacgtcgagctgaccgttgcaccagccgcgcacacacaacgaccgattgccctgctgtgacggcctgccgtctcgccctaacaaacacgccgcgccggtctcgcgtagtcacgttgcatttggtcgaatcttctttcacgcctagcttgacttgttttcttgatttttcctgttttgctactcatccgatatactacctccgttttattaaagtacgacgccgttgacttttatcaacgtttgatcattcttttatttaaaacttttatgcaaacataaccaatatttaattcatgcttaaaaacatttgatgatatattaaatcataataaaataaataataattacatattttttaacaagatgaatggtccaacgtatcttactaagtatacattagtaagtatatattatgtgttgactttttattagagaagttaatagcagtgccacatatttaaaaagaaaacacactatatgaccaaccgttcagcagtgcaggctgaccttaattgattaagtttgctgattctactttctccgacacaaatttattcaggtaaccagttagaaatagctatatttttagacggaaggggcaggtagaaatacgtttctataatatctgttagtggcgtaatttgaattttgtatgttaacaattaacagcaccaggtgtgctaccgttgacgtcgtaccaacggtatatagtcaaccttttatcataggctagctgaacacgtactattggcatacgtacttaacaggacgtgcttaaaataaaggcaacaagactactgctactaattaagtcagcatgttgtctaggcaaattcaaccaagaaggtaacgcatagattttaccagttggctctagttggttcggcactaaatatcttctacagagttttattttttctgaaataaaatatcttccatgaactgtcatggtgtgacatgctacttgtattgacataaataaaaatatattttttccatgcactccttttgtttcttattataatcattttgactattttcttagtcaaaattctttatatttgattaaattagttttattaaatttaacatagaatatattttgatacaaagtttatttttattaaaaatattactatatttttctataaatttatctataaatttagtcactaagaaaaaaaattaaacgacttatatcttctattatatactaaaagtccattaaactttctacaaacgctctcaagctgccatgtggcactcctacaaacactcctagatcgctacatggcacagtctaatctcaccgtcgattttcatttaaattggtggacccattattttataccgttagattagatctatacatgccgtcgattttcagttaatatattatatccatatatatatatatataatacctttctctgtactgtttgtcggaggaatagaacgtatgtacgtacataccacaaccaaaataaagcatacatgcttagtacgactatcaaaaaagcaaatatcactctacaatataaagatatattggcccacaaatatatacatgcaattgaatgattttcgatccattattttatccatatatattatcgatttataaattattggacctgttattttttactattaaatatgtaatacctttctcatgtgcataatgtttgccggaagaaaaaaatatatgcacgtacttaccataagccaaaataaaatataaatacttagtaccatcaaaaaaaaccacggtctttaaaatagaactatcaacgatataaagatgaaatatattacttcacaaatatatagatgcaatgttaaactagatctataatataaatatcaaatcaaccatctttaaatgttcatcttttcaaattatttttaaattatatatccaatttgtgatctacaaaacagtactaagtcttcatgtggcgttcctacaaatacttctagaccgccatgtagtactgtataatctcatagtcgattttcatttaaattagcggacccgttattttagactattagattagatgtatatatatactaaccgtgaaaaaaacataagtacatatacaaacgtacgttagattgaaaaagaaataaagcttcggtactactattcgcagcaagaaaaactattatatactaaacgttcattaaactttctattaatattcctaagtcgccatatgacgctgctataagtgctcctaggccatcacatggtactgtataatctcaccatcgattttcatttaaattggtggacccgttatttaccctctaacgtggcatacaaatggccgagttgagtgggcccagtgtgtcataggactctatgaaagggttatagtaaattagacattaaaattgtgcttcgggctgatcttgaggggacacaactacccaattttcaaggtaatagagaaagaaagtctctacggctatgaccggcttcacccgttagtgatatttttagaatatttatatgtggatttggaaataagtgagacataaacacttagctaagtagtgtattaataatatattaggcttattttattatgcgcaatttcatgtattggtagttagcgagcttttaaaatagtgataatgagttgttacgataataggaaaatttatatgtaatcgggacaaagtgtttttaattctgggagacattcttataatttaactatattgaagtctacgatctatctcacgacgtagaaatggtgagatatgacttcttttagcactatttcataaaacaataaataaaaagcccgcgcaccgtgcgggcttccttcctagttataaaataaagggagtaattttattttcttttctaaattcgttgagaaccaatgacaaaatgttgattgatgcacgttggctacttgttgatgattccatacagcttgtaatcaatttctgtacgtgttcatccgacgttgcttgtacgctcaagatatgtttatttccttggttgttatacctataaaaatatatagacacatataaattttaaggttcacgcaatagttggatgtacactataatgaactatagtttgtagtttctccatatattcgtgtgcacttagatttcaacctactaggtgaagccacaccatagtattgccttctctattttgttaattttggtttttggtagctataaatttaggtggagacaaattatattttttaaagataactggagacatattacctaatgaatgataggtcaagcacatcatatgagatatcagatatctagccaaagggtttttccgatatgtccttttcagcctggccataactttttcccccaagaaagtgaaatggaaattgtccgttggcgaagccaatcaattgagaacaaatttggtgtcattctctacttcactttcgtgggtcagattaccatacgtgtacgtccttaattattctacatttgaggatcggatttaggcgatttacctatttgatgttgacaagctggttattattgttctaaaaaatgttgtggttaattaatttggaattttattttatcattctttagtttggctacaacactgttttctttaatttatctcttgcaagcttgctggattgaccttctatgtataggttatgtgccatatggtggagctccaataggctagaggcataagtttctcatgaattagtccataaaagatatgtaagtttcgattttggaaggggacctctacattattgacgagaaaaaaaagaagggtgtgagaggacaactagcaaacagcttttttaaaaaagtcagaaaaacaagaaatatatatatgtgcattagcaattacaattttcaacttgtacatacgtacgttctacacagcttagcccttacatactaaccaccagggttcaaatttttattttggctattttctatcaggtactgaaataatttgaattttaataaaatttggtcacatttaaacaaaatttgccaaattcacaaaaaatggaaaaaagggtggaatagttttggttttgggggggggggggggggaggggggcgatagacccaaaattttgaaaatttcagtccgtaattttgaacctgcttattacatatatagtacgttaatttaatcatgttattacaagcttcccgatccttgtgtatccgatcataaattaatttatcacttggtcatttttgatatgaatggtgcattgcagctgagaaccttgggttggcgacatctccaccgtacctcgccatatcgtcaagcagcagtgctaactacgtgaatggcgtcaactttgcttcaggtggcgccggagttttcaactctacaaacaaggtagttctaattagtttcaactcgtacacgtaattgcaataacaaacttttctcatagattaccaggacgtaggattatatgtatgcatgttagtcgtcaacgcactatatataaagttcattttttttaaaaaaataatacaaatggtttacatatttctgtcgacagtgatatagtcaatttgttttcaacttgttttagagttgaaaattggttttaattacttgtgttaaacattaatgcaggatcagtgcatcagcttcgacaagcagatcgagtactactccaaggtgcaggcgtcgctggtgcagagcctcggcgaggcccaggcggcgagccacctggcgaaatccctcttcgccatcaccatcggcagcaacgacatcatcggctacgtcaggtccagcgccgccgccaaggccaccaaccctatggagcagttcgtcgacgccctcatccagtcgctcaccggccagctacaggtgaggatcgaggtcaccgatcgacagataattaaatcgatcatcaaatgatcaatttcatggtgttacgttctaatggtgttcgatcgattgtgttcagaggctgtacgacctcggggcgcgcagggtgctgttcctggggacggggccggtgggctgctgcccgtcgctgcgggagctgagcgccgacaggggctgcagcggcgaggccaacgacgcgtcggcgcggtacaacgcggcggcggcgtcgctgctgcgcgggatggccgagcggcgcgcgggcctccgctacgcggtgttcgactccagcgcggcgctgctccggtacatcgagcggccggcggcgtacgggttcgcggaggcgcgggcggcgtgctgcggcctcggggacatgaacgccaagatcggctgcaccccggtcagcttctactgcgccaaccggacgggctacgtgttctgggacttctaccacccgaccgaggccaccgcgcggatgctcaccgccgtcgcgttcgacggctcgccgccgctcgtcttccccgtgaacattaggcagctcgctgctatgtaggcttcatctcatcttcacggtgtactgatcgatcgagctgcttgtgagattccacttttttcaagcttcaagtacagccatagaaatatactactatataccatgtaaagtatactagtgtatttacttacgattggtacatatagcggtagaatcatataatatagcaaattcataataagtgattgttgaagttcatcagaaattcacctggaattggggtcggaatcataacaagtgattattgaagattgtcagacagctatagtacttaccaagacgagaagatttgtggtgcagcaatttttctttcagggatactagcgctcaaaacgtggcaggaaaaattcactttagattccgcatagagtaaattgcactagcggtacttaaacttgtaacgatgtttcacttaggtccacgaacttgcaaagcgcacatcgagatccctaaatttgatttattgtatcatcccggtccaaagccgcgtttgaccgtggtcttgcctacttggcacgccacgtagacgatgacatggcacaaattttaattttcctttttttctccccatcttttctctccttcctcacctcgtatggtcggaggggacgcggggcaggagcggcgcgggcgtgctcgggcgccggccgacgggaggagaggagcggcgcgcgtgcgcggccagcggccggcgagaaaggagcggcgcgcgggtgtcggctggcgggaggagagaagccgctgcagcggggcggcagggcgagctcgtgctcaacggtgtaagctcgacggcgacaacggccatgtgagggctactgccggagtggtggggcgaagaggccgaggcgcgcacggggggtggtgtcgccagccgctcccgggggaggggtcgccgaccgcggccgcgcgtgcggggggaggcgtcggcgggcccgagctcgacgacggcagcggggcggtggggcgagctcgagctgggcaacgcgagctcgacggcgacaatggccatgtgggggccaccgccggagtggtgggacgaagaggagggcggcacgtcattcatgcggaagcggctgaggtgcgcgaggggggaggtgtcgccggggcagccaaagcctcgttgacgggagggagggaggacgacggtgattgggggaggacacgccgcgcggcgcctcccagccgcgtgtcccttcctcctttcctcccctcggcgtcgcctcctagctgcgcgtggccaagccactgcgccgcaccaccttcctcctgagctgtgccgcctccctcccgtgcgcgcgcccggccgtgctgccgcgctcagccaccgccccgctgcctcatgccacgcccgccctgggcagcctcctctcccacaccgagctcccctcccttatcccaccgctgcccctctcccggcgctgtgccaagctgcgccgcgccgacacgccgctgtcgcctcagccgcgtcgtcgcgtgccggctgcctcgcacgcgacagcccgcgccgacgccgctgccccgagctcccccgtgccggcctctcccttccatcgccgccgcccgtttccgctcgagccaagacgacgccgccgccgagttttcctctcctctcgatagccgccagctcctctctcctgcaccgccgccaggtcgccgaccccggccacaacctcctcgcaccggtcgtcaaccgcctctccccgcctctctcctgcgccgccgccaggtcgccgaccccgcccacggcctcctcgcaccggtctcgctggctccctctctccctttgcctgccacagatgcatctagaggtggaggaaggagagaaaaaaaaggaaaattaaaatttgtgccatgtcatcgttcatgtggcgtgccacgtaggcaagaccacggtcaaacgcggctttagaccgggatgatacaataaactaagtttagggatttcgatatgcgctttgcaagttcgttgacctaagtgaaacctcgttacaagtttaaggaccgctagtgcaatttactcttccgcatataacggttgagtttggatagtgcccctcatcttctaaaaccactttaaatatatagtcccgccatatgcacactatatttcttctctatggattacatgtacgttgacccacttttttttgttgttgttgttttatcgtataagtttcacatagacgccacattagataaagaacaaatcaatatggcacgttgaaaccgtcttcgttgggactacatttcctctgttcggtaaagataaggattgcgttagtacattgtttcgcggttgagagactcgatcgaaactcaaccttagatgagagaccggcagtgaactttttccaaacgtggttcgtggcccatcaaaattccaggattccagcttatgttgggccttccagatctgcgtcgttgggccatatgggccagcgtgcttgttcgtccaagcacaccgccccacggcccaccgtccgattcacacgtctagtagttccccaggccaagctaccggtgctgccggcggcggcggcggcggcgggcgccggaagcacgaacggcgaacggctaaggcacctgcctctcgggactcggggaccagcggcagaatcttctccgggcggcccttttctcttgccccagtggcctctgctgcaaactccgcacaaatgccgcgccccgctgagcctcccagttctcgccgccggcgatatgtgtaggtaaaattatttagaatgagttaattttttttggttatgcgcaaatccacaattaatctacatttgagctaactagttgctccatagtttctttgctgagctggagattggatgcagtattgttgccattcagatctcttggtcgagtttgaacctagaactgggcctataaggctataatttgttactgcagctattatacttctatacgttatatgcatttcaggtttgtgactagcctgattcaatccaaagccttgactttaactatctttttttttaaagaatacgtagaaggtttgcatgccatttcttatagcgataagagaaaaggaaccaggctgctatgagtgtccaaatagtaccaattacaccactcaggaaccactacacataatgcagctgttttctccgcaaaaggtaaataatagttggttgtttaattcacacaatcacaccacatgacccatgagagacggtaaaatatatatgtagctaatatggtatgagctcctcacctgtaaagcatgacgttgattaggtgattattacttataggttgcagtgttctttctaatttttataccaaattaagctatctattcatcctcttcgctactgtcatcactgccgtactgaatttcctcatcttctgactgctcatggtcttgctcatcgttgtcctctccattgtcatcttcgtacaaaagcccaaactcctctctgtgctcgtcctcacttgcatcattcaattcattcagagcttgttgctcttcataccaagcatctttagactcatgtaactgagagaagggacattaattattataaataaaaaattcagaaaaaggaactaagaaaataaacagtggtcctagtactgcaaatgcactaataaaacttaaagcataaagtatttgtacgtagatggtgatagagatctatacctggcattgctggtgcgaaatttggacttccaaccagtctgctagcaatgggcactttgtgatggtaagtcgctgaagctgtgttgacagtggtttatcagatggtagctgcagataaggacatctatgtatcttcaaaaatttgagtgacccaaggctgctaagacccattatagagtgaagacgtgggcaaacactgataaccaagacttcgagcaatgggtgattctgattgtcaagtaaaaggtgctcgatgctccgtgacagtaacactttcagtgatctgagatgcggaaagtgcaaatcattcagaatttgttcatttatcttgctcttcaagaccaaagtagtgaggtttggaatagctggtagactagcaagtttgctgcaatccttgataactaactttgtgagggaggaagatagctcctgtgggaggtacctcaactcgtggctatccttgatttttagcaggcggagtgaaggaaagtcatcctgaccaacttgagaccactcaacccatttcaacatttcttgaaactccagctcctcaacagctgggaatgcctttgtggtgatgtttccacggaactcctgtcgcacatgctccacatctgtcatgcactccatagagagtatgcggaggcgtggcaattccccaagtggaggaaggaacttgcagctttgctgacataggattatctttgccaagtgcatgaaggtagaagccccaaaccagctaggatatttgtatccactataattgactacctccaattcttcgatgttcttgtgcggccgtaggctctcaaagatctcttcctcatgctctgggtctggggtagccacatcattttggctgctaggatgactgcagttgttggggcaaacaccatcagaccagtctaatctcaggatttgcaattggttcttactgactaaattagctgtctgagcatcatcaacatttataaccctccgtagtcctgtaatacataactctccatgtatgttcaccagatggtgtagctcggcaacattggaatgccaacctccgcttccaatgctaaaccttggcaatgtctgtagcctttttagcccacctatcccacatggcatgcaaagtggggaccaaagatccaaattgagatggcggaggttgaccagtttttttatgccttgtgggagctctctaaggctgtccgttcttgcatccaagaccctcagattgtagaggtcactaattgattctgggatagtggtaattcgtgtttggaaaaagctaagatatctgagtagtttcaattctcctattgaatcaggtacttgtgcaagtgcagtatgactgaaatccaatgcacgaagttgtttaagattttgccatgtttcggtaggaattttaacattgatgctactagaaaacaacttactggaacatcttcgattatcttgtgcattgacaaccttaaggattcttatacctccaggtatcgtcacagaatttagtgctacatctgtatgatcagaagaactgacaaccaatgacaagtagcggaagtttccaatggtttcatgcaaatattgagtatttattctcaagaaatctcctccagaaacaaaatgtaccagatcatggataagatcatgtgtgacaaagcattccagtttttcatcagattctgctcgttgaatcattgccctctgaattaaatcatcgaagtacatcctgccaatgttttcatggcgcccagtacaatattgcttgaggagtcccaaacacatccagagatttatcatgtcttctttccagaaatagtaccccttagggagcagtgaaaggaaaacaaagcagcgcttcaattgtactggcattcgatcatagctgagttttagtgctggcagcactcgatcctcttccgcaggtaagccccattgatcactctctgagacatctttccatgtctcttcatttgtctcaccgcgaagagaggatcctattgccttaattgccaatggtaggcctccacattttcccacaattttcctaccaaatccttcgaactgttgatccatatgttgatctataaatccaaaggccatctgcttgaacaactgccatgattcttcagaagttaggaagctaagatcataagaaggcattgttcctatcatttttgaaatagtttcatcgcgtgttgttaataagatcattcccaactgagcacccaccaacagggaaagcaaagcatcccagatttccttctgcacattccacacattgtcaagaactagaaagaacttcatgtcttgtacttgcgccgttatcatattttggagattacccatatcttctatatcacatggattcctagtgaacgacatgataatttttcttgcaattgccttaacatcaaaatgaccctcagaaacatccacccagccctttagttgaaagtacctgctgactctttcatcattgtacaccatttgagcaagagttgtcttacccaaaccccccatgccaacaatagaaacaacagacatatttgcttgagcagcttcatcggaaattaatatttcgatgatgttttccttgtcttcttctctaccaactatgtcaaaatcacctacatgcggggttgtagatatcttgatgtcataggcctcctctcttattggtgcgtcactctcattgagttggagatcatcccatgcctttgtgatctcattgaatttttctaaaattttcctcacccttgctgccaaatcatctggaacaggaactttgataggggatggttcaggttcctgtacatgcactaatattattataatccaaaggcatgtagtatactgtgtactaacaagagttaaataaaacacacatatgtacatgctcctttatggacccctttttgctcctctactatcccaatacttttatatggctatgtcaatggttgcttatgcatgatatgcagattgctcatgtattattgagagaaacaaattgcttgggagcttatctttttatacaagaaactttgagaggaggcctctgcaatttggaagctttatttcatcaaagaagaaacacagactattttttctgataaaccaaatgtagcattggttatagctaggataaggggataatattaccttcttgtcacctttgcgcttgcgcttgcgacttctgctgctctgcctttgattgctttggtcctccatcctccgtcgaagcaactcatacctgtattcatcgacagcatcctgggcatcatatgcaagctgctgcagctcccacaggcgaagtctctcggcttcatctcttatattgtgttcatccatcgcatcgagggtccgctgaatccttgccatcgtcctctgcagatctcttagatctctgaacgaagcactttgctcgtcagatgatgatgaaacgatttgaggagaaaccaaggaagaaagcttgtttgttgtccactttatgattccagatgctagtagtccagccatctcttctcaactgctctttctgatccaaagacagagttagaccaagctgagagatgaatcagattaacaaggcaagaggaacatatagaagttcagggtgttgaccttgtggacaagtgcaatgcaatttttaatgcacaagctgtggtttccaacctccttacaacaagaggcatatattggttttcaaccaattcctgttattatgtttccaacctccttacaacaagaggcatatattggttttcaaccaattcctgttattatagtgtcaaaactgcataactgcgcacacagtaccactagctgaaatgcattatctgctctttttttttttgcggggaaatgcattgtctgcgtggacacatcatttcagaatatcaatgtaatgctcagaactattcttgtatggtgacatgcattttctgtgtccctaatctagtctgtaaagggccactatagaaccattttctgtggttcatatgctctgtagaaccatgaattgctttatattgccaagccctgttgagaacagcatagttcaatctatagaatcacttaattagaacaccgcgcaaggaatcttatagttaaaccagaaaaaaaaatctctagtccaattgtagtttgttttataaagagaaattgttgtcccttcatctacctggtatatactccaaaactattttcgctgtaagtgttcagttttgcaaacgtacactagcagctgcacattttgctaaatatgagggcaggtctatcctacttttctccttccctgttactagtttaaaaataaaatttagatatgtggcatttcatgttaaacattgcttccaactcgtacaattttgcacaggagaaaaaccaatgaactgatagtaaccgaagaggcaaaatttagggaaacagcattcctctaacaaggtgagcataaaacatcaaaaccagtttcagattttgttccttctatcaaggatacgagactgttacagtgtgttcgcatggtcggactggaccacgtgcccatggacatagataggatcaaagtatacttatgcaaaaaaataatagagtaataataagtatctttagttaactcttatgatttttttttctttcactgatcaggaggactatcttccatagggcagaccgccacttcagccacacattatcccaaaaacaaatttatgtatagacaaggacaaacttctttgacatcacaacatcagaaagcggcaataaatatgcaaggctataaaaatgtttgacgttgagctaacaaacatatcaaattttacaaaattataatggcatggttctaatttttccctatttattttctaagtagcatttggttcaatcaagctaaccaggatataaaaatcaattcagatccctaagaattgcctcccaacttcaactgcggttacacgagtagttcttgttttaatcataccctaatccccagcatcttactccagacaatagcaatttgcaaccacatatggacaagtttgtacacaaacattgagtgcgtgcaaatgatgcaacatttaataaaactatcaaaatacccatgttttgtctaggtgtcagtgctttttttgaactatttcgtcccggtgaaaaacatcacacccgcatgacccgatatcgacactaaatgaaaaaagctcacccaacgagtcaccgagagattttttttgaaacaaacgctctcaatccattccaatatgtccaagtctcatgttacggtgctttttgaactaattcgtttcggtgaaaaacattgtacccactgttgatgtgaaaatacggcagcctgggagatctgcttaactctagtgtaggtccaaggctagcctcaagtgtctcaagggcgtgccaactgatttgatcctgcaatcagcaataaagaataaaagcagaatcaattgactgatagccaattggccgataggctaatagcgtattgttgatggtctcagcattgtcgtggcgtggtagctcctggaaccttcgcatgatcatgttcacgcggggtgtggtgctggcgtggcatgtaccatcgtccactcccatgtaagggtagaaggttgacaacgccagaccatttttcatgacgtactggaaagcgttcaaggcgaggccccctgcgcagcctttgctccttggatggcaatccacgagctcctgctctgacaggagcaccgggttgtcgtagtttgcccctgcatgcgatgacgcggtggctctccagcgcgcccgtcatggcgaacgcccagcaagagccgtagcacccccatgaacatgactggaccaaggcacggctggccttcgcaggtcttgttgcgccaattgatggagacagggagcggtagggtcccgttgccatcgtgccttttcacgggccaaaacgcgaggttgctctgcttcgtcatcatgtgacacatgtcgcgactgagtgcttcgtcggtggcttcggcgaagatgttgagacctggagcttggcttgcaactcaaagaagagaggcaacgcggtgcatcatctcgttgaatgctactaacggcggagcttctcgacgatcttgcgtgctacattgtggccaagtgatagggcggccggactgtgttgcttgcctcctttcatagaaggtgcagagagcgagcgagccaggtaggcaagtagccaaccagcagtgctgtcgaaacatgaattcggcaataataaaacggggtagcgcacgagacctaaaagtggatggatgcggagacaaggatttagacaggttcaggccctctcaatgagaggtaataccctactcctctttgtggatttgaatccgccgagtgtagtatagatctgacgatctaattgtctcataccccctagaaggcctcctgcccaccttatataggatggggggtaggattacaagatagaaaccttatccaatacggtatcggtttcctaaatctactttacaatcttatcaaaccaggactttaggccgttccgtaatatacaagaaaacgtaatacccaagtcatgatctgttacagatttcatatatataagttatcccttataactagttggataaccatgccgtgtgggtatggggtacccataatctncacagtagcccctgagaccttcacagtcgaaaagataatctctcttcgactagattactncaaagccgag

SEQ ID NO: 5990 - DNA, 55130 bp, Oryza sativa
ccccccccccccctctctctcaatgggattttacactgagtaggtaaaacgagttactcgttgattggtatcatgtctaggcgtttttcccccatttcatttgaaggcaagtaggcaacttctagacacaccacgcccatagaaaaaaatttctaggcgcgtcttgaaactttattttagttttatgaataggttgagcaaaattaatgcatccaaaaaagaagcatagccaatatagctacccataaaaaaggatagaattgaaaagatatgcatagccattatagctacccctaaaaaaggataggaacgaaaatatagatatgctcagatgcatcaaattaatcactacatcatctcattgaaggatctttttaagcaaattaagtttatgatatatagatccatgtgtgtataagttaaataatctctattgatttcttaaaagccatcttacttttattccatgagaacaaatgaaatttctctctagattaatatatatatactctgtccgtaaaaaaaatgcaactctatcattcaaattttgggggaaaaattcaaattatatagtactacttttcctctaactactcttatcaaatttctctccacctttaccccaatggcccaatcacccattattttacgagggacatccaagtcatttttcctacactactattttactcccctccggttccataatttgatgttttaaccaaggttgaggttaaattttataactttgactaacaataactttatatatatatatatatatatatatgtcttacaaataactataataaaagtgaaaatgtatttatttattatatatattataataaaaatatagtcaaagatatattttagataccgtattattgtctaaaacgttaagaattatagaactagagggaatgtaaaaaaaaatgctgcaattgcattgtttttctactccttttgggacaaaaggagaagatgcaaatcatttttggtcacacttcttcttcttttttttcggcaatggcaagaattggccattgccaattttttgtaccaaaaagttggctagacatttgcttaccttttttttttaccaaagttggctagacattttcatttgctttgctaccaaaagttggctgacattcacttgctttgcaataccattttttttctacaaatcaaacacatgactattttttttgtcattgccaaaaattggcaattaaatatttataaaattcaaaacaatattaataagtcaatgattacagctccacttaaaaattttcacacttttatttcaccagagaataattgcattcacatagacatacttgtatgttgttcacctttaggcactgattgttttacttaaaaacttcattataaaatgagtaaataatattaatccaagccaaacaagatatatctatcacctcccaagtttaggagaattaattgaagaatgaaaatagtgaaccataacgtcaacggataatttcttacctagaaataaagtgcatccacgtataactctcagcaccctcccataaaaccaacccctccagccaccttctccttcaccaatgcgcctagccgtcttccttagctcctctttggactcatccgtttccaccagatccccacgttccttgcaatcgattgatggagcctatgggaatcctgaagtgcccttccagcttgaagctctccgttgctgttcctggtcatgccctcaaccccttctctggtaagttcataatgcaaccaaacacgcgcaaaacattaatttcattttatcgccatgccaccaaaattgttgtatgggtgaatttttgcatgtgtatatgcagatggcggtagtggtagtggtagtggtagtggtagtgggtgcaacaacaataacacaagagaactgggtatccacttggacttggaccgcccgtatgcaagagaagagctaccgcagcaaggtggcagcatggaggtgcagaaaggggaggagagaggcggtgttaggcacaatagctccaaccataggcggctttctagggtgcaatccaagcaacttgatgaattttatcgtgtaaatcacacagttgattccgtaagcatgtttcttttttcaatatttaaaatcaccacagcctttcgagttattagttcattaatatttgaaatatagtagattaggaattagatctatatgtgaagaatggatttagaaaccattagatcaagcaagttaaactttatcactagtattttgtacaaccatatgcatgtgcttgaatttttcatcgaatatttgttttgatagatcacacgttactacacactagtcaccaatatatgtaaagcagaggttattattgtgaatattataaatattaaaaaataataatacaccaaatattggttatttgaattttgttaatatatatattttttttcaaagttctaagtattttttatttatagttcaaaagaaattagttgcaatatgatatataaggtccatcctaaataagaaatcttatgttattttccattttcttaagttgagaattttaagtttctattcagtattgtattaatctttactcgtataaaaggactccaatggatagccatatataaccattgtaacttttagatattaagctatgaactttctaatattagataacaactaatcggatagccatatataaaattaaatcaagatgagtcttctctatatgaaaatgtgaataacataagtcttctctacacgaaaatgtgaataacataagtcctatctatatgagaatgtgaataacatatttcatgaaaaatatgcttttatttattttagaaaataatatggtattttttttccttttacctatagcaaagcatgggtatttagctagtttaacagagattcagaattgataagcatcaaactgcatatgttaagagatttcaattgtagatttttcacgatttaaaataattcaagactttataaataacttatatcaacttatactttgttttgagtctctatatatcatttttatgattagaattatgaaattagaaattgataaggaagatgtttatcaatttatagccccaattatatcttttcagtaatctaataagaaattagaattaagcaatattgaatcgtacatggtttgggagcctcgattataacttatacatgattctactcagtttttgagagttatagctttttcatgatttaataattttaaaagttcacagttaattaatatcgagttgtgttcgctttggagtcttaattatagcgtgcttttccataagtttgattgactgccatgataattcaatccaccccacccaatcaccatttttttcctagttaagatcaaagctctctcaaagtctccaattaaaacaagtatagacagatttagttaacttcttattttgcaatacaaggatacaactggtgtttgtctttgtattgctacaatgctatactagagttcatgatgcttgcttgtactgaactaaacacaggtcgagcagttcgtacttgccttgaccgttttttttttttcaaataattagtagctcgattgttcattgtcaatggagaccagtcacttacgctctaggaaattaatggaacattttcagaaacaaaagaaggagttggcagatcgactgaatcttcggataagtcaggtggatgcttggttccgcaaccgcaggttaaggtaattagaagttttttcaatgctctcactaattagaatgttcagtcatactcattctttcttacatatatgcgtaattctagttctggttttctcttgttctgaaggttaagcttatatcacctttaacaaaaagagagataaatctctttgtttttctttaacgtgataaatctagattgagccgtgcaatggtctagacttccattctaaactctgaaccttttattttaaaaactcatgtctgaaccattgcacagctctacgccgtgtaatccttagatcctctaccataatgttactatctttacagtcattattatgtgggtctcacctttctattaccccacatgtcggtgtctgtagaggatgtgaacccaatgattccagtaagaaagcccttactagttttcacaaacagcagtacaaatcagttagcagtgtagaacaagttcagagttcatcatccgccccagtgactgttatgctattactagtaatacctttcagattaatcttcacaaacctacagtaagtgtgatgttgctactacctgctcaggtcgaagcagaaatccacggagatggagtgcgcctatctgaaggaatgcttcaacaaactgaaagaggagaaccaccgcctccagctccaggttgagcagctcaggtcaacgagcttgcagctgcagctgcagctgcaactccacagcgagcgagtcgccacagctcccactggacagcaagccggcacttctgcggctgctcgcatcttcactttgcctttgtccggatacaacccttccagggggacttggttctcgccaaatgcacactgatcatgtgctcatgccaagaacacaagagggatgctacaagattcgtcgctgtcatgatcaactgataaaaaaaacctgataagtcacagccatcttgtaggacattgatgaagaatgagcttgggaagattagcgtcgatgggaattggatactgtttacctttttttttttcaccgggccggcgtggccaagaatttagtgctttatttcttttgaaacctgtcgttcttcgtcgttgatcatgagggctgactattgctagatcagcttcagtttagcctgtcattgtttttgctttgaacaatcattagccagtcatgtttttgttttatctctctcttgaccgacagattttgtggttctgcttgcctcggaaaagaacaaacatttttggttaatctctgaacaactgaacgttcagtactacgagtcaacttttatatactctgctggagtatctatactttctataaagttataacccactatctctaaagcttaacatgcaaccatgccacatcatcacccactaacaataattacatattcaacctcatgcaagcatgaaagagcatctgcaatctatttaattctacaaattaacatgcaaagcatattcaatcaccacctctcacatcatttccccaatagttttacaaatctctttatcatttttatattatttaatatatacttatcaacatgttctacattaaagtgcgaatatcatttgtttcatggtaaatattgataagccctaagatttgattatttttttttctttttactcctagctgaattgtaacgaaaaaataatattgaaaattacttagtaattcccgaagcaaagcgcggggaatccctagttacaaaaatcctctgttgagagtcgagactacaaatggccaaaaaaaaaaaaaggtctgcaaggatcgaatcagaagaacacggaaagagatatgtgcagtgaacaactaaaacattgattcagctcagtcaaaaaaaaaacattgattcagctgttgttttcgcttaagttattccattggtccagcagtcggcaacaatcagatggtaagctcttcaaatctaccgctctcagccaaggagttccattgagcaatgctaagttagcagctgcaactgcacgaacagttcacacatgatcagaaatgatttacagtcatctaagaaaaaagtgaattacaatttgtttagactaatcaagcgtaagcgtaggtacatacgttagaacatgtgtcgtccatccacggttctgcaccatccggatctttgccatgtgtaagattttgtactaccgttcctgatcagttcatagtagcccaagaataatatagtagaccaaggtgatggggagagctattagcatgccaaatatgaccctgaaagcgatgaaaatgttgatacattcagaatcttgaaggcttgaacagtttgcagtcatgtaatacttgcaattttcagggtaactctgctgacttacaaagtgcaaaggatggtagcgtggaggttgtattccttagcgaacacaaatggcacaattccttgtggcagggcggcctaacaaacattcagtgcattcgtaatcagcgtcttgatttggctcaccgtttaaacccaaccaaaaatacaaggcagtttcagagatcatcgagacatcgactcacctgaacaatggcgatacgcaagagcgtgcctcggatgccgacggcggcggacgcggcggccatgatggcggggccgaagaagaagcggacgcccatgctggccgccgcgacggagtagccgcaggcgatgatcttcggctgcgtggccatgaacaatcctgaacggaaggttcagtttagagatctgcacttctctgaaccaaatacagtactagaacagatggtgatggaactgaactcacctaagctaaacatggccatgcctaaccctgcatcggagagaatggagattgatttggctactatgattggcatcgtgatgtggaacctgcaccaatgcgaaattgcccattacagcatcaacgctgaactgacaaacaatcagaaattctgaatccaatttccagcgaactgatcgaccaggtgagcttgctttaccggaacgcgatgagcgaccaggtgaggccgatgaggctggcgtacgtgttggggttccggatcagccggcgccaaaccgtagtgaggatgagccgcagcatcacgccggccggcgcgttctgctgccctctcgcccgctccgcgcccgctgcgccgccgcccttcgtcgtcgtagtcaccgccgtcgtctgctgctccgtcttggcgccggcctccagcttcgctagctcgtcctgcccgcccacggccttgttgaagctcgccgcgcgctccccgcccgtcgctcccggcggcggtcggataactgaggaacataatgtaaggtgtttgttggattgatcaagaggaggttggagactgacctctcgacgaggcaatggatggcgcgtcggaggggacaagccggcgcgtctcccggccgctgcggaacaccggcaggccggtgacctccgacgcggcggaagcgccggagctccactcgatcatgtgcgtgtccttgaggtcattggtgggagccacggtcgcggatgctctggcccgcgccgccgcgtgctcgtcgaagctggacggcctcggggtgtgctgcctcgacgaagagtgcagcgagaagaggtccgcggcgccgaagctggacgcgcgcagcgcgctgttgggcggctggtgaccagggatgtcggcgagggtgaaggtggagcccctcggggtggcgttccgcgacgagctgatcgagtagatctccacgccggtcaggttcgacgcgcgcggcgtggcggcggcggcggcggaccgcctcgacaccgacgagcggcacacgaccatgcgcagcctcccgtcgggcgccacctcggcgtgcgcctccgcctggctgccctcgagcgacaccacgtccgggtcgacgtgcacggcggcgatggacgccgcggtgtccgggaactgcgccgcgatgagcacccgcgcggcgcggaactcgaagaggaagagcaggagcgtgtaccagacgatggactggagcacgacgatctggaccatgaggtcgccggagtaagggccgtacatggagacgaggagcgggatccccatgacgagcgtgttggggagggtggagacggagaagagcgtgatggagcagtcgagcggcggccacgccggggggacgaagcgcgcggggaagcgcgaccacgcggcgagcgcggcgaggacgagcaccttctgcagggtgtcggcggcgacgaagcggaggttcatggcgtaggggtcgctggaggagatgaagtggaaggagaggagcgggacggcgatgacggcgacgaagcggttgatgccggagcactgctccggcgtgaggacgccccaccaccgcacggagccgtacgccaccatcatcgccacgtacagcggcaccaccgccgacagcaccatgtacagctcgtgccacgatatcatggcggcggcggccgatcgccggtctgggagcagctgatcgatctgtttcctgcgatgcgatcgagaggagcagcgtgcgattagtgtgttgctgttacatgcagagagtgagtattgcggcgcgcgatgccgcgatgggatataaaagtacgctgtcccgggctcccggcctcctgcgcgctttgactggttctcttcgaggtatgtccgtatgtgacacaaattttgctctggtggagaactccacggagcaactgaacctcgtggcactgcttcaaaaaaaaaaaaaaactcgtggcacagatatggctacgtagccaaatctagtaatctcgaaataagtttatttttttattcttttttgtctttaaataatttgtttttagcaattattatatcgaagtttataaaagtatgacataattaattgtattgtatgtagatgaagaaattaataattatattgaaatttgataaattagatgtattataggtttttattagtacgtgcgagatagatgaaaatgaaatttattttaaggctgtgtttagtttacacttaagtttggaagttaagttaaaattggtacgatgtgatagaaaagttacgtgtgtataaaaaatttgatgtgatgaaaagttgaaagtttgaaaaaaaaaactttgaaactaaacagggccttagacggagggattggcagtagacacggctagtgtacacattttgcaatgaatttttccgaagaaaaaccactgtagatgtgtcagtccagtcgtctgtagatggtctagtggccgttatgtgtgctgtcacgtcaggccggcggggtgcacctcgaaatgccgtgcaattttggatggactcatggcatgcgaggcattgtcagtgtggctggtacagcccgtgcagatgcagctgatccgatggcctcgcaggctggcaggctcttttcaggcagcagtgcagcaccggcctagtatgcagtctccaaatcccacgaggccgcaagaaggcagcccgcaaactcggcccatacaaatgctgaactagttatcggcccaagagcagtaaaacgcttctttcagcgcttccggcccaggagcctcaaatcacacctcagactcgaacatgaattgggtcgcgctaccaactgcgctttgctctacacttactcctatcaaagcaagaccctcactttggcatcgcagatttgcggcgtcacatggctgccgcggcttggcttctctccgttgtgtcgcacacgaagagtgccgctccgtactttctacttgcagtagaaatcaatctgatccgtagatctagttatatccaaaggctcagatctttttatactccacctcaatttatagtactagaagtgtggagggtcattattgtccaaagaaaaataagcgctcatgggtaaaatagtactttcatccttttcttttaaccctacccccctctacgttgccggccgctcgccctcccctcgatcaaccggcgtcgcgccgccgcctcgcttccgccgccaccgccactgcctctgccgcttcacttctcgtctggacgacgccggcctcctcccccaatcgcagccgccgccgctcgcttctcctctggagtctggacaaactcctcgttcccacgtgtccccatcgttccccgtccctgctgcctcctctcgtccccgatcccagtccccagaggcgtcaatcggaaggagctcgagggcggcgccgactccgcgtgcaagacctgcacgatccaccagcgcccaagcttcgtcctctcagtctcctgcgccgttcgtccttccgtccccgccatcgctgcctcaggtcatccctgccgtggccgagcggcggtggttgggcaaaatggtggcagatccgcgactagatgccggtgaggaggttgcggatcagccttctttcatcccatcacacaggaggtaacgacgtaacgtcctgttctttcatttactctcatgcagatcagtttttgccccattccgtgttgaatggtgtggttgaatgttttgttctcaattatcagaaattagaggcaaaccagatgcaaagcgaggtccaaggagtgcaaagcaaggtccaaaggagtgctgtcccatattacctttgtgcgttctttgatgttggcttgaaatctgggataaagttgtaatctttgtacataagttgggaccttgaattatattgtgcaattttagaagtcatgattttatctgacttcaaccgtgctttacatgcttgctcatgccttctttgatgtttggctcgaaattgggataaaattgtactttataagtcaaggggcatccggctgggcagagacagataaccatggagcgggaatcaaacaaacacaattttccatactgaagatttttcacataaattgcaaattatactttaatttagttataccataacaattgataagtcaaggggcaccagcagcatcgacagttcacgatgaacagcaacatagctgaagccatcatcaataataaagaccaccgccaataaatctgacaccctattattttactgaggactcagagagagacgttaattagtgccagtcaggggctctgggctaccggcggaactacaagggcatatgaatcggagaaaaagaaatcgcgtcaaaacatgatatatagatcgaaaaaggattaatagatggaaaaaaaaactacagtggaacgcgttgaaaaaaagaaatctcgtgaaaacatgataatatatggaaacgggataatagatcggcctaagatgtggtggccgcgtcgtgcctgatgcaatcaagccaaaattacccctaatcagtccctgccaaaattatccttaatatgtattagaagattactaatctacccttcaaaataaacggtcaagattaattctagttgtagtataatactacaagtaaattgcaccggagcattggtcgcacacgaaaggaaatctcgcaaagcaatttaacgggacgagtagacgagcgaggcgagaccgcgagagcaacgggacgagacggagagagacctcctcatcagacactcgcatcgcggcccaggcagcggctgtgcacggctgctctttatcgaggaccgtgaaaagggggcgaaagctgtatgtatctaggagtagcgtagtggaggcgattggcgatgataatacaatgatggggttcatcccaaagtatacaatctacgactagtacaccgtagtctacgtactggagtactagtatactactacaactaccaggagcaaaaacagcagaaaatttctgagggggtgtttagatggggctaaaactttttagcccatgtcacatcggatgtttggacgctaatttagagtattaaatatggactaataaaaaaactaatttcataaatgagagctaatccgcaagacggattttttaagcctaattaatccataattatcaaaagtttactgtagcatcacattgtcaaaatcatagcgtaattagactcaaaagattcgtcacgcgaattagtctaagcttatagaatatgttttataattagtgtatatttaatactctaaattagtgtccaaacatccgatgtgacagggacttaagaataagtccctggaaaccaaacagccactcagagctggggtctgtacgtgttgccgtgttgtaagcaaaattgttgctttccggcgtttccgcattgatttgcagctgccgccgctgcttctgcggatctactggcaccggtgcagatggctggagtagcctgtactagggtgttggggatagctgtagagaaatgcatgggaggcaaggctctgcaatctgtgccatcggttgcctcgggatgacaaataaaatgcgactagccattgcgtgcctagcctacctcctcccctctcgtcttccccacaagcccacaagagagggaccgcatctcatctcatgtccttgctcgtttttcagactttcaatcactgcatactccaacctcaatctactccttcactagtgtcattcactcactgattactgctttgcaaaaacactttgattagtagcagtactgctagtactagtgttgtacacttgtactgtgctcctttgcctttgcattccggagtgaaatgttaaagtgttcaccaaggtttctcgtgaattttttccaccgttttcttgcattcgtttcagttttgactacgcacatctgctagtaggagtagtagtacggaagtaactagccctacactgactaatgtgtcggtgacttcatgatccacaatccacatcatatcatttgatggaactgaaattaatctaagtactctcgagagagacagcatcaaagattcaagaacatgacaccacgccagtgtggtctggatcctcgatgcctctggtcgggtgctaattaatcactgcggaaataaaaacctgaagcatgtctgttccatccctttttcatcaccgtctttgggcgtggtttagttctcaaatttttcttcaaactttcaatttttccatcacattaaaaattctgtacacacgtaaactttcaacttttccgtcacattgttacaatttcaattaaacttttaattttgacgtgaactaaacacacccttgatagagtgacaaatagtaaattctcccattgcattacacagctgaatggagtatgccagcatctcgtttgcagtttgcttcggtctcgtttagttccaaacttccttcaaacttttaacttttccatcacatcaaaacttttctacacacataaacttctaattttttcgttacatcgttcaaatttcaaccaaacttctaattcattgtttttctcaacatcctagtgaccttaattcaggcctttggcacgatgactgtgcaccggtattgctgaatagatgtacttccgtccgattgtatattccgtattgctatattttggatggagtatcgtaccaaaagaaaactctagtacagggcccacagtaaagcatttgcgagtcttttgagagaggggaaaaaaaactagaaaactgtcattctgctgtgtttagaattcgtcattggttccataccatttgtttagtttttttctccaaatttgtagttacatacaaatgttagccttttgattaaaaaaaagagaaagaaatgagagtcgtgtaaattttggtgttgttggtagaaaagaacggtaaaccaacacttagcctatgctcagttaaacaacgatggataagctgaagccagatgaactaagtaatcaagaataatttacgaataaaacgtttatatcttaaaatccaaaggcaagaaaatagcgcgccaattaactaacacacacgtatttgatcacccccacaccattttataatacggatcataccagaataattttattttattttttatttgatgtggcataatttaggtcttcttttttttttctcgcacattagatgccacacatgattcttcctgcactctaaacgtcatggcaaaggacaaaaactactgggaaagaaaattaaagagtttctttattgattattacaataaacgcagtaatgtaccactattctaccacttgcatttagaaaccacaccagagagtacttgatttgccagagcactaatccttcatctatagagtcattacagtctgacagcagcatgactctcttatcaccacgagtccatgacctaacactatgcataatcaacactaaaccaccatgaacattcatctaaagtctaaacagcaacttcctaatccatttccagtgatgatgagatgacatgggcaaagaacaaggaacagagagagaaaaaaaaatcagacatggctccgttaaacccggaggaggtagacactgagctcaggaccgccactgttgctgttgctgctggtgcttgtgctgtccgggttcatcatgtagaatgcctccgagtcgcgcgagcccaccacccgctcgaaccgcgcgcgcatgtacatgacgtcgccctcgccgccgccgcagctggcggcgggtatgacgccggcgcccatggacaccggctccagcgcgcgcagcacgcgccagtcggcggcgccgcactcgcggcgcaccgcgtagccgcagctcttgccgttgcagtacgcgcgccacaccgtctcctcgagcagcctcttcccgccgcccgtcgcggtgggcagggcgggggcggggccgcccttggcgcgctcgcactcgagcgcgatgcgcacaaggcccgaggccatctcgcgcaccagcgcggcggtgggcgcggcgagctccagcagcagcgccgggcacgcgcgcgggtcgagctggaacgcgaggtgcacgtggccgcgccggtggccgtagagcgtgccggtgagccgcgcgccgaggccgacctgccggtgccgccccgtcacggccgccgccagcgccgagcgcaggcgcgacacggccgtgcggaccttcctacgctgcggcggatgctgctgctgaggatgctgctgccgcggcggcttcttgggaggagaaacgaagtcctcagaatggaaactcggacagacagaggagaacgccattgtcgcctcatcctcctcctcttcagcttccgagctcttcatgtaatcctcctcccctctcgtggcgccatggctgtagctcttgccaagaaccggccacttgaaatgcctcctagagaaggagagggaatcatgggggtttcttgctgtgatggttctcatagcttgagttagccaagcctagcttcttagcagcaagcaaagcaaagcaaagaggcaaagagcacactgctccttcactgagctagcgttgtgcttgtgcagctgggttgtgtgagaagaggttgtattcagaaaatgtgtgtgcagctgaactgtgcttgtatatgtgtgtagtatgctttacttctagtgttatctgtccctgcagaagcaggcttttgtagtgaaggagtggctggtgagcagaacacaccaaaaccgagcgaacaaaaagaagagagagagctagcgatggagagtgtgctgctggggttgggttcttgtgaactttctctttgtttttttctaatgaggaaatggtaggcaggaatgcaggctgcggcggtgggacaaggctagagagatttatggcagataagataattgagaactgagaagagagtgacaggagagaaggcgtacctggttttgatggtttggcttttatcagtggtggggaactggggattaattagtgtgctagtgattatctgagtggatgatgatgcactgatgaggttgcagtgaagtgtagtaattatatttcgatgttatggttaacagacgaattgggtatgatctctgaaaaacagagaacaggttagaaaaagctacctaacaatcatgattcttaatgtatatgatactttggaaatggccattagttcccaacaaacttagacgacatgagtgcagcaccgcaccacatttgcattccctgtgatgtcaacggcttctgcaattggattgggctccgttcctaatcagcaatctttcaatactcgtcatgaatgacatatagctcaaaactataattaggaatctttcatcttttctttgcacaagctgaaatgatacaacccacaagtaagattcttccttaaaatacacaaaacacatggacatgcagctttgtctaaccgtactgcctcaagcaacgaacacgatcacaaagctacaagtaaactcgaatgccgaatggtagtatagtacattgatattcatcagagaatgttaaatgtaccaaccatttcagagtttcagagttctttttcttaagccctgtttagatcctccaaaatggcaaaagttttgccattttgaagtactttttgccattttggatctaaacactagtaacaaaacttggcaatttggcaattggcatttgctagtccatagtagcaaattgtgccaaaaagtgctttgggaccgctccctctttctttctctctctcactttagtgctagaatggaaaaagtttaggatgcatctaaataccaactagtacttttgcaataccaaaacttttgccatttgccatttgttatttcaaatggatctaaacagggccttaatcttcagagaatgcacattttacctctctcacaaaccggttcattccgatcatgcaacacattgcttttctgtgtttggttctttctttcaaatcgatcgctgcacagatccaaactaaagcgcgaaggctgcagggttcagaggagaaagacgagaggaggcaaagaaaagaggagaggagaggctggctgctgaaccagcacagtttttgctttcctcgggatcggtggcaatgcaaagcggggcccaaaggggggtaaaatccaaagcgaaagctgcagctttgaccgcggagggggccgaccgaccggtgccgacggcgacggtgcgtggcgacggaagcagcgccctgcagcgccggagtggccgggtccaggtgacgacgcgacacaccgtactagcgacctcatcgtcgtcgtcgtcgtccccggctagtgccagtgctacaacatgctaccgctaggagagagagagagacacacacacaggccacagctactctacatctgtctcctctcgagcttagtactgttgctggtctggtcttatggcctctgcctctcttgagaagatcaaatcacgcttaaattcacctcttctccttcgttcctagctgtagcatgttgctgttcctgtggtctccacagcagggtttctcaaatcgccggggctagggttaccgcaccccagcggtaagcacggttaccgcgcgataaccgtaaaaaccatgcaaaattcatcaaaaattcaaattattttttaagtttatttgaatttaagaaggttatcgtggtttttctactaccgtatcctgggataagaccggtaaccgtgctggtaatgtaaaccctgctccacagctcgcaggcgcagctcagggctcaggagagacgagggagggggaaaggaattttcaacgtgttccaaaggcatgttcattgttcaaacctagtttgtccggttcagcattaacaaatcttctgaagcgcagcttaattgtgcatgcacatttagcaacaggtcaatgtggcctggaacctatccgtatgcagccctatcacaagtagatactatcacattaggatgcaagatcaataataagatgcccgtgagcaccaaagctaaacgaagaaatttatttgactgcacggcagatcaaatacgttaaacaacttctgtgaaaaaaaggtaaacaactgatacctcttcagaagggactaattcggtgtgccagctttatttgccactcagaaaccagccggcctgggataggtgccaatgcatccttctcacgtgcatctgcatcatcagcatggataacagaaataacgtcttcaaccagtttgtccctgccaccccttagtggatcctacaacggaacgatatgttagggttccccagcaaatttgtgcacagagggccatcctgaatcctggtgtaactattccagccttcatattcaaaatgactaacctgtaaaaatacatcagtatgtgttttcccttcatagagtagtaacttggctttagcaccagcttgtttaaggacacccgcaaaagtttcactgcatatgtgatatacggagttaaagagttcttagcagcttgaacatacaacatgaatggattaacttgtatagaaagatggatcaaataacggtgtaacacctaggtagtgtttggttgcaaggatgggatggggcaaacccacttttaggggtgtttggtttagtggtgagtgaggggtaggtccatggagaggaatattcctcttagatccgggaccaagccatccagcaaaatcggtcggacgagcttgtcccacctgggacgagcgcacagcgtgagttgcgccacttcaccgcgcgtcgtgtgcatcgccgtcgggagcagctatagctggcggcgatggcgggctgtcaccacgcgccctgacctcctcctctgcctggaggccggtccaagccacgcaccccccccccccgacctcctcgccgcatccgcgctgccgaatcaggttgcctagaggtcgggggccaccggatctggcctccttgaggtcggggcttgccggaaccagccgcgcctccgacctcgtcgccgtggaccgatgcctctagctccggccaccacgtccacatcgtcattgtctccgatgtcgcgccgctcctccttccgcccgcgccgccgatcaccgctccttcctctgcaagctgcgagctgcgagaccttttctcgctgggagtaacgtggtgcaaacgctgttcatcacatccctaccccatcccttctaccaaacaaaaaattgggatcattccatcctataaaccaaacaagcaagtaggatcactccatccctaaaatcagggattgtgtcatcccatcccacatagtcccaaaaccaaacacgcgcctacagaatgtagaagcatataaaaatagaagtgagaaattaataagtaataggcagtgtttgcctacaataatatgtccagaaagacagcttgtatggaacttgacgttttaatttgacgcatatatcttgtaaaagagaggaaccccaaaacaacataacagaaaagataatcaaacctagtagagaattattaattcccctggaaataaaatataattatacctagcagaaaatggtatagaataatcatccgttccatgcaaaagcacaatctgaggaagaagagctattgtttcaggacataatttcttggcaacagtttctggagagaaatgtggcaatgatttctttccctccattatgctgaaaaggcatttcataagttcctgagttttgtatagttctaattaagaattaaggaaagtagaagcaacacttccatatcaaaagtacagttacactgttacctgagaaatattgaacggtaaagaccacgttcatggaaatgatcaaccaaattttcaatgttgtatctgcaaacagcaatttgagcaatgagaatatatgtcatgtaaacatagaatcactagctctgattatttagtatctcattacacattctgttgcatccaaatgccaaagtgagactgcagaagttggttcaaaattctaaaaggcaccatatgttttctcagctactaaaacacttcatgaggtacaaatctaaaacaagcactcaaaacaccaaatggtagatatctattgctttttagcaggactagccccagtttcacaacatcggagtttataagtcaatcatcatgtaaactaaacaattgccaaaatccgactttcttcacaatcaaaatcagactaacacaggagtagaatcaatagaagatcacttaaatgaacacataaagaaatcatgcgatgttgccatgatagcaggtttagtgttttatattagaccaaaacgtgcatggtatagaaaactaatcaagactcaggagaagcaattctttaataatgatgataaccatacagacatataatcaatcaaaattagatgataaagctatcccaccctccagacaaaccaaagtatgcttttatttgagtaacactccatgaaatctgctctcccctagattctttagccgcttgttccaaaagagcgcatgctgcgatatgtgctcctgctgattgacccattaagtatatcctgcaggatttaacacgatgaatggtaagtctttcactaaaatcatcagtaaaaaaatacaaagcaagaataatggaaaactacgaaattattaggatgcatgggaataatacagtcatcagttccagaaatgaatgtggttaagtctagatgcaagtataacatatactgtgcattttagctttccattcaataagacacatatttctatatcttacacaatttatgtcggaacagaagcatgcccagaaaaccttttaaaaaaacttctatgtgcttgtcctcattcaataaccaccagcatggacttcaaatataatcattcaaatcatgtacattgttcattcaagaaaaccgtttagaaaaacttcatgtatacatgaaactttttttcagtagtaactttattagggtgttgtgatttgataaagtatcacttactgattaggatctcctccataggcaccaacagtctcacaaacaaatgaaatcccatcagaagcatcgctaaccatgtcacttattgttccttgaggaaaattcctgcaaaacatatgcttttatatatcatcaagcaagcaaaaagaaatcgatcaatcagtaaattcttatcagtaaaaaaaaatctaccaaaaaagaattataagaatcatatatgaggaatccatgcaaagtatgagcacctgtaatcaatgcatgcaactataattcctcgctctgctaacctccttccaagaagagcaccccacgccttgtaactagatataactgaggtcatcaaaagggcaaatcatggcagaagacccttataatacatcatcagaagaattttactcacccaatgatccatgcaccaccagtaacaaatgcaacaactggactgggttttttggggtctcttggtatgtaaagatccaacctgtatagtgtgaaattgagtctctagcaaagtccaaaatcagattcttccgtttatatagcagatagtttctatacctatttcttggttgatccccatagatcacgctcctcaaaacttgtcttgaaaagaaataataatacccaactggcaatcaataaataataaattagttggtagatgtacaatcatggccatgctttcaattccgtaaaaagggaaccaagaagagctaatttgccagaacacttattggtacaatcataacattgactaaccatcatgttcaacatagaaatctgtaataaaaggtaaggtcaacgaggccaaaggtaaacatgattttcttttttttatctacctcttatgaaaccgggcataagtaaaattgcatatattatgagggcagcgagctgagaaatccaccggtagcctaccctggaaaaatagaaagaacatcagggacatctatacagcaaagatgaaaatatattgtatatgcatttggattttttttttttggagattttggtgggaagataacgcaatgtatattaggcgttttgaagcatgacttcacaagataataaaattcagttcatcagtgctagagttagcttgccatccaagtgaattagttgaaaatgcaaggtgctttgatgcaacaatctgttttaacaatggggatttcctaatttcttataggtcattattggtatgtccgtgaggaggagtgagaccaaagacgacgagggcgtgttgccgaatggcgatcggtacagtatcagattacgttacccgaggtatcggaggaggatgaaggcgaggcgcgtgacgaggtacgtctcggcggcggcatggctgacgtcctcccggaacgtggacctcctctcgccgcccccgcggctgccgggggcgagcggagagtcgggggagaagggcacggaacgccggcgcacgaggacctggggggcaccgcgtggaggtaccgcctccgccacggggcccgcgtcaccggagaccggactcgcgggctgcattgcggggcggacgacgacgacgatgctagctcctggtggcgagggatttggggttgccgcattggtggggtgggtggagatggagggggcgtggaggccattggaggggaggggagcggagacgccggagaggtcgcccaaattaggaggaggcggagcgcgcgcggcgcgacggcgagcggaggaggtggaattggaggaggccatggggacgcgtgcgtggccggcgaactcgtcaattcaagcgggctgttgttgggctgagaggccacggcccatcacgagatggcctgacgaggccactgtaagtagtgggccgggcaacgcgcaatggctcgacaatgtttcagcttcgcaagtggtacagtgagccgaacgatagataagttaatatattttttttaagaaacactacaactacacgcgcgcgtaacatgggtactctcgtctcgttcctataaactataagcatcttaaaaaaactagatcgatatatcttaaaattaatagagtcatcatagacgtctcgctgtcgatgtgtacgtatggatacttagtcataaacataagcagctgtatcaagtttagaacttaaaattggttgggttatttccaccataagtaacataaccagttgagatacacaacttcacaaattaatcaaaaattgtattatctccgttctaaaatataacaatttttatatatgtatatggacatatgcttgtcttttttaagggaaaaccagcatgagagtgtgccttttaattaaatatagcgggagaaaaatacacccctaagagcaaagaaaaggcaagtgcccaaaaaaacaggggggctgctatataacggaatcccattttcgaacgggatgatcccgagtaggtatcaggtgtgatacctatcaggtatcagacgattctacacaacaggatgatcccgagtaggtatcaggtgtgatacctatcaggtatcaaacaattctacacacgtttcaggtgatacctacaagtatcatgtgatacttatcaggtatcatgcgattttctaccacgtatcgcgtgatactcgcaaggtatcatgtgaaacctgtcaggtatcaaatgatttcaaccacgtatcgtgtgatacttacgaggtatcatgcgatgtctgtcatgtatcagacgatttctaccacgtatcgtgtgatactcgcgaggtatcaaacgatttctaccatgtatcacgtgatacttgtgaggtatcggatgatacctaccaggtattaggtgattccctactagatatagctgggcatcccgtttggggaggagcaacccgacacgcgcggtcgccccctgcagccatcccttgtagacgaggacggcgacggcggcggcagaggacgggcgcggtgacggcggcggtagcgggggacgggcgcggcggcggtgggggatgggcgcggcggcgacgtgtcacgccccgaactagtcctgagcggaactagcccgtgacgctccaaattaacctgttaaccgataccagtcccaggaaacagtgctagtatcacaggaagacagaatatcacagcaacagaggtctctttattatagagtaggagtacagtcatgttgggctgcggacagatctcgagctcacaactgcattacaaaagggaacggaagccagacttggaccaaacatcacaagcgcgacttgggaactaggccgaaaccctaaaactcatcgtagccggcttgctcctggaagaactcctcgtcagcgggatccgcttcatctttttcagcaactgggggggattatttatatagagcaagggtgagtactttcgtactcagcaagccagggaaacttaggtggttaatgcaggcttcaagggaaggctgttgtttttgcaattgattttatttgagctcttttctgaaacaactaagggagtgcttctcaaacgacacgggtgagacagtgcgtctcgtccggtcggagtatgtgcaatgtatcagtcttttgaattgattaagattggctcccggccaacagcttttaaacggcctcccggacctggctgatcccatcagccgcagattttccaaacatcaaacccattccacaacagcaaatttcacaaggcagtagtcaaacaaaactacgctaggaatcacctcacatccgcccatgaccgtgggcacggctgttcgaacagttttaacaacctctgcagagggggtacactttacccacacgacattactaacccggatcatccagttcgtgcagaatggccacgactagagaccttaaggctttcatgacaaggcatttcgaaagccgacacaggttcgccatatgccaacgagaggggtcccagaccaacaccagattaggtcccagaccatactgtgccaggaagcccaggggtcctccccgacaccaccccggcgaatccacatgtctcttagcatcatggctcccccgataagctagttactcagccaggggtgtcccattccacccatgtggtcgtacttgtcttatgttcggatgaaattccaaggaaacggtccttaagtgcaagagcgggaaaccgtacacccggtacgttccccggtccgcggttttggaaattcatttagttcgcaagcaccgacccaggtgtcgggttttccaagtcttttgtaaaacccaagttttacccaagatgtttctcagattttaagtttgaaggcgaccatcgatacccgtgcagagtgcacgattaccgaggcgcgactaggtgggtacaagggagcatggtataacaattacaatgggagggtcaaatacaacaaattaggtaggtctgccaatctgccttgcagacgggacaagcagattaagtgcgatcctatcaatgcataatatttttcaagcaacataattaagttcaaatataggctcaagatgttcaaaggtggcttgcctcgctcgagatcttgagcttgatcctcgaaatcctcgcactgcgggtcttcgggctccaaaactacacgcgaaacggaacaactcagcaaacggtgaaaataaagccctattattgacctctaagcgtgccattagatagatctcgagatttgaggaattttggaagttgaacggagtcaaacggacttacggttgggaagatattgaatttctaagattattggattttggtctaaaggaaaagggtttatttaaatcctttttgaaaaagaaaagaaaagaaaataaggagggagggaaattagactttcctcgggcggctagggcacggcccgagagaaaggggcggctcggccgagcttaatgggccggccggcccaagaaggtggcccaaagcgcgcgcgcgggcggggaggggagagagagggccggtgggccgtgtccatcccgcgtggtcccgagtgggacccgcttgtcggcgactcggctcaccgtgagcgaggtgcacgcggggcgtgctagggtttggggagggaggcgcggcgcatgcgcgcggttcgcggaggacgcggtgcggtgggcccacgcgcagcctcacggctcgcggtggaccgcgcgcgcgagggggcagagggaagcggcggaccggggtctgcttgacccggtcgcggccaaggtggcgccgacgtggcgcctacgtggctgccacgcgggtcggcgggaggtagacgacgacgccggccggaacggacggcggacgacagcggcgagcggcggagcgaaccacggcgatacaggcgaaagcgagcacaccgggaagttgcacaggacgaggggagacgagccaacggctcggattcgccgggggatgctcgacggcggtggattgcggtggcggcaaccggcggcgggagaagggggaaacggcgatggcgcgacgggagaccgattcgggtgagctagagcatctacgcgactccgggagtccgttgctagcgtcggattgggcggagctacgccgagcgaggccggcgacgagcgggtgctacggagcacgggcggcgacggcggcaacggtcggggcggcgccagctagctacggggaggctactcgtgctactacccgagtctaaggggaggagatggaacgaggagggagaacggagggaggcactaccgtgcgggggtgatggggcgcagtgacgagaggccgacggcgcgggagtgatctctccggcctcgggccggggaagaggaagaagacgagtgcccggagtccccttccgcgtccacgaatgcaccggctctcccggtgcttggcgatgaacggcggaggcgagacagaggggcggcaatggcgcggtggcggcaagcgaaacgggaggaggaatcgatgggagggcgccttggtttataggacgacgatgtcggtttggaaaccgaccttgggcggtcaaggcgcgagctggcgctcggagctcgcggccaaaacggcgacagaggcggaggatgacgccggcgggaggaaaaagggaaaaagagggagagaaaaggggggcttgcccccttgccactttggggaaaaggaggagggagagagggcgatgcggcagagggggggaagctctgcctccatcccttggaagcacgcgcgaggaggggcggggccaaggcgatgacgacgacgatgacggccgggcgatttggagcggggcgacgacacgggcggcaggcgcggcaggcgctgacggcggcggcgactggccggtcggccaccatggcgcgcgcgcgcgggaagcaacgggcggcgcggcggttctggcgacgtcggcgggaaacgacagcgagggcggagggcgctcggctcggcgcggctcacgcgcacgcgtgcgcagcgcacgggcagagcgagagagagagagagagccggggagggaggggaagatgggccgagagggattcggcccatcgaacccgagggaggcgaaatagacttttgcggagggatttgatttgggaaggatttggattcgggattgaactcaacgatagatcggggatttgagatctgagatggcacagacactagacaacaagcaaataaacggatttcgcaaatagggtttttaagagatagttttcccgctaggcgccacgacggaacgggcgctacatgacggcggcggcgtcgacgggggatgggcgcgacggcggcggcggcggaggcgacgggggacgggcgccgcagcggcgggggacggtggcggcggcgagtgagtgtttggataagaatcgcgttgcgaagaggagctatcccgttgggggacggtatcccgttgggggacggtatcccgtcccctagcattcccgaaaaaacaatacactatacaaggtgtggtataagctcacgcaggcctgccaaagcccacacactgccttcttcctttattttcacgagaagatacgacgttatggtctccttgtgctaaaaatatccatcggtttcactcctaccatattttccaaatgataaggaggatcaacgtatgcaattccttcttagggttgccagtcgttgtggctagtttcttccaccggttttaaacaactaaacggtctcttggtgtcgaggctcaagctactggtaacccacccaagcagttataaggctctaaattcttttagcgtactgcacttggtgataccgataaggtgtaaggccgcttcatcccctctctagtgaagagggtatcatctattgttctggcagttcctggtcgtaagtctatcagagatccatatcatacagtaagaaattattatattttgagaaagagcgagtacacatttaggtgtatggtcgtagctcgccacgctagaacaacatttatcctaaaaatgggagaagaatcatcagctagctaggtgacgcgaagtgtttatatttggtcgcggcaaggcaacggcatccgccgccgtgggcgggctggcttaatttgcgccgttgcgcgtgcgcgtacgtgtaatccgtcgtgagtgcgcccatctcgaacggttgacacctagcctggcgagtgcccccgcgcacggcacggcgcgacaaaaaccgaggtgatatgcatggcgacgaaggctgtcacgggctggaaattgcgatgcgcgcgcggcgcgtcggcgaggccggtgcgcgcatcgaccgagttgctagcatcagcagcacaaaaggcggatcgcgacttcgcgatcgagctagcatgcgtgtaccctatccatttctcgatgagatcgacaaaacataatgcaattaacctgcgcacgtacacgcaacaccagctgatcaaaatttgtttcagatttacaaatggtgaaacgtacgaacaagatggtgaagaaattaattcatcaaaatttgtacacatttaggcgttacacatggtcatagctacgctagaaaaacttagtcgttgtgtcctaaaaatggaagaagaatcaacagctaagctagagacgcgggcaaggttggttgcgtggttaggtcggtcaggcgacgccgaggaagtcaagcgcggacttggccatgacggcggcgaactccttgaagctgatgaccccgtcgccgtcggtgtcggcgtcgcgcatcatccgcgtgagctcctcgaaggtgagcggctggccgaggcgcgccatggagcgggcgagctcggcggcggagatgaagccgttgccgtcgcggtcgaacgcccggaacacctcgagcagctgcgcctggtccaccaggtgcgtctgcgtggtgagcaccggcgcgatcgccgccgccagctcgtcgaactccaccgacccgttgccgttggcgtccatcccggcgagcagcgcgtgcacctcgtcgcccgtggggcgcagccccagcgaccgcagcagcgccgccagctccagctgcgtcaggctgccgtcgccgttcatgtcgaaccgccggaacagctcccggagctgcttcagctggctcccccgcagctgctgcggagccggtgctgcttctgacctcctcgccgccattgttgtcatatctcgatgtacgtgtgttttcttttctcttgtggatctgtgacctctcgcggtggtggttgtggtggaggagacgagagggaggcgactttttatttatcgaggggaagacgcgttggagagttgggactgactgggtcggtgcgtgcatgcatggaaggaggcaaatgccggggtgggtgcgcataaaaaacggaggatttgtgggttttttccctttgtgttttcggttgcacctgtgaggttagctgcagccggtactgcgaggatttttaccgtacgtgttcagttacaagtgagatctatgcgcgttaaattggttacgtcttcacccgccctgcacactgtagaatctagtaatagttttgcatcaacacaccacatgtaccggtgttctcgttgtaaaaatcatccatgcatacagtacgcacctttgataaaatgttgcgtgatctgtatatgtggcattgaatttggactgaacccaatgcattgtttgtgttatggaatattatcttctggaatataagatctattttgttttttaccaatccaaatcgtaatagagacaaatctcctcctatgacccatatttatagaggcagggtaaaacatataagattgacctgtactgacatatcagatctatgataaagagagagtttgtaatgtccttgagatcaaagagaatgacgcatgtgttttatatctctcatgtcttaatactgcgggagggatagggaatggtgatctgctaatagacatgttagtttataacagtttgtacccatcatatcctgatatccatataccgcgtccgcgtgacaagttgacagccctgaacttgaagacttgtaacgccattcgtcttttgactacctttgtagtaggaaggatgatccacactccacaggaagtcaaagatttccggtcagttgttacactgtctaactatctgcaccagctccagctacaactaggctacattagctaggaagatgcgaggaatctatcactcccatgcccaaaggttgcttgtatgattgtgtccaaaatgataaagttagcagcagagcaagatgtactcatacagaatcttacagctgccctgtaacataaacaattgtgggtaatcactaatcagctatcacacaccgtaccaggagggtttggtgatgtataatgttggcagtatttcacaaaatgattgcatcaggctgtgatggcttgatgttcacaagcccctttctctcttttttttttttgattctgtcaggtcaacttactggtgggtgggttgcattctgtcaatggcaagacagtttcatgtacagtactgttttgaatactcttcacttcctacatgtcatagcaactatcatggggagcatatcagataccgaaaatagtttttttttctaaatgtagtttacttaaatcttttaagcctgcaggtggaaaaaaagccatagaaatacatgacaaacaaagaagaaaaaagagcgaagcaagccaaaacaggtcaatcatcatatctttttgggggtctcttcattgctactactcgtcgatactggtgaaatatttacatcagggaacatcaaacatggatgaacgagccgagctggttcttcattgataaacagaagggatgaacagggaatttacatcagagggctacacaaaccaaaggtcttaagcatgctagctccataaccagtttgcttacgtaccttaaaacaaatgtaatcgaattacacgagatgtagccgtcaatctgcagatacaactccagcgtgctccatccgtcacggacccctgtactgcctgaagcatgaaaggcatccttgtcgctgatctacagggatcatgcctccacccttcgaagtatcgatcgcctccaacatagacaccacctcggccatctcaggtcgcttgtcagggttcgcatcccagcagcgtttcatcacgtttgccagagaacttggacagcagcgtggcatctcaggccttaaattctaatcaaacaaggattgtagcacacattaaatcaaatcagcagctagacagaaagcagaaaataagccagctagaaaagagggttttacctgacgaacaacagcagacgtgacctctgagaagctcaaatctggatatggcatatcacagcagtatatctcccataaacaaatcccaaagctataaacatcgcatttcctgttgtatggactgccgttgagaacctgcatatcacatgccaatataaggcatataacatgcaaggtagtaacttacatacacaataaatatcaaatacccttcctaggcccgaggtacacacaactgtttgatgcaaaaaaaattgacattttttcttaattaattatgtgctgcaattagacaagtagtggcaaagaggaaatgaagaaactgaggaaaaaacaatgagcagtccatgtcaaagatcggatacctcaggagccatgtaaccaagggtgcctgtttcccctgtcatatcactgggatttgaagcctcaagccgagcaacaccaaaatcagcaattttcacagttcttgtcttgtcaagaagcatattttcagtctttacatcacggtgcacgatcttctttgagtgaagataacttaacctattgaatagttaaatgtcaaaactattccaatcaattagagcttttttttttgagggacaatcaattagagttttgaaggataaagagtgagtgaaatagttaaaagccccagaagaaaaactggcaaatgatcaaattgatgcttaccccctggcaaggtcaagagctatctgaaccacaactttaaaagctaacttctttctcctattctttatcagaaatccttttagtgaacccccagcaaggtactccacaacaacacagcagatattacttggcatggcaagatgtccgctttctgtttgaatatctagatccctggcgcccattatagcccctataaactgtatatagaatttcaacctgttgttagggtacatgacaaatagatagacaacagaagaaatatgaaaagacatatactttgacattataagctatgcttcaagcactgcgaatgctaggtcatttgattttggtgcaacaaatccaaacctcgatacatgtaaggacttcgtttttttgctgaacaatttaacagctgctatgaattatataccacaggtagcagagtagataagacgataaggctgttatccagttggtaatgccactacacagacatcactttcaatatttagttaaggacgctagtgttactcacattgacacatagacactgatcaaatatatgattctaatgcacttgatatggcatttaagcatttaggcatttagaaatttagtcagatataagtatgccagttatgtataaatctgttctgatttcatgcattttatggtcgagggaactgtaattaacccaaaataattgaaagaagcatgacttgttgaaataaatagtacctttgtaacatttggatggtccagcttatgccagacagagacctcttgtgaaaaagctgctcttagtgctgcgatgtcttgttcggacctatgcccatcctctccccagtcaagtaatttcactggagaataatatgaatcaatgaattattttgaaaagaggtgtttgtaatgagaacatacaatttcccattggaaactgtcaaataaaaacaagatttgagaattgatctaagcaaaggtgccaaggttgggagaggagcagggggtaccaccattacaccatcaaattgtcccttctcttttggtaagggcacacaaagacaatttcggtcttaggaagatccactttttgtaggggaattaaattgatgggcttttccaaaaaaaaaaatgcaaaatgatggaatccatgctgatatgggggaatggacgaaagatagctaacaatccctggggaatatgtttctcaaaaatagaatgtgaacatcctataaactatgcatgtacaacaactaatcatcaaccaattgcttatagacatgctcaggtccgatagatgaatcatcaaaagggattctttttgtgctgttgccgtgtcatgagtttgcatcgatggataatctcaatctggtgaaaaagtacacaaacttataggttgcacatccctccatactaaaaggtcgacattttcggctttctttggaaccgcaaagcaactttaccatgaaattcctagccagggatcacaagaaccatggccaagtgaactgctgatgagcgagggcacgtcaaaagccgcccaatccaaccgatgtcacggggaacaccatgaaaagccaaaaggggcagcggcatcaactcccgcaatttactaaaaggggtaaagaaaaggagcacccaagaggccaagacagtgaccggcggttccactcgccgtcagcgccgcattggcagcgcgatttcgtcgaacaccgtacgggcgcaagcgagtgcatggatatcgcggtggttggtatcaagtaaaaaaactgggagaaatggcgcgcgcgggcgggcgcacctgcgacgtcgtggccgtcgtagacgccgcggtggacggtgccgaaggtgccgcgggcgatgacccccctgacgacgagcttggcggggtcgatctcccactcctccctccgctgcctgcggttctgcgagtagtgcgcggcggcgagcgcgggcggcttgctgccacgctggtcggcggccgcctcctccttgcgcttctccatggtccacgcgcggctcaggtggcgctccagctgctcgtccaggctcttgaggtcgatctggtctgcccgcacgaaccctccatcgccgccgccctccttcatcccgccgtgtggtggtggtggtggtggtgagcaacagagcaagtgagcaagcgagcgagcagtggctaggctaggctaggagaggaggaggggggaagagagtggcgaggcggagtggcatgtgagcacatgggctgccgaggcaggcagcggccggggagggggagggggagggagacgggagggagacggggtgggctcgtgccgtcgtgtcgtgtcgtgtcgtgtcgcgtcgcgcgcgaggggcccagcccagcgcgcgcccagcggcgcgtggttttccgcggtttttccccctcgtcttcttcttcttcgacgttcgtttctcgctgctgctgcgtcgtgtggtggccggtgttgtttgggcgggggatcgatcgccgtctcggctcgcggtggtgtatttataccggcgtgagggcgggattgaggcgtatggatttcatttcgagggcagctctacttgcggttttaaatactttttgatccttaaaaaatactatataaattatggattgaggcgtatggaattgatttctgcacttaaaaaattaaaaccaattattatataaattatggtaaaatgtatacgaattataaaattgcggcttgattaaaagcaataaaactgcttagagtaccagcctgagggctaaggcaatttccaacataggacagctagagcacgggatactgtgatatgaatccagctaattaaatttctcccagtaaaataggtctttcccaccgtgcactaggctccctgtctgatacaagattcctccttggtatcgtgtatcccgcatcctagccgaagcaattgtggtagcttccacgcatatgtgacacgcagttgtgctcactgactcctctcgtggatcacatcaacagtaggaaaaggaggaagtgtgtcgaggggaggaacgggggacaagagaggagccagaggtaaatggctcacccaccggccaggcgggtgacaacctacgctctctcctcatggtatgacacctgatatatatgggtatcggatggtacctgggtaccaagcctgataccacgagatatcatggacgctctctcctcatggcatgacacctgatacatatgggtatcggatggtacctgggtaccaagcctgataccacgagatatcatggatgatacccgaggtattaggcttgatacttggtatcagttgcagatgtgtacctgcagacaacacagacgagcagtgaagagctagctaggagcacgacgcgacaacctcgagaccttgtcgctggtgccctgggcctcgtcccctcatctttgcatcttcccttttctccctccccagcgatcacaatgccgaccttgttgtcgtagttgccttcgtctttgctgacctcaccgattccgacggtctcatgatctcaccggtctccacactctcactgatgccctccaatctagtttaggaagggcgacaacgccgattagttctctggcaactggagatgggatcgcaggacgggagggaggacgacgacgacgactatggggcagaggagtcgaggaagggagggaggaggaggactgtgactggctcagagaaagtgggggagggggggagaaaatggatcttgaaaacaattgggttgtatatttgtcccgtagcctgcaagagacattgtttcgtagtttttcactttccaatactagtatattgttttctttgaagttgggtatcgatatgggttacaaggtcatgttctttatacacgactacagtttttgtccctagatttgctcgaggatctgaaccgtctattctaacctgaccgatcctatggctccgaaagaacagccatgttgggtcacctggacggctagatcctgagattgaacggacctcaatagcctgaactgaaacacaattaaccagagataaggggagtttctaaaaatattgatgaggtggcaagctaatctttcaccgatcctacggtgtttagggagatctatattataggcatttatatggatggtttaaacattagatagtataattatccacgatagtttagaataagatatccaagcaatatcgatgtaaaaagtttttaaagaagttatagttgaagaaccgtggtatacataattcataacttcgtaaactaaaaaaaaaagacatgatctaaatggtttttgactcttaaatacgggatatgcacgaacttgatacaagtactacgtactactatattagctttaatccgctgaagaattatgtttatataagggacctatatgtacatgtatgaggaccaagataattacatgtttgctcgaaggatgtttctcgtaaatgatcacgactgatgcaaagttcaacaaagaaaaagaaaagaaaaggagtattgaaaccaccaatcactagtgaggaggcaagtcaaagataagcactactgagcaattagaaacagctaggagtatgttggaaaacatgagccacattattatcatccttgacgacaaaaatgaacaaaaacaaaaaaaaaagagattaaataccactctccccgtccagcttgcttttgcctgatgggcagggagatcgtcgattttccagtagctcccatccatcctgctcacgggttggatttggctactgctgtggataacgtttcttgtgatccttagctttgctttgtcgtttgacatctacatcacttttcattaatatggtttattatatgctagtagtagctttcttgcctacgtaattgacgctctctctcggtccacggcacggtgcgtacgtgttttgtcgccattgagaaatcggcgacgtttgggccgtgcgcccgtggcgttttcaagcctaataatcagtgaggtgttgaagtttcgttcaaaaaaataagtgaagtgttgaagaaactggcaatggcaactctccgtatctcgtgcggctactacttgaccagtgctattttggctgtatgagatatcctggtactatgataccgtatgaatctaccaaacagtgagatctatcgagataaatctcttatattttaagatggataaagtatataccactggatctttcaaaaatcatatgctactgatataccctctccatctcaaaatacaacaaactttagaaaatagtatatactaagaagaaaggtaaaaggacatagtaaaaaagaaaacatttttaccttctcaaagatgagtaaggtgtatgccagtagtttattggcaaatattacctcccacgttattatatttaaaataaaatttaaactctataacttgctatattttttatatgttgagatgaaagtagtatgcatgtatgatctactccctccgttccaaaatataatattttttttggtatctaagtaaaatttgctatattttaggatgaagggtgtatactgtatcgttatcatcccaagactgcctcgcttacacgatgggctacgcttttgtctctttcgtcgtgcttctactaataaaagataaacaatttaagaagataaaagatcatgctactttcaaagatgtgacacgtgattggtttgtgattttgtacacgctcagcaattaaactgtttgtgcattgataaatctattttatttaaattaccttgttccggatggaggtactataggcttcctaggtgccatgctatggatctatggtcaccaactcacaaaggacttctcttttgccccctactgactgctgcataagattttttttcccaactgaaatgaaagtgacatcagacaacaaaatcatcaactggatggagaaactatcaatcccggcaaagtaacagttggagaccgatagtaagtaaacttttcaccgcaaaacatgtaataaaacaggcaacatgttgcagacaccattgtccaaaaaatgaaatgcaaattgattacgtacctcaaatagacttggatagttctggtccgtgtttgtgaagtgcagaagagtagaccgaaccatatggtctattaattaattcaacacgctcaataataacttcaacttgattgcccacattcttctataatctacggagttgatggctacacttccaaggtgagatatcactaagtttcaacctagacattcttcacgacaaaacttgtacatcataatggaccaactgtcttgcaaagttgaaacagacctacgtttgatgatgcctttcagatgtaccgggtgaagttcttttgagcaaaggattgaccaaaaacggccactgctagaatatcttgctgataggcttcaactctgtaggtaaatgatcatagttgcccgaatcaacctctgcctggaacatgggccgcttcccgtactctcgcaaaacacctggtgccaagtgctccttgcttggtgttagcattacatagtttggatcagccctttggtaactgcattttgttaagaacaacgaacaaagtgtactcgattaatagccaatgcaccgtttctaataactagaatagatgaacataaatctcgaacagacataatacaaatacaagaaacaaataatagaaccttggctgtctaagatcctcaacacgaattccaaatccatatgatcttgtccccttcaaatgatcgttcacagctgcaagcgcaaattgatgtcaatgcagtcagtgaacaactaaggctgagttatttccccaaggttccccaactcccctctctcgttttccacgcgcacgcttttcaaactgttaaacagtgcattttttgcaaaaagtttctatatgaaagttgctttaaaaaaatcaaattaatccatttttgaaaaaaaaaatgctaatactcaattaatcacgcgttaatggaccgccgttttccgtgcgtgagagaagtgttcccaaccggaactagcgaacacaccctaaatgtccttttaaaacaaattattgatagtttggagcaatctcactagtaactttctccatgttctatgggttcaattattctacttcaccagaatacaaatttaacaatggaccaagcactgcagaatcagttggtctcaataatcaatatttgacttttttttccatagggaaaaagtggatacatcctttttccagatataatagctggcctagttttgttatttgtatgcagaagtatttgcaaggtacacacctgtgacactaaatgtgaaggatggtctccaccatgacttgaatgccaaagctacagaagacttggaaggacctagctttccctattaagaagaagagagcaatcaatattaaaaacaagtaaagtaatgttgtatcctaaactctaaagatacgggcactgcatatgctcaatgtgttcccatcttttcttgcatcatattcatattcacaatgattgcttctacaaggcgcaaaataatccaacataaaatggcaaaattccatccatggagcaacgtacagaaaagggcaaaactattctgtaggttgggttgaattcttgcactaggtagaacccctcatggcctcatcgtcctatttaatacatctccatagtttcttaaatcattaagatgggatatgcaaattgtatggtacaaggtgtgcatgctatggttgtacatcctctctaaaagactagagacctaattgatgaaaatgaatggatctacttaaccttgaataggaagttcttattagcttgccaacttgctgcaaactgaaacaaggaattgttggcactctctgatggtttatctttatcaatcctatcaacggtgtgaaatggagttagttagctgatatgtgaataacatagtgatagttatttaaggattaccttgtagccaattcaagcccaaaatcaatgtagtttgtgattccaacaatctgatcatcttcaaaagggtttttaacctggtagatacaatcagcacaaagtctcaacaagcttcaagtttaaaaacttgtggcgtaccataaacgactcaacagtggatgagtggaagatatcatgactgtaagtattttttctgttaattggttaaagataggcttttctgcatattataaaaagctggagtagcagatatttatccaacctatcataaaattgatgccatgcaaccgataccaggaaactatgaaactgaggaatcaaggatccacataaattaatagattctgaactaatactagaaaattttgattaagctaaaaaattgatgttcttaatagttttcagcatcaagaagatttcatgaactatagtgaaagagaaccactcttacccttctttgaacaaccatgtgttgatagaacgatgcaatgaactgcacatcaaggaaaacaaaatgttgttacacacgagtctcgatgaaggtcacactagctagagatgtcaccaatcaatgattatttcatatgtgctagtgttgtacttcctccatctacttttgatagtcatatttcatcttggcacacagaccaaggataagtaattctacctatcattcatttaaacatgctactagtcattcctcgtaaacaagcgattcattaatatttacatttctcgatgcccatgtagccaacctttgtggaagaatggagagtcacacattaaatcagagaaagttattaagataataggttgttggattgaaatatgcccatcaaattttttttttttagatttggaaatatgcctatcaaaagtagatggagggagtacttccttattcttttatccactaataataaaataaaataaaataataataatacccaaaagaaagaaacacataagcatccagcttgtttcttgacacagttcatgtgattaattataaaattcttgaatatatgaaggatttcttttattacaagaaacacatactgtaagagctgcaacatttcaagtactccatttaaaattactagtccaactctaattataatatgcacctagatcaagggagaagtaattggataaagagaactttagagagaaaaatagcatggacgtatttataaagccacatttaaagtttgcctcaaagaccacatacaactatccatcactccatcagagatggtaaattgtctatactctgtaccattgttaagagatcatagcaaatacaagctaattaactgggtgaagcttcctaaatgagaaaagagaacaattgccacaaacctctgtacttctggcaagctctagagaaaaaatgaaggaaggactgagtgggcttgttaatcctacaccataactgattgcacaattccagttcttccaatctgtatatggcataagatgtttgtttccacctattgcagaattcgcataatgtagaattagtatagcaccataattaaaaaaaactcaaaaggtgcaaataaataactcaatattcatgttaattctctaaatgcatgaaaatgcagatgaacgccaagatagcagatacctattgcacaagtcataacaaaaacagcattccagtccagtaatattaaaaccaacatacaataaacttcagccttttagtatctttatctgaatttagaagaacattcatccatagttatttggatataagacaaagatgcagtccataggcctctatctgaatgaaaaatttcaggtttcccatgacatgcatgtatattcttctgatggtgaatagaatgattgaaatcctggtaaaaaaaaaaaagaatgattgaaatgaaaagcgccgaactgacattttaagggaaaactatgtccatatacattaaaaaacttttgttaaaaaaattactagaagagaaaaggaacaccaagtgctgcaactatttattgtgttcccaactttgcatgctccacacctccaacaaataggcccctcaaaaccagcataaaatttcaaagtccaactcagctaacataatacaaagatgctattcaaaattcacgattgaacttttttcatcttctgttgattaacttaggtgctggagttgaaattttaccagttgataaactaatcaacatctatttactgaagactaatgtgattggaagtaatttgggcttcagactagaaaaactttactaagtggcttgtattgcactcctgcacttaagctcccttttctcccgaccaaccatgctccagagggtagttcagcagatcctgtcaaaaaagagagagagagaaggtaatatcagcacatgtgaccttaggaaaaagtgaactgcatatagacattattaggggcctcttcgaggacattgtaaagattggatattgtggtatgtttataaacagtcacatatcatctttagtcataacaataaatcgcatgagaatcataaatgattacataccaggaaatggcacaaaggaagacccaaatgatagattctctgaaccgtatcttactcccatgacaccataatcctcagaacgcaccctgaaaaaacttatctctctgattctgatggtttataaattataagcatattgattgaaattattcagatgaacattatttgcaatcatttatctatgatgtcaacaaacatagttgtggaaagctctaacaactccatgcatgatttgcaactgcaaacaagatggggtaatctacctgtttcccattagtaaagggaatgtcccaaacgcaccaacacggtacttaggatggtaagcacatgacctaacctgcaacattctggataacaagttatgagccaaaccagcatcatccacataattttcataagtaaataataactgcattgatgatattatccacataacaagaaagtacttacgggtttgaagttgacacaagaaggtccacaaaggtatggggatcatctaaatctctaaaaaattagtaaagcatttttatgttaaattataaagtatagtacataaaaatcaaggactggtaatatatatggaatagtaagtacttctgccagcgaaatagagcatctccctttacttgtgttccgtctattttatcagcagctgcagacacctagtaatattaaggtaggcaattttttttctttcaaaaactagaattcaagtccataaaaagcatatttattgcaccaagaaaaagtcactgaatctgacttcccagaaagtatcatcttaaaataatttcttgtaccaaagatgaacaaatgcaaacgatgttaacaatctaagttaatttatcagtcatgagtcatgcaataacattgatcctatcaggcctcccagtagacataaatttgtgccaaaatttaacatataattggcaccagtagatcataatcaccagaacaagcaaaaatggtagagggcagaccttttcaacacagacttgcttttccagattttggttataaataacagcaacaatgtcattaagtggtataaaaaccatggcatggtaacgaaagggagagatgatctaaccttctttgagcaaagagttatgaacagaggcaatggtaattgctagcaaaatgaagcaacagaaaatgacaactataagaagggtaaaaaaaatggtgatccgcttatcctcatttcctcatttcctattaagcttagacagaaaccatagtaccagaagaacctgaaacaacaaaataaaataacatggtaatgtcatgtcatgtttggcaggatacagtggcaatcaaatcaacatgaggatcctccagtggcttcagcatgacccttgaggtcatattccccgcatgatcaaagtagtcctcaaacagattctgcagcgagagcttcccaaacattagctcatacgctggcaccgacatcctgcatatttaggaccggaaccatttcagtgaatcacaacagaaggatcataggctaactacatagagacctctcgtccttttaggagcattacaattaatcacaaggcacacagattatcagtatatcttatcaaaatgcttgcgtccgtccagtgtctcagccagagatgtgcattcccagcaaaaattatcagaatcggaactacaaccataagcagccggtgtgaatgccattgtacatttgcaccgacctacagcttcggttcagttcagaatgtagagaacggccaagcgcgagataccactaaacactaatcacgattattcagcctagcgagtgggggaacctgcaactacaaggctctagttactgaagcgaatcgcgcattcatgtagaagtagaacacgtttgaatcaaccgagagtgtaataaggcgagcactaccagtgacactagctcctgacgcaaacgagcgagttcgacggatttcgtttagggagggaaggtgagaagggagaagaggggggagaccggcggcggcgaaggcggaggcggcggacctggtgcgggcggcgatgggtgggtagtcgaagagcggcgggacgagcaccatcggcggcggcggctccgccttgctccagaagatccccatctctgacgaagccgagtgcgcacgctgcctcttcttctccctctccttccttcctgaaccctcctcctctcagtcggtcactttgaactctgaaatcgaaagagcggtggctgaaatatttctgctcccatgtcacacaactgcgcgctacggaatttcgtttcgttttagattggaatttaaaagctgcatatgcatatacttactccgttttttaatagatataaccatttattttatttatttatttttcaaatatataaaatataaatcatgcttaagtacattgactgataaaacaactcacaacaaaataaattataattacataattaagtaagatgaatgatcaaatgtgccataaattttttaataagataaatgatcaaatgtgtgaaaaagataacgacgtcatctatttataattacataattttttttaaagtaagatgaatgatcaaatgtgccataaatttttttaataagatgaatgtttaaatatgtgaaaaaaataacgacgtcatctatttaaaaaacaaatgtggtatagagctatgttcgttacgggaggttcacaaccggaacacagtgcgcatggaaaacagagcagtccattagcgcgtgattaattaagttctagctaattttttttcccaaaaatagattaatatgatttttttaagcaactttcgtatagaaactttttacaaaagctgcactctttagcaatttgaaaagcatgtgcgtgaaaaacgatagggggagttgggaaggggaaaggaacctcagtctctctacttgcgtgttgcttcaagacattataataatcaatctataatcaatcaactaaataagtgctgatgtttgttacttaccaaatcgcagatatggctaactttcccaccatatcgtagagaatgtctcattttgtatcattgtgtatacatactcatagaaaaatgccacaatattcactatgagaaaaaaatgcaggtattttttttaaaaaaaaagtaaaacgagacattaagctatattgaagttcctacaccaaagaatggaaattatatgattacaatatcttgtctattggaatatagttacaatatcttgtctattggcttcaaccctgtaggcaaattgtcataattgcctgaatcaatgtccggctgaaatatgtacttcttccctagcttctttaaaaaccggggttccacatcctctttgttttgtgtgacaatcacatagttcgaataagccatttgataactgcatcccaataagatagcaaatattattatcaatattgtaacatattagcaatattatcttgtggtagataaaaaaaaacctgggctctttaagatcctcaatggaaatcccaaatccatatgatcctgtccccttcaaatgatcatacatagctgcaaaaagaaatattatggagccattatgaacaatttaaacaacatcatttcctattataacgagccacatataatatatgagcatctcaaacccccaaatatgaggttttacttattgagaaaaaacttgaatactatagcacttgatgtaagagaaacaaaagggggggtatgtggggatatttagattacgaatcttcgattgttaatctttcaaatataaattgctaatattaaaagagaatttctatctccctattgggaaacataaaattctcattgaaaccaaaatagaggggaacaaaaagagatatttaagtgagggtaaaaaaaacacagaacttttaaagcgtaatttaatgttgaagtgtccatgaatcttgttgtgataactttccccttgcaaataaaattgttgctagctaaaattagaaggtctacaaacctgtgaagctaaatgtaaagaatggtctccaccaagatttcattgccaaagccatggaagatttggagggacctaactttccctgttgagaaaatagaaatagtgtcaccacaaataaatgaaaataccaacctaagcataagggttaatttcatctttactctcaatacaccttgtgagttgtgaaccattcaataatccttataaaatgagtagtgggggtaccaccaccacctaactatcaactctcaaatttttttaagaaaaagagatgacatatgggggttagaggacccatatgtcaactacttccaccaactctctactttttgtgagagagtgtgaagctaaaaagatccacacgtgagtaacaaatatgtacaataattaagagatggtaataacacattaatgataacttaataattaaaatctcattgcaacgcacgagtaatatgctagtttattataaatttaaaagaaaattttaaaatatgtttagcagagaagtcctacaaaactttgccaccaagtagcatgtgagccgcctcttttctttttaatagattttttgaaatttccttcatccattaaggtattctctaataaattttattttattaatgcataaatgatatgaaaaataactgacctttactagaaagttcttactagcctgccaacttgcagctacctggaatgagggattgctagcattttctttcgccttgtctttatccaagctaaggctcaaaaaaaagggattagttaatataattgatgcgtaattcagaaaattatcttaatttttatgtttaccttgtggctaactcaagcccaaagtcaacaaagttcgtggttccgataatgtgttcttcttcacggggattcattacctaatagacaattagacatacacaatgcagattgttgtcaagattcaatatgtcctagttacattaaaatgattaataaataaaataacttagcgtttcaactcatgaatcttcataacttagtgtcctatatcctataatatcagttttgtatagtttttagttgtatcataatggcacaatgcaattttttttttgaaaagagtgcacaatgcaatggcttcctagaggtgcaaagataatgaaagcaaaaaaaaaagggggggtactaaaacagtatgcacgagggaatatagtaagcaaaattatctattttgaaaacatgtaaagtggcattgctatctcagattcttctttctccattgaaatgcacctgcatgcacatcttataatctgaatatgcatcgaaccaaaaaaggatggaaattatttggtcaggtgcacacagtatacaacaatttacatttcatcctagaaagaatagtgctaaaacaaataagctaatccttaacatgctgctagaacctagagcacattgatgagcgcaacagaatgggtaatcctttaaataaattgagaaaacatgaagcatttttatggaacatagactaaattaaaaattccatacccttctctgaacaacgaagtgctgatagaacgatgcaactagctgcacatcaaggaaaagaaaatgacatcacacatgagattcaaaagataaatattgttgcaattgagattgagataagatcaaattacggcaggttatcaagtttttcttagcagcgaacaaatataattgttgttattttagataatagatcatgcttcctttccaacagagtcaaggttagaaagaaccaagacattatgcccatagtttcatgacattgttcggtgtttcgttattcaacatggaggtatagataatcgtgcggatatgaaattcttgtgtataaacacatgtgcatacatatactgagactgatgacatgaatagtcacatttttagtgcggcagaactaaaactaaaagatgccttaataacatgcacaaggtatccatcaaaaacatgctatttcgataatcttgtcaaaatatcctaacaactgcaatatagtacaaactatgtgaagctctgttatcaaataatgagaacaataatggcaaacctgtgtatttctgacaagctctagagaaaaattgaatgaagggctgagtgggctagttgagcccataccataactaattgcacaattccagttcttcaagtctgtcaaaggcacaggatgcatgctttcacctgctagagtatttatgaatgaaaaagagagaatcaaatacaacaacataatgccataaacttttaaaagtttataaaaggggaaatcaacatctaattatttgaaggccttatttgaatgcaaggaaaggacaactttttaacatataagcatatgtaatgcctcaaaactcatgagagataagggggaaaattcttaagtttcattaggctactcttcctatgatccgttaaggtttagtaactcgcactcacagagtggcttgtattgtatccctgcgcttatattccctttcctgccaactaaccatgcaccgtagggtacttgaccagatactgcaaagaaaatattatgttgtgacaatatgtaagaatatcattagagcttgacttaaacatattgatttaaaattgagacagctgatctacttggctgcatattattttcattctccaagtccaaataagttagaattagaactatgagtaattacatacaagcaaacggcagaaaggatgccccaatagacagattctctgaaccatatcttaaacccataataccataatctccttctgaacagtccctacaaataaataaataaataaatttaaccatgtcatttttatgggttcaatgcatattgatagaaatcaataatgagaatatcagaattattggtagcatatagtggaaaagtataacacctatgcatgatctgcgaccataaacaagatatggcctacctgtttgccttaagtaaagggaatgttccaaatgcaccaattcgatacttaggatagtaagcacacgacctcagctgcaccatgctggataaaaaagttataagcgaaatcaacattatctatgcaccatttaggatataagtttcaacataaatgtcaatccaacaagaaaatgcttacggttttggtgttgacaaatgaaggtccataaaggtatttggatcatccaaatatctgtaaagtaattcagttgagccattttttgtttagagtaaatgcttagaatagtaacaaagtggcatagaaatctggaaataatgaagctttagtaaactatgcaataataaccacctctgccagcgaaacagagcctcaccacccgttgtagtcatctagtaaagccgagttaagaaaaaaaaatacattgcaataacgtaggaggaaaaaaaaaccggtaaaaacatcataacaaacagagaagaaaaaaacgttattgataatccacgtttcgcacaaaatttcaccgaaataaaaaggaaccagatcaaagatcatcacaatgctaacaaaacgaaaaaaagtcaatgttcgaatggatactttggcggtcaaatcaacatgagaatcaaccagtggcctcaacataatcatccctgaggttatgctcccaacttgatcgaagtaatcgtcaaacaggctccgccgctggagcttcccgaacatgacctcgtacgccggcaccgccatcctgcccaaacaatgccaaccacacttcagctccataaaaaagacaaccaaattcgtcgatgaatgcaagcaatctgagtagtagaagatcgcggagatgttggtgacctggtgcgggcggcggcggcgggaaatgtgaagggcggcggcaccagcaccatcgccggcggcatctcgtcgtaccgccgcatcgtgctcctcctcccctgcaaatcgatctcgcttccaaactaaccaagcggccgccgctgctgataagtcctttttccttttccttttcgccttcgttttcgcgctcgcggttgatctctcccggccttgtacgccacccgcgtcctcccccatcctttcttgccaaacaagcctggcctgcaaccatgggcccggcccatgtaggcccacaaatgtgggcctgcggctatgggccaggcctgtctgagcccacataaatgggcccacatgtcaggctcctctcctcggttcgtctagtcgtcttcctactctcctccgatctccaattcttatccaacccatggtgcttggctccccggaagtcgggatggaggattcgtcggcgactcacctctccgacgaggtgcaggatccaggttcgatccataatcttacttgctttcgtcgccacttggtagtgaagctctagttagtctgtagttagggttgtgatttgtgaagggaagcaaaatcagtagctcgatacctaatcgatgaactccatgcttgccatggctctaggtcgaggaagctcagatgcttctgttcgtacttctttgcgagattcgacaggaaaggaggctgttgcggccgttgaaccggtgagggaggagctggttcagagcgcggtcggttttctgaaacacccaaaggtagtggcctcttctgatgtccagaggcgttctttccttgagaagaaagggctcaccgtggatgaaatcgatgaggcatttcgacgtttacttgtaagatttgttcttttcgctgccttgtcggctcttctttttttcagagcaggggtgaatcactggtggttctgacttgattaatttctctaacttagtttctgcaattttcagagcccatcttcaaactccatgagtccaaattattgcacatatcaaggtatgctgtggtcacctgtcaagattgttgattaggtgatggtgttgttctgtgtgattggtcactccaaatgaacttcccctctttaggtttatatatgcacaacggtgctctaaagtgtaaatggcttcatcaagacatgtctaatgacatcgccttgtgttttccttcatttttcaggggtatctgatcattcttcaaaaatcacacaggtcagctaaaaagtacagaaaaatgtttttttcagtccacacttggtatcgatcatgcattatgatgtttatgttgcaagctttaagttatccctttctctttgccacaggagaatccttcaacagttacaaaatgtatggatgatgattcaggtttgctcatgctgcctttccatgagtcatgttgactaatttatccatgttttctaattctgttgttccttcttgcttttatagggagacctgagcctgaaactgaatctgtggatcctgtggtgcctcgccacccaaaatcatatatggaggtcagctatattgagcatcaccttttttttttcctgtcactctagcatgagcgtagaatcgatgtgtttttctttactcctaagcatgctacttgaatatttaccaatgaagtttagagtgtacagttgttactgactgtatcgtgttgcacgatctatgattctagtagtctgtaagtgaacgcaagttacatttgcttgtgctggtgaaaggtcattcaagagtcaagactaccttgctaggaagtgcgctttcttaatagttttagatataaacttgagcactccttcatccactttaatcgctaagtgcagctcaatgctttgctggcatgcacagtagatttttcttccttcttttgatgtaccatatactggacattggagggcaactcatcaacatgttttatatattttggggattatctattgtatgatggtgcaagtaattttagtgtgctcttattaaagtattaggacaaaaacaacttatcagccagaaagttttattatttttttggatttaatgttgtgatgatgagtaaggaatattaaagtatgcagattctgttgctgaaccaaaaattagctcttaactgtcatactggatttgacacttgacagatcatggaaatgatacaaaggggagagcggccagatgatatacaggtatatctgagtttatgcttgtcaagttgactttgtgaccttatcgtttctgtttcaatataggacattaatgatgaccctccaaacccttatcaaccaatctcggaatcccgcatggcaccaaagcccaaggtttgtagttttacatttccagctaaacaaacctttagtagtataggatgtagttcttttgttagcatgatagaaagtatgtacatgtacgtagggactacaaccagcattttatgctgaaattagagtaacttcatgctaggctgttttcggacaacacagttcactcacgtttattttgtcggtaaacagccatgggaaaagcagggtcaagaaagttccatctgggagttgaaatctcagtcaatggacaccatcgaatcgagatcagaaattcaacttgacagcgccaaccaatttactgaaacggagaatagatcaaatcaaggggactcactattgctggaagaaacggttgcaggttctgaagctcacacagatgatgctgcctcgacaaagtcgtaaatgcaaaagcacgtgatgatggaattgaacatgctgggaaactatttcaacatatacttagccaaaaagctcgaatttctagtgcaacagttttctgaaattctctgaacctgctttctctgagctcactgatctgcgtacttccctattgttggaatcagatttagcaggcacaaaagacctcccaattttcgttagctggaacagttatacaatctgtataatgtaatcatgaaaaatatacaaacaacaacatgaaatgttgtgacttgtgaggctcatgtcatgtctgaagtctgaacccttgcatctgtaacagacaagcaaagattgcttgattggctagaaatagaattgttgaatctgaggaaaccattaggaacagagtaccgacactgatcccagtgtgaacccggctaggtgtgaaagtctccccaatagtgtgtaaccccatctgctctttttcgtggcgtcgaatatgcttcagcgtgcgtgtcgctagcaacgaacagcaaccggagaagaaatgaattcggccttgctttgatacgcatctgactgcctactatgccgatgggtcttgacgcgacgttgatacaccacacagtgacacacacaactcctcatcttttccaagttttccaacgccaactacctcgaccagcaatcaacctaacctagacgatgcaagagacgatcgagacacaaagctacatgcctaaccagtccaaaataccactgctcttacccggtcttgcttgcagaattaacgacatgtttggtgccttcttggttgggcaaaagcaagtgccattttgacttgactagtgagtagtattactacatagtaggagtacatactattctttgctcataatgcagagttgtgtttgactgggtactaatgctcgtcaatgcactcttactagctcaggagaatgttctttttaacgtctttgatacgtcaagatgacgttgtgaagttgcggtgcagaagagagttttgatggcaatgattcagattaggtgctgtaactggagatgacgtcagggaaataggagagggccaaaacttgaaagctagagcagcgtcagcaatgagcctaagtttaggtagtattaggcagctcaaattggtcatcatgtcaatgacaaccctggtcctaacaccttgtatgacaacacacgcaaacaaaagcatttccattttctgtaaacatttgcaatgatgcaaactaaaacagatgtcaatttgccattacatgtagaaataggactttgaacccatgacctttgcggtagtcaaccaattttctatgtgagtagtccaccctgtaccatcgaattacattttccatcatttcaatcgtcccctgttttttagcctttttagcctgtaattatatttgtaggaagagcgattttactgcctttgaggtaacaggagatatcaaatttgatacatctcggtacctttgatattgtcgagggaagaccctcaatagcggggagtcgtgagacccccctttcgtgagttcggctgggggcggaggcccgtctcttgaaagtcgcttgctcatccctaggactatcggtgagtttgcacgtagtcggattatacaggttcgggccactatagagcgtaacaccctacttctgtgtttgggattatggatgagttttacaagggtttcttcactccggagagtgcacttgctttctctcttctggagttcaggtattctgggcgtcatcccctttctcagtgggcagggtcctccttttatagcttaaggggataccacatgtgccgcctctacctaccctctatgggggggaaccccactccacttttttgggcttcaaactgtgtcttctcccggaagctaagcaatagccgtttcttgagcagaattcggcgtcgtcccccgtctgacacgggggacagccctgtcattccctcataaatgaacggtgacatgcaacagcccttcctcaagtgacgcccggatgtgacgggtcatacccacccccactccgccggggacaagggcgacgtgaggacacgactgccctatccatcggatgtgacggagacgggccgatcacagaccggtcacatccgatggacaggggttagctaggcgcgccgcacgtctgccctgaccgcattaaatgcggtgagggacagttggggcgttgcacatttatggctgttcagcctgcactccccttttgctctctccctctgccgcgtggcggccgggtgagggcctcggggcgaagccgtgagagagcccgagggggtgacgtcatgccctgagcccccgcccccc

SEQ ID NO: 5991 - DNA, 18748 bp, Oryza sativa
gagcttgacctgggccgtgtcctttatcatgcgtgccatgcctctcgctgactggcatgtgcactgcttgctgccttcttctctactctcacacagggtaaatacgaaagtacacgtgtcttttgcctaaaaaaaagtaaaaacaaattataattgttatatagaagtgaacaatgcaaagttttagtggtatagaagttaacggtgagatttctatagcataactctgagctggtgcggttttggtgatatgaaaccaattcttttggttaaatattttcaacttattctgttattaccgtaataaacaattgagttaatctgtaattcttacttggaataagtgaggattgttcacttttgaaaatataaatttgctactgttcgcagaagttagaagtatgtatatgtgttacagttccattatgtgaagcaatatgttgcataattatctcaagcatattttttttctattgtagttttcgaaccacaaaagaccaagaaatacgaccatatattggttgccctacacatgtggagcattgggcctctctgcatgttctttatggcttttgcgccacagtagcttgatgggaagttctgacattgacaactggattcaagatgcaaaagaatcgatggttggtttttgggatgtgcatgttgggcaaccagtaagatactttctggatatgtccttttattgtgtaccatatgcatgatgctagcattagttaactaaagtcgaattgagttactttagggctcattttgataggtgtagtttatgtccaatcccttcaagttggcaaggaatttgaactaaaatctccaccaagggatgaggtctaatccccctatatgcagtatgtgagggtagagatatcagataatcacattaaccagtatagataattatattggaagacatacaagatgttctatgaaatactgtatcccaatatttatctgttaaaaatgaaaagcagattactgcttaattagcaagtgtggtatgctgttttgtgtactattagctgtgcttttgtgtcaatgttaaaaaatcgacttgcctttaccggatgacttcacttattagttattaccatcaacaatcttaaggcaattagtatatccaggttaagaaacttgttaatatgcaccttcatcagcatgcacatttcatcagtgcactaaattctgctcattcaactcctatgtgtgtccataacattttttacagaactcctgcaattatgcttgatttggctgataacttataattgaccttactatgtcaacaaaaagaatgcatccctctgtgactgtgtccagctaaactcgatgttctttgtacttttcaaatttagaaatcatctatattactaagctctatcatgacctcattcttctctttgagaatcattagatcatttccatcagggatgaactttttgagacattcaaacaaagatctaaacatgaaatggaaaaacaagaggtccaacaaactgaagaatcattgcgcaggttattccaatgatgcccatgctcttttgtaaagcttacacatgcatgcttccttactcaaaacttagtaaagtattgttctgaattaggcttttctccttcaaacctacacgtgcctttctccttaccaaaactttttatagaagtgttctaagttaatatccatttgatatggcctaagtttcacctccttacccaaacaagatgacatgtatctgcagtttcaagattttacaatgactatatatggttcagtaatgtaccagacatccatgccatttgaattatatgcgcccttttactttcttggaagtgttcctgtatgaaattgtgggttaaaattaggttttgcttcttgtgccttttttatatatctcaggtaatatcgatctgttgactgttgagattgactaattttcgttagtaatcaacaaaaagggcttcatctcataacctacatcctgtttcttgcttgcttccttctttttttttctttttttctttttttgccttttctagtcccttgacaatattcatcaccctggagctatgtactttattcccacattttcttggaactatgtaaaatttcaggtttgcattgcatttattttctgaaacacattgagtattataaaatggtcttgcattatctcaccgtacatgttacatgttgcctttgtaggatgttgcttgacttttgtgggaacacttcaaatgaaaaaccgccacaagatatgtcagagctagcaatgatggagattgtcatgaagaggtaagagtgtttgaatatttatggtgtcttggctttgacagtcatagcttatttcaaggggaaaatttgcacgctcaaaagtcacctggaattattttgcttttgtatcggaatctattgacaagaaaaaatttgtgtttgtcaagtaccattttttaatttttgtttgtttcgaaactaaattaattcagttggtactggggacagaccttgtcttttttttttttggtggaatgaccaaaggaggtcattcaatgtaattaagataggaagaaaaagttacagaccttgtaatgaaaaactaaatattagtgattctcataaggctgtacataagtgcatcccttgatacctccgaggggtataagtttcgtttgaaaaaagtagaaacgaaccccacccaacactaacacgtaacaccccttactctatacttttctaacaaactacatatcttattccaaactaaactgataccttcctaactaatagatatgatagcaaataagtactctctattattgcaaactaccgaatttatttggccaataggcgttattattgtgtaaggtttaccctttcctagtcatactgctgcagtattgctgcttgaaaaactgacgcgcgttccagctgtggtcacaaaaagcttttgaacttccattttattttctctgcctggtttcacagtgtaggctggtagcaactggttacccatagttactggccagtaggtttttctctgctggttactagttaccactcggtggtacttgccagtaactaaagcctgtgagaccaaaaaaggcatagcacatctttggctttccaactgtaattttctcaaggatttctctcttttgtttcagtaaaggtttataacctgttggtgaaataatggtactatttagagttaaaacttcaagatgggtttgactcagttccaaagtgggctgaatcaatattttcttagtcaaaaataaattttaaaatgatttgatcttgatgtgcataacagttaagttcgtgttgtagaattctaatctatgtctcatcttgcattaaaaatgatgaatttttgttaacaatcctaagtttagtatctttgagtttctgccatgatcgatgaattaataactttctaaattctaatattagacacaagcttcaggaagttaagaatcatttgtatagttgcttctatgactccttggagtgacttgttgcatggcttatgtcaatagaatctgaacttctgcaggagactttttgtgtattacatgctttgtatgcacttatgttgcttacataacttaatgggcacttcacattttatccttatttatctgatacctaaatttctatgcttttgacgatcactcaatggactaaattgatggagcttcttttgttaaaaaatgaaaactaaactagctgtttacattttactgactcaagcaatgaacaatgacacttctctaatatgttgatacagatatgagaaggaagcaatgcatccatttaaaggtctttccagtggaaaattaacatgtgcattgtctattcaggttcttccccttctatctctatttaggatgcactcagttcaagttaacctgcattttttctaacattctgatcctaaaaattcagattgagaagcataaactggctcttctggagtaagttatactaatgtattctgacaatactgcttaaaatgcatgatgataaattttttatgtctaatattaaactgcaagagatgattgaattgtttttacacagggcaatgctggagctggaccagatccttagggcaaatgagataaactttgctattcttgcagcactacctgcatttggtgtttcacttctgctgctctttgcagttcgagcatgggctacacatgtatgtataaccatatagacccattgctgtcttattcaggggcatctagcacaaatagggaagattttcactactttctttttgaaaaaaaatacaaattgatccctagcaaaacatttttgcagaaatggaactttctgcactacaccgtgatattaagcactatatattcgtagcatgggatctcaggattcggggctgtgtaaactaccacataggatggtccctagatatgctagagttctacaaaacatcccatgtggtagtatacaccgtgtcatgtacgtaaacaactaatgtcatggctctgatctatttttagcaaagtttcatgaaaggtctatttgtaataatattttctaaaaggggacaaattgtgaaaacactatccgcaactagcaggagatataatcttgatatattatatcccagtggtttgcagttttcaccatggacaagtgtgcatgaaaaagataataggaatactaggttcagatatggttaattattgtcctcactatgaaatagggccgtggtgctgagggaagaggtaggactgcacggcgtcagcgaaggctgcttcttgctgatgtagagaaaaggcttatggagtttcagaattgcatggctaatggaatggtaaccttatcattatcttaaattagactacatgaccttatcttgatcttaaattagactacattgacatttatttggatgagggacaaaatacttgatctggtttcctgttggtggctattcccttctctaagaaatactaccttcgttttttaataaataacaccgttgactttcagaattacgtttgatcatttgtcttattaattaaaaaaactagtgtaaatatactaaagtacaagtcatatttaaagtttctttaatgataaaacatgtcacagcaaaacaaatgacatttgtataaatttttttaataggatgaatggttaaatgtcatgtcataagtcaacaacttgaaaaaacagagggagtatataacgctttcctattgtattttgtctgcaaaaaccttattccttcacctagtatgagaaaacaagaaactgccattttcaagattggacatccccaccttcgtcttgaaaatccaagattgaagtgctttcgtattgatgagaaagtcattttctttcgactttcgaattacaaacttgaaaaatattaggattacaatacgtactaataaatgtctggctgaatttcctaattttacaggaggaagaggcatgctgtaagttcgggttaacactgtacacccttgatagactatacaaagctgttgaatcgcaggcgagagaaacaggagagtggtcaaggtgagtctcaaactcatagctctttttgatacttcccttggctacctaggtttgattgcctgtgaaccaaaaaaatcgttttccgattgcagcttgagagaagacatgtttgatctggcaaagcctggtgtgggcatggaagacaagctggttctgctgtcccggctcaaagggatgtacgactgcttacttccatcaccgtcaggtgtcttgccccgtctgtagtcttctcatcttcctttcctttccttttcttcttttctttttggtcacgtgtgacgattagtgaaccccaatcttagacgacatgaatttgcttggcgttttaagagtcgtcaaattttgaattttttatgccccgggtactttgattgtagccctttcggctccatggagtgatgatggcttttgtgctgctgcaatgtttgcaccagagattactgactgtaaatccaaaatctcttctaactggatgcttaattcatgtgccacacccattttacatttgtttctcatcattgaagcacatcgaaatttagggtggggatcctctaccataatatcactatcattataagtcacttggtatgtgggtctcattctcctattgtcctacacataagtgtctataattggagtgccactatggtagaggatgtaaaccctgaaatttggccctggaaagcgtgaatgtgtccagatactccatgttactagtatttcgtagtatatgttagctgtgatctaaggttgtgttttttcctccaacttcaatgaacgatatgttttttcacaaattttctataggaaagttgtttaaaaaaatcacattaatctatttttcaaaaaaagttaatacttaattaatcatgtgctaataaatcgtttcgttttatgtgcgcgtgagatgggttctcaactcattgggaagaacatagcctaaatccacactgcaacttccatttttagttagtacgcttttcaaactatattaaaatagtatattttttcttaaaaaatgtttctaaaaagctcattttaaagtgagtaataattaatactccatccccaaaatatatgacactgttattttttattttttcataaaaaatatagtataaatatgtaaaagtataagttaagaaattgtagattacagtttcttttgatgataaaacaggtaaaaaaattattcagatggtttttgaaaaaaaagagactaacatccattttcattttccatgacggagataagaaaatactactaataacctttcatcaaaagattagtttatgaaaaaaaaatgctatctgtaaattagcccttaaagaaagaagcacctcgacattccttctatttactttatacttaaacaaagggaaagcattgcatacttacatttgcatgcgagtatatacatagatagcacggcaaaatcctagttaatccagatcaccctttcttaaatttgagaggagttattaattaatccacatcatctatgagcacacgcggaagaggaggaatcggatccgtgccgcgttgctccgggccctcgccgtcatcgtgggcccggcccatgaccagcacgctcagcaccacgcgcctccccctcatcaccaccctctccccatgcaccatcgccaccaccacctcctcctcctccgcctccgccgccgtcgccggcggcatctcgtgccggcacagcgggcagctgccgtggatccccagccaccgctccacgcactcgccgtggaaccggtgcccgcacggcatctccttcctcctcccgctcccgcacgtctccctggactcctccccgtcgtcgaggcagatcgcgcagtcggacgcctcctcgccgtcgtcatcctcctcctcgacctccctcagcgccgcgatcgatgccctggacgccggggccacgccgccgccaccgtcggcgctggcgctgccgtcctcgtagaagacgtggtgcaccaggtacgcccgcccccgcagctccggcgccgacgagacggacgccccgacgagcaccggcggcacgcccgccaccgtccgcccgctgtccctgtccgtcaccggcgtcacgatcgacaccatcgacgagggagcattggtgagcgacattacccgatctcttcaatttcctcttaataattcttcgcgatgcttttgctaccatctgcctcgctctcgctatcgttctcgctcgatttgatatagaggaggaaaagacgccttctcgatgatcggtggattgggttgatgatgcgcatggcgccaaagggttcgaggtaggtgagccttttttttcttttttgtctcacaattttgcagctccgacaaagcggtggcgatcgattgggatttgggctccacatgtgcacttcgtcttcttgcagcaacacaaggtccatcacttcaattttggatgcatgctgattttgcttggattcaggctgaatttggtttgtttggacaccagaaatgtccttttttgactaggaaggttgttgctgttcttgacatcccagtgcaaaaggggtttgatgattcacaattttggaatgttcttggaagatctctttgatgattgacaattttggggtgttcttggaagatttctcatggtggagccatgtgcgcagaaactcagcaaaaaggcagacctgtgaatttgttgatatatactggattgttattgacatttttgaccttttgtaactatgcaaaatactacaggtcaacataaactgtgacgtactctacaatttaaaaatgctttctggagaaatttaaacacagaaaagaatcacatatcagattgatgaaacggcagcagatttgacttgatttgtcagaagcagcaatgatcaggtagagtgccaacgcaattcagccccagaagaaagaaggctaatccttggagatagagatttatgtagaagctgttctttccatggaagacaaggttgtaggatgcacaaaagatgaggaacaccgataatccgatctcaggtagattcactctgcagcaaatgacaatgtcaggttaagcatgcatgcagaactccagcacctaccactaccagcttatctaaagattgcagtagcaaattggagaaataaattttacctgtttattaaccttttcctggatttttgaagcaatggagtctcattattctcgtcgaaggcattgttccccactttcttcgtcacaatccattggttgaattcttgcagttgcagcagaccagctacagcagctctcaaccgatgcatggacatgacgctctcgaataaaatccacagtggcactgtgtgcagatttctggagtgaaaagacagttatggcaaatcaaattcatccaaaagggtaaagcgatgaacaaactgtttgagaattgtaacaaagattgtaagagagaactgactctggatttcttatggcagtgacaatcaggagtgctgtaggaatgtaggcaacgccccagattggcaggaagagctctgggatcatgaccgacacagggatgataacattgtagagaataaaggcaacagcaggggcaacaactctcctcaccaggaagaagctatacagtatgtagatcttcttcaaggatgacactttctgacggagcaacagtggcaggttatgttttatgcagatttacttgttctggttcatcaaaaaaggagaagaaatggtaccttggcaaccaagacatcccatatcatctttcggaacaagtttgcaccgccacaagaccaccggaactgttgtcggcagtatgctttataagtggatggaagctcactctttacctgtgacgtatttgctttatcagatgctatcgtcgagtgattgaacagaacaaattaaggattcggtcttcttactctgaggtcccctaaatagatgaatttccatccctttaaggttgctcggacagccaagtccatgtcttcaactgtagttcgatccttccaacctcctgcgtcattgatagcttctgtgcgccatacaccagcggtccctaacaaggtaccagtgtttaggagactatcaccatgttccttttgtgatctacataaaacatgaacagtcgaggtgtgcaccattgaaactgaagaaagcaaatgtagccgatcctgcctcctgctcagctttgaagtggtaatcaaggaatgtcttctgtatccttgtcagtaggcttactctgtcattcactgtaaaattcggtcaactaaaaattggacagatcagaataaataaaattgctatatcagagttcaatgatgtgatattatctacagaaccatttgtttcgatctttgtcttttgtaacaccacaagaatcaagagctaacagaaggccacttcaaatgcaaaattttggtcaccttaccaatatatactgaatacttcccgctagcaagaactgcaaaaggtagtctcaatgacatatcaaaagatgaggtcttaccaaaaacccaccgagcttgtacaagcgcaacattctgattgtgcatgaggaacgggacagttctgagaaggaaatccggttctggctggaaatcagcatcaaatatggcaacatattcgcattgcttggcatagtcccactccattcccttcttcaaggctcctgctttgaaccctttgcggccacttctggtggcatacttaatgtttagacctttgcttgcccaatcctcacattccagctcaaccaaattctgcaaattaagtaaattcttgttcattttcattacattttcacaaggtagatgattaatttattgcccttctgtgttaacaaagtgctagggactgcaaatatatgcacactaaaatgacatgtacagatgtactaaggacgactagaggttgagttgggtaatttataacttttcagcttggataagaaaatatttacacatgccagtcaaaggtgacatcattcagttcaccagatgccaaatgctgagatatcccgaccgcaactgccttttatccaactacaactgcctttttacacaaaaagtaagccacaaaggtaattgatgtaaatagtagtttgtcaaataggatgtctcatgcaagtaaattactatttaagattaagtacttattgtctagacaaggatacttgaatcagctaatacttctttacatgaaactaaccatttatgacagtgatcatgttttttacagctacagggtatgtcgtcatccttttctttaaaaggtaatgatcaatgacgtgcatttcatttttcttagagaagggtttttttttttacctggcctctacatccaaccagatatatgcaaccttacaaattgagaacttagcccctcgaataacccaatctgaaattcgctcttatggagatttaaactcaggactttaggatgctacttaggtcactgtaaccactagactacatgctcttttactgtaatcacgtgcatttcatatggtccaggcacatgacttagctttcagtcctaggacctaagacagttaactacttaaggttaggttcctatgacgaaacttagttgcttttgctcctttttatactgatagtgatatatgaaagtgaaaagcaatgtcatccttatgtacaactaatccaactcattactcttcagtcttcacacaggaacaatgctaactcgttaagctaacatacagaaaaagtgataatctacactaattacagattttcagaggtctaagctcctgacgaaaaaaaaacccggagtttggacatctcaatcatatcattcagccagaaacttgcctaacaataagaaaaaggagagataccttgataaatgcgtccgtggaatcatccaaaacttggattatcaacctctcctttggccacttgagcccacaaactgctccgattgacaacttgtacacctacacccaagaatccaaaacatttgaattcggccgtatttgtgtctaatttgaatcttgttgaattgattggttattacctcgagctcattatacatgggtatctggaccatgaccatgggataagcagcagcagcagcctcccccttctcctcgtcgccggcgccggcgccgccgccgaggggctcccacttgaaccaccgctccggcctccagccgacgagcctggcggcgacgctgacggcggagttgtaggtggcctccaccaccagcatcaccgacatcaccatgcacgcccacaccccgacctgcagcgccggcgccaccgcgcgcgaccgcgcccccacccacgcctcgcgccaccacgcgccgccgccgctccccggcgacgtcgacgatccctcgccgacgactgggaacgtaccacgacaagagctcagctcactgaaagcaagaagctaattaacttggatgggaaaataaaaatggaaagaaaatcttggaacctgtgacgaggtaggtgaagtcgagggcgccggtggagacggcggcgaggagggagacggcggcggcgaggaggaagaggacggcgccggctgcctcgccggcctccattgtttctccgggcggtggcggctgccgtggcctctggagagagagaggagaggagagtgatgtacaacggaggctgagctgagctgagctgagcagttggatttttatcgctcagctctcggggggcacgtggacgggacagcgacacggcggggccattatattgggtctcaatgccaatattttgcgcttaatagtttagggatatttaccattttcgttaattgcttattaaatcaaaaaccgtcctaaaaaaacgagagaggatgataatagtgatatggtgatggactggtggattcatttgatttgttgcattctgggtaaggacaaggaaagattcatattcagcttaatttgtcaaaatgttgagaattaaagcactatagtttaaattatatctatgagtatattatacacttatgagtgtcctttcaaggattcaaatcgatttccataagattaaacacacaaaattgcgttcccaatagtttagtgcacaatatgttggagatggatttttatccctcgaggaaatatcctcttgttttgtgtctgttatttaaaaaatcatcaaaaatttgaaaataaattatgaagataaatcaatatatgaaatacctttccacaaacatacatgttaaaatttgaaatataagattcgaaacaaaaataataaatttgactgcggttacgcgttctattcatagtcaaatttgttattttgttttttcttgtataagttgaatttgaacgtgcatgtttgtgaagtgacatatcacatattgatctatcttactatttttttctattttttatgacttttaagttacataaaaaaaataaggggatattcccttaagaaatgaatagagtttccccaattgttactagttgtgagtagagcagggtcgcggctctaggctaaggccggttgtgggatcgcctaaggcacaaaccaaagggaacctcagccctcaaatcaaatcgatatcgtgccaaaaaaggcgtgcggacagccatgtttagaagggcaatttaatttgatgatctagggtgtcaagcgtgttgagtattttagatctttcagttgaggcattgagccattgaatatctcgggcatcatgtccgtcggtttgtcctcgatctggcggttgtgacacatgtgtagtttatgttacagttaaaaagaaaagccttacgagcctatagtgtcgaactatcaaatttacctaggccctcgaaattgtagagccgatccgatagtaaatgtgatggttaatataactgtgtgagtgtgggttggttatgtataatattttatccatgctttttttttagggaatccatgctcttttttttttggcattgcacaggtgcaaatatcataataaaaaggaaaataaatcagttcgggtggtatggtgatttggagagagagagcaatgtgctggaaagatggtgagtcaccagtcaaatgtcatatgtggctgtgtcatatgagattgaagcttgcccattgcatgatgagctaagaattaaaatttcctgcgagaaacatcctgagagagaacacctgtcacccggaaagattagtttagatcgcccccatttgcatagtactagtatatagtactatgagccaaaattagtaggtcacgatggaaaacgttacaatatttcagagaaacaacctaactaaagttttacttgtttctcttgccttcttctcagatcgatcaatctattatatctatttaccagagtgttgcacaccggctgaccgatttgctgtgtaattatctatggtactatgcgccacgtggataaattaaatgctgtcgaatttaagctgcaaatcctaacaagttagtggtggcagttgagctctcatccatgcctagaaaatccaggtgtacaactttagcggacagagatttgatagcaggggacgaaagaagaagaagaagaagaacaagttgcaatttgcatcatgcatgtaatcatcatacgtgtgcctgaattttgaacgagatgatgatcgagcttgaagaaccagcctaaaattaaatgaaacctatgcaggattaaccaaataatccaagtggcgagagctagctagcttagggcggaggtggagtggagtatgggagggccgatcgaggggctgcccacgaatccggtcaaacaaaattttgtagccatatcttacttattttcaccatatatacaccctctcaatacaaacttatacatccacatctgcttaaatttgatctaaagtaaattaagcaagtgttactctctatttcgttctagctccgcccttaaatttacagcgcgccaaatctaatggtccaacaataattaactaattaagctggctgatctcggccgtatcatatgtgtgttttgctgggtaaatcatcgatgcatgcgcgcgactgcatatatatgcagggatttggagaaaacaaaaaggaaatgtccagctcgatataaagtgtgcaatttaattgtcctgctctattctatcataaatatttgacaatcagaataaattttgataaatagtttctcaaatgcttagtgtaaaacacaaacaaaatagtatacctacatttgcattgaaaaataatattatatatcatgaacttattggattttataaacttatactgatatataaaattaatggtcaaaaatttgaaaaaaatggatcagacattgcttaaatatttataactgggtaaagtatctgttttcctataaagcgatgacatgtatgatatgtaccgtttcttccttggactcctcgatctattctactacttcacttacatataaatcatcttatcaatcaagttgaatgaaaatatgtcaagttcattttttttggctaaggttaaaatggctgaaatgcatctttataggtggaagtagcaactccttgcgctaggtgtatgtaaaaattgaggttttcctaggcgatcaacacaactgcaagtgaaaaataggatttttgcatgtggcacatcacgatgcttgcctgtaaaaagaatttttagccaaaaagaaaatttttgaaaccctagcttggtagcggtcgtcgttcccatgcccagggtcgttgtcaccgctgcccctaaggtcaccacaatctttagtcaccactcaccgctcctgaggcaggcagcattcgatccgcactcctaaggctaccgtagtcgttagtcgatcctcccatgcatggcggatccaccactcccaaggccagcggcggtaggtccgcactcccgaggccattgcggtcgtcgttgccactcccatgcctggtggcagtaaatctgctattgaggtcggcggcggtagatccgttctcttgaggccgttgcagtcatcattgctgctcccatgccgcccggtggcgacaaatccattctcctaaggcttctacagtcgtcgttgctgctcccatatgcccggtggcggcgacaaatccattctcctgaggctgctacagtcgtcattgctgctcccatatgcccggcgatggcggatccatgcgctaagtatggggagaagcgatggaagggagaggtcaccggtggatccgcttctcctgttgctaccgacggatccacatacctcgagtctaccgtcattgtcgtggtcccacttagccgatgtttcgcccctccccaccgtcgtcgtggtcaccctagcaaccatcacggcatcgccccttcccgcacgaggcaaatctgacgcctccaccaccactcatcccaccccttcgccgctatcggatccggttaccaaccgtcgaggagaggagataaagggaggagaggccgaaaggaggataggtgaagtaatagggaggatggaaaaggaattaacgcatgggaggagagaaaaggagagggagcgggactacgaaaataaaccatgtaggtaggttttttattgggccccctcctattttttctacattttacatactagtaagcatgcacgtgaaatccacgtgactaaatatttaataaattatcataactcaaagattgacaacaattgcatgtacaggttcagaagcaacaaatatcccctttactgatcaatacatatcctcaaatttgacaagcaaaatatgattgttaaagatcatattatgaaattcacatagcacatgccaaaatcaggagataatatagcaaatcttgagactttggatgctcaaacacagccaatgtaagatgcttgtttggttcagaaaattagactacaaacactaatgtgcagaatgacaggactaggccatcttgtaaacaactcttctaactcgaacacctcaacataattcaggaagaacacaagaaatagggcaaccaatttagattacaatgctccaatccaacaggattgagccgccgccgccatcgccaccaagttgcccgttctgagttttaattcagttcattacattgcttatgtctgaatctcacccactcactcgttctttcccctcacacacgccaattcacacagctttcaacagcacacttacatggcccaatcaggcccataattacgaggattcgccttggcctgtctagccggacgccgagtctgaattgggtccttcaggctggacggcctcccctgtagcccatccgatacgcctccttgttcagcagtatcatccccttctggtacatcatcagtgctcctggcacatctgcagtttggtaataagctcataaacatcccactacttgaactcacattatgttcatatcaatttgaaacatctttggggatacaataactgacgggtctgcactttaaagttctgaaagaaaacttgatccaagacagaagacatggagatatgtcagtgttaacctgttggtaagatctgtgtagggaagagacctgaaagatggaaaaagacctgaaaggaagtgaattgaagtggcctgtatacaattcgctggtgttttttgcagggataatgcttaccaggctgtgcaaaggcagacgatggtgcaggtccaatggaaggcatgagcgtgggtcagtcggcggcaggagcgcggttgccagcctaggaaaaggcaaggggtcagtcggcggcagcgttcaggcagggcaatggcgaggagaggcgacgccggcgggagcgcgcgcggttgccggtggagagaaggcgaggggtcagtcgatggcagcggtgttcaggcgaagtgatcgcgatggcgagataggctgggtgcaggcggagtgcggttaccggtcgaggtcaagggaaggcggaggcacggagggcaggcgtgttatcgatcgagaggtgaggcggaggcggagcacgtgggctaggggtcgtgggactgaaggaggattgcgtgtttccttcggaaaatccaagacttaatcccgtgcgttaattcgagtggatcggacggataggaaagacctgtggggggtagtccaagttgctccattgtagtatagacggttctttttaaccttgccaaaaaactgagggtgtatgaaaaatcatttctttacattgtgctaactctctactcatgccaacgtaaatcaaatacagcctctacagttcatgagccaacgttgttatcctcataaaaaaaactgataaatggggacaaattaatgctataatctgaaaatctccacaacgcataaattaaactctatcctgtttaggagtccatctgacaacaaaaccgccaccaaattcacaacctatgcatgcaatgctccaaaaatacatccaaacctatggggatgctctactagctaaattaattaattatgaatctcggctcttaattcgctatagctagcacacagatagctagagagatcacgaacataatcacatgccaacaaacccaagtgaaaaagatctcacgaacataaaaactgcattgccaacccagagatcgagagaattaatttgccccccggaatataatcgacacgggattttgtttccttactatagccgcatgcatatctcgacagtatccatggcggcgcccccccctgccgaatttgggatcccgttcgttcgttcgcaggagacaacaagaagttaatgacggaaatgcaagctcaccacacgcgtatctgatcattcatgtttgccgatcaatgccgagatcgatacagctcggttaattagtttccccatcgagcagatcgatcgctctccctcttcttttttaaccgcgcagtgaagtagccgatcgatcggttgacgatcgacgcgcgcgtgctcggcggcgtttggtttgtgtgatcgatcgatgtggcgatccatggagaacggcggcggcggaggtggaggtggagggatcgccgggaagaagaggaaggcggttggtggcggcggcggcggcggaggaggaggcgggtccggctacggcgagagggcggcggcggcggcggtgatgaggagggagccgcggcgagggctcggggtggcggagctggagaggatcagagtgcagctcgaggcggcgcagagcctcttcatgatcccgccgtcgctgctgccctcgtcgtcgtcgtcatcgtcgg

SEQ ID NO: 5992 - DNA, 73539 bp, Oryza sativa
  unsure (1)..(73539): unsure at all n locations
tatcatgcttaaaaaaaatttgatgataaatcaagtcgcaataaaataaattataattacataatttttttaataagacgaaaggtcaaacgtttgtcaaaaagttaacggcgtcatacattaaaatacggagggaatattaaaatacggaggaatcattaggttggttttttataggacggatggagtagtctacactgtaaagtagtactagtaccatatgcctctggctgccggatgtactgcagcaacgcggtgtacgtgtcgaagaaggcgtagctcatgcccgggtgcatcgcgctcatgtcgcggaggagcatggtgacggcgttgttgtaccgagctgataggtaattggcctccgcgtggcattccttggtggggctctgctcccgcagcatcaggcaacaccccagtggcgccgcgcccacaaataaaagccttcgcgtcccgaggtcatacatcctctgaaatttatggcacatcacatatttaaaggtcagtatcaaaaacttatttaaaggttgaactgacccaaaaacttactaaaaataaactatttgatcagccatgagagctataatgtctgagcaccgagatcttatgcgatacgatgccatcggacttttggtactgagtgaatggtatatttttagaattagtttttagcacggtttcttattcaaacaagttctctaaaatggttagtttgtcaaaatttctggtttgttcgatatacattcagctggacggattgtatatttgtcatttgtgtgtacatgcatacctgcagctggcgtttcagggagttggccagtgagctgatgaattggtcttgggtgcccacgagctggctcagcaggacgcgattgattatatcgttgccgccgatggcgacgctgaagagcgattcggcaaggtgggtcgaggcctgacgcgggccgagctgctccaccagtgttgcatgaacagtggagtagtgctgatctatctgctcgtcgaagctgatgcactgaccctgcatgcatggcgcaaaagtatacaaaattaattactacttgcgcgtaatcatggaccagagtactacgtattcgaaagacattaatctcgatcgtacagtttcaagttctagctaatattaccatgtttgtgagattagacacccctgatcctcctgaagaaaagttgacacccctcaggtataccgaggtgttgcttatagagaggtatggaggagggctggccaccccgagactgtcagctgcaattaatggaacaacaagagaagtatttgccgtgaaaaaaatattttcccttaaggccatcttcggttaatcccaaagagaaagagatcagcggaaatttattacatatttattgtggtgtgaaattattccccctcaaacccctccaatccccttcaaccctctccaacccgaacgagccttaagacaatggtcacatgtatatacatagccaatacaatagcctctaattttaattcccaagagtgcgcagtgtacgcgttgatgaaatactcaccaaggtagtcgacgaagttgtagccgttgctgaacctgccggtgggcttgccccccgggtagtcgacgccgttgtgagggtagttggccttgtacatcggcagcgtcgctggcaggtagttgttgttcccgacgtccgcctgcgagtcgccaagtacgtacaccgccggggcagcgccgcgtgcgcgcgtcgggcagcaagccaaagccacaaggaggagggcgacgacacagacgcctgcacaggccgatgtcgacggtgtgcaccggcgccagaaacccattgttccttcacagcgtacagtgtgacgtgtgtattaaagcctcctagctactctctccgtcctaaaatataacaacttttagcccttagaatttatcttaaaatataactacttctccacaaatatttctcttcctaaccaatcacaactattcaccattcatttttcccacctgtctccactacccatccaatcacgacccttcaccacttatttctaccctacttttttaataatcgtgtccaactctaaaacctcttatattctgagacggagtgagtagtgtatataggctgtgtttagttggatccaaagtttggattttggttaaaattgaagataatgtgactgaaaagttgtgtatatatgacaggttgatgtgatggaaaaggactgaagtttggatgcaaactttagatctaaacacaaccataggatcggaggacgccaaagctagctacatttatagcctattgttgtgcacacaaagacggcagcggctgtccaaagctatgccaactttaggattggacgagagggactagtcaaccctagtcaccgtacagtactactctctctgtttcgaaatatttgacgccgttgacttttgaaaacatgtttgaccgttcgtcttattcaaaaaatttaagtaattattaattcttttcctatcatttgattcattgttaaatatatttttatgtaggcatataattttacatctttcacaaaagtttttgaataagacgaacggtcaaacatgtgctaaaaagtcaacagtgtcaaacatttcgaaacggagggagtatatatataattgagtaaatttcatgaaacaaaatatattttgagaaattccgtacagatttaacaccaaattacatattgaacatgttattggttggggctctagccccagctctctggttggcaggaatctaatcccatatatctgttgcgtagtgagttcatagtgccagcaaaatttgcacagcaaccagcatacggccaagcagtgatggctagttggctggagacgttcagggtgaaagaaatgatgtgcatgaaaaaacattaggctgtttattactagctggatcatttgtgaattgtgatcattaattatattgtagattatttttactcttgtgttctagctagtagctgttgcagtgtgcagctcatggcctttatacatggaaaagactataggtactaactttttcttactaaattctaacactgaagtgtcatgctacgagttcatctagatttttcataacttccatctacctaaatcaaacggttgagatgattattagtaaagatttagtaagaaaaaactagtatgtgtagcagtgctcttatacctattaatttcaatctttttcagttcacttcagtctttaatcctctttttttccctatccgcgtaggattttgaaaaagtatattataattattatgtattatgactttaatataaagccccaataatattttcatcacgttgtacattcgccactgcacattctgatggtacattgaactacgtttgtacctgaagaaggtgcaagtgcacatcatattatgtctgcacgactgcactagactatttgccgaactaatgtggaaatacctgcgccagcagtagctgtgaatctgtgatatgatcctttctttttattatcacgtttttgaaaataaataaataaaataaaataaggtcaatagcttaggacacttcgtcagtgcccggtttttaagggccactgactttccgactatgatgatcgttggtgccgattgcactgattttctagcactgagtggtttcaattattaatacgaactagaaatgcacggacaccttgtttaattttgctttaatttttattgtgaatgcttatgttagaataatattgttgaaatattccctgacttcattttaaacatgttttgcttaataactgatttggacattggttatgatttttttctaattaccttgaaacgtataaactctatactaaaagtaaaattacttgaaaccatataaccttaaattgatgagaaaaattgtgtcggttcatatctatttgtattatgtatgattattttttggaacatttagcacaggggcggacccagggggtgtgccgggtatgcaccggcacacccaaaaaaacgaaaaacttatagtatatagcatgtattagtttggggcaaaagttgatgagtatgaacgcatgagccagcccatcatagatgcctgtgtgatgtgttgtgcgctttgcatcgtgcaagttccccgcttcacctcgcattcgcgtatccacttggcatcgtgtgaaaggtagctagggtcagggcatcaggcgttgttccacattcagcgagcggcggcggtgacaccgaagagcacgacagtcaacaggccagagcaccgatattggctggacggcgagtgtggagcgtcgacggtggagacgagagccgcagccactagcatttagagacatggcgaagcaatgtcgatgcgagcccggtgagtctgtgagcaacgcaaggaatgcagctagcagcaaccacattgaccaaggcaagcaagcaggtccagcttcgcatcatctatctaaaacttcagatacagatatactctttgggacttttagtctctcactatttttagtttctttgtctccctgaattttcttttaaaggagagctagagattggttgaaaaattgaaaattctgaaatcagttaatacgaagaggaacaagggcattgtcttcttttagcaaggcatcagaaaattcagattatgctttgtctaggccatgtacagggctctacattttggtgtataaaatgctcggtttgcctatatttttgtgtatatgctctagaccaatgtgtagggcttgtatttgtgggcacacccagggtataaatcctgggtccgccactgatttagcatatcggtttccaaaattttactaacattttttcttgtgtgctataaatgactttatggatttacgaggaagcaccggcaccatcgtctttgctgaccgtgctgtggcctccacagattcaccctcctgaagttcgagatggtgttgctccattcttcgctcctccagatttttttttgtcttcctcacatatctttaattttgacatggaattttgctggtggagcagaggatatgccatacatctctgtttgtttgcatgcattcatatatggtagatagacatctaccagtaaaaaatcatttgtcggtaattaaaaacttttcctgactactggatcattggcaaacactggtggtagactaagtgtcgacaaattgtttgacgctaagagcaggtacaatagcaggctataagccagctgcaaatatattttaaggagataaatgagaagagagaaaagcagtgggctacagatttgtagccagctgtagcacactccaagacgcagtgtgtgtatgacaggtgggtctatgtattaatagtgtagtatataactattgtatgaatgagctattagattagctatagatgaattggagctagtagttggctatattattaaacttgctctaatggccatttataccgacagtctaagtgcttccatatgtaggtcatggtgtagcgtgctctcgtgttccattatcttctcgcgaatgctaggcgacacataccatcccccatcccctgcatgggacgctccaatccctcagacatgaatcgctggagccgatgaggatggacacacttctccaggagatgatgagattgtgtacggtggactgtgaaggtagtcccgccactcccgataggcccgcatccaagtgactgtatggggcgagagttgactagagatcatggagatcgaagctcctcaccacacgacctcaccaactacaagcggttcacgaagcatgcgatggaggcagatatgctcctcacgggcactgatgagctcttcgccatcactgacgtcctcttcatctcacagtcactcctcccctcgggccactgaagatctgctcaccatcctcaagctatacgcccatgtatggtacgaatcaattttttcttggtaccaataagacaatgagcattgggcgatatcagtggatatcaatatctagtaccgacgagtatcggctgatacccagggattaaaattttggttcgaaattttcgaaatttcagaaccctcccccctccccccggcatgccaatatctcggctgaaatttttggtttttctccaatttttgtgaatttagtcaaattcagttaaattgtgtcaaaatttcagtaaatttcagtccaaaattaccaaaattcccagaatttcggttctaccaaaagggccgaaatcaaaattgaaaattgtgccgatacctatggggtatcatatgatacctagcaagtatcatgcatgactctggtaggtatcacctgatatatagctactagctagtatacctagcaagtatcatgcatgactctggtaggtatcacctgatatatagctactagttagtataccgggtctggatcccctggagttgagtataactctaccgagtggagttggccaaatctgtactatccattgtttcctacggctgagatcattcatcatcaatttcacctaataaattaactccttaaattaatggttaaggcttccgaggaaacttagttttttcatgtgtttgctctataatagcgatttgattaagttctcacccccaaaaaaaaaagtaacagaacaacgttttgttattccccaaacaacagatatagtcgatcaactctaaagcaactcgcagtgtataccaacatagtgctttcacatatatgcaaacagtgaaccatatcaatattaatgtgtatgatttttttagataattgatgaagcatgaaatttttgttctaattatacaataaaaatgatctcgtgataagttgttgatgcgagtttatttgttgcatggtcagttactggtttttaaagtataaattaatgtggcttaatcccagcccctgaagtatatggaatggcacatatttggccaactccacccggtagagttatacccaactctaggggatctggactagtgtggatgtggatgcagatgtggatcggattatttcggacggcggatttggtacagagtcagtgcaaactcggttcggaaatgaaataaaattgtcggatgttatgtttgtattcatggtgttgttgaaggcatgtttctttaacgatttctagcctagcgagagccctattcattacatacaacaagaaggcagcaatacaataagcagcaatgcgatagtaaaataacatctgaacatgatctctcaaggaaaaaccagccaaaacacatccataatagtataattttgcttaagtgcttaagtgcagcttgcataatatataacatcaagtgcttgaataatccaaaacccttccaggcattgcttgaaaatataagtccatccatggctccagcctccatgccaatgccataacatcaggtgtaaagtcccaagtcctaacaaattaacacatccaagatcaagataacagtatggtaacaataattccatgcagaagtacaacaattactcttgcaatttactaagttgcaaatatgaactagatctatacaacacacatcaacatgcaaggatccagacttcacttctcactcttcatcattactgtcggagggtgaactcctggagcgggggactaaggggcccccctttcagttcggcggggggcagcgggtgagaatcaaggtttggtgcaaggagtgatgtggagggggtcgggcccctcaagaacgatgagataaaatgggtttatacaggttcgggccactgagaagcataacaccctactcctgtgtgtgcttgatttctatgaggaacaccgtgtactagttggttcaatcagagagtgatcgatccccctctcactaggtctagacctccttttataattcaaggggttaccacaggggcccaaaagatctacctagggaagaaggaagacatcctttacatttattacacatcttatttctctgacagaggaaatcatgccttcgacgctccagcatggccctatcaaatcaccgcgggtgacacgggggacgtgtgcgtcattccccattaaccatctgaagactttgggtacccgttcccactaaggaatggataccctaatttaaattggagtaggaaatcatccccggcttgcacacggggcaagggatttctcatcatggtgatgtgactagacggcaccggccacacgccacctgacagcgggccagtgcacaggcggtcagcgcgcaggcacactcaccctgccacgccggtcaatcgagtgtcactcagcctgtcagccacgcctgcacgccgcatttaataatgcggcgttatgcggctgcagcaccagccttaaatgctgttagttgggcgttgagcgcgcccacctaactcacgcatgctgggggggtgcgtggagggggtcgggatggcctgacccctaactgggagggggcagccgctgctcaaccccgggcccgaccaccctcaggggagtgccacatgagtttgggggcggcctcctccctctagacacaatacccccaggcctatatcaccgacaatcactactctgttgcttttctgtaattatgagcaatcaatatacatttttttgacaataggactacaaaatgtatgaaataaaatgttcctactaatgcaagattaagttggtcagtgtcataccatatcatcaatctcgtcaagcgtcaaattagcaaccaaggtctctgcaacctcatccaaccctcttattaggatctgaaaaattagaaacaaagctatattagactattagcaaataaccaagaatgccctttacaacaatataaatgagaaatgacacaagtgatcacctcttctacatcgagcaactcaatccttggtacaaactaatgcttataccattttcgagttcaagtttagtacgaaatagatcaataacacgtccccctgcactaaaagctgattctaaagcaacaatgaaagcttgaatggacaagcacgtgaacaggatatacatctttgtgagctttccaccatgataagacatcaaatttatctccattaggaaccaacagtgatggctaagccatttatttatccaagtcacttgcatcacttccactatccacatgtgaggcatagacataattcataaaatcataatctgcttcttctatagtatggctttcttttgattcaacattgacactagttgttggtgcaatagtagtcttataaaaagaagcatattcttgataaaattgcttaacaacactagtaaacttttgcataggtgcatgatatgattgcttaccatacacctcagcatgttatactctactgcctttgtcttaaacctaggttcaagaaagtatgccacaacaagagtaagatttgacctcttccagtacttctcaaccttcttattcattgaggtggccattgttttgatggcaacatcatcacttgtcatccatggagtaattaaagccttgatttcacgaaagttgtggtaaaataaatttgcagttggataagaagtacctgaaaaaaaaatcttagtgatatcatcaaacctcttcaagcacatgcaaagtgtttagttgccttataccaatcttcagcttttggaacaagaccctcataaatttctcttttagtttcataaagcctctcgaaagactttctataatatatggcatctgacaactgacaacatatagtacgttgaattccaccatgtcaaaacatcatttgagactcccctcgctatatccaatccactctcagatgcacattttataaattcctccttctgtataggagaacacttcacaagaatcacgaatgatcgaatactaaaaacagcttgtccaatatgtgccaaaccatctctagcaacaagattaagtatatgacatatatctcatatgaaagaatgcctcatcacacatgaggggactttttctattcagcaccttaataacatccttaacacaaacatcatttgctgcttaattgtccaaagtaagagaaaacatttttttatcgatgaaccacttatgcaagcatggagaaaatacatcagctaaatttagcccaatatgcctccctttacatgcatgaacctgataatccttttttgaacacaccaattgtcataaacccaatgaacagtgatacacatgtaccccttgttttggttagaggtccatatgtctattattgcactaaagtgagcattaacatttttaaaaagctcatacaaccttttccattcttctgaaaatataccaagtatatccttcctaactgtgatacgactcttcaaaggaaaagtaggccaaagagattttatgaagtcaacaaaatactcattctcaacaatattgaaaggatactcatgcatgataattgccaaataaaatttttgtaaagagatctcttgatcatacctgtatgtttcaaccgatgttgtaccggaacccttatccattttgagttactgctatcctggaaccacattgtgggtttttgtgtggttcaagaacacataagtaccatttcctgctattgcgcctagctaaataggcacaatatttgaacttggcccactctttttaaccatctagccatttatcttaaccaccttataaacaatattgtagtgttcccaagctggcgaggatctcttctttgctttttttgctatatgttcatcattagtttcatggtctcaatccccatctgcaccattgttatccacatgaacaacaacaatagtgttggttgccactgcccacagttgatgacctttctaccccttcagttggagctagtgatgaggcaaccatgctagtttcagcagctgctgttgctttagtacctctttttctaggtgccatttttagggtcctaatgaatgatgaacaattaaacaaattataagttgctattgacataatttcttaaagcaaagctcatcactaaatttctaaatcccaaatttcaaattagactacaagaacacaatacctgatttggagccatggagagtattgttggtatttcttagcgacactactagaaatataattcccagcaatagcactagaaataatcctggtatattatggttacatatgtgatccgcaagtgcacggatataccattgtagcatttcacccgggagtattccaaggtgtcgtatttatttgatcccaatgaaagatatgataagagagaactttactaacaattcatatattacttatatacatgaaagtttatgcagaggttaattcagttcaaagggtagggtgacacacagaagaaaaaactaagatactctcactaaaatatagtctaaaataaatggagaaagaataagaaaagtatcattcctgtacttctagtatacatacatctttagtctatacttgctattatacagtcatgcaaccaataccccgtacctagtgtcctcctggtgtttcaagagactacccctggttgctgagttccttacgacaacctgtcctggccatccaaccggggctaaatacggaggagtaccctccccaggaaattgcacttagaataatatacacatgcagaggacacccatactgagccgtcaccatcagcggccagcctctgaaccactgtatattaccccaattaatggtatctaataaactaagcaccgtgcttatattactaaatactactctacatccttgcaaccgacatagagcaaccgaatactcagacactaaacccacaccaatacacctatctggaaagctagttgcatggctatattgattcaagtatgaagtaaagtcggcactcaagtaatatgaatggaataaaataccgaaaatgtataaagaagaatattctattaattcaatatgtcttacaaaagaagagaggaaagctactggagccataccagcaatctcctgaagactcgaggactatgaagactattctattttctactccactagcactagaactactaaactaaacttgagagagctctagatctttttcttgaggtgtgtgagggaatgaatgagaggaggggtatttataggtggagaggtgctctgggagtgtggagatgctccaagcatcctatgagcatctttgctctcctcatgacaagtggcatactcaagcatccaaatagcatatttcatctcctcttgctatgtgtccatgacgatttcttcagatagaattagctccaaccgtcataggatgccggtagtaaccgcctggccgaagatgggttggattgggccaactggggggtcggccgaaccctggctggctcccctggcccacagccttcttcaggatgctgacatgtgggccccactttatggtacaccatgttttagctcagaataatttctcattttatatgttgtagctcaaaaccatgtgagtccatcggcgcaaaatatattcacattcttcacgttcattctctcccaactttggtggttaatcacctctcgacggcttccgattgattgttcgtttgttttccatcgattctcctccattcatgcgtgcttctcctgcatacatgttagtagcatagcacatagtggaagtagatattttatttgggaattatgcattgcaaacatagctagtcttcatatattgggtaataatgacggtcgaaactggtcgatagcgaccgtcaacaagtatcacctattgctgttggaggcgatgcgccaatgccggatcgatgatctgtttaggaggccgtcggcttgttgttgtcatgggaacatggaggaggcggtggggagcaccgaggctgattgcgtgggcttctgttttttttataactgttaaaatcttttatgatgtctattttttatccatatataaagttttcatagatgtttacacatacatagcagtcacacataatgtagttcttggtcattcaaacttacggtaaagaatttcacgcctttgcacatataaactttcagcaataaaactatagctgagatctttgataattaccaaactaattactctacaaattttgatatctcttttttttcttaatgactcatgagcatttaattttctcatgagttattgtgatatcaaattggacatcagcaaatatgaacatgtggtacatatccatttttcaggtgacctccgatccatgattccctagcttgtttgtagcctatagaacggtgtagttgaggctcatatatgcaaaaagttattgaaattaattatgccatataagggtacaaaatcaaccgaaatatttatgccatgattaaaaagtatgatttttccaaaatattgctcaatagcataattattttgatgctatactaaatagcttctaaagtcgattatatagtaacaaagaatatattttagaacacctatgtaaaagattactccctctgctataataactttattttgcccccacaccgtttgttttcaaataagtttatttttgagtaatcattgcattagagtttgtgaaattaaaggataaatatattgggagtagataaaaagagagaaataattgcattgggatttgatatagtaagggtattttagtcttttatgttttgtatcggtatacgtaggatgggtgaaaatggacttatttcggacatagcgactattaggcttgcttggattactcgagcaaatttcaaaaaaaatatagagtaattggattctttccttgagcacgtgttgtcctatcaaatattatttaaccggttttttatgccgcgacttggactattcatacttgaattaattctatatccaattagttataaatgtttgaaaaacaatgtatgatggggcaacctgtattattgaactgtttcatacttttatgttaattcgcatgacatatgaaagggtagggatgttgtctctcgataaaatattatttaatatttgaatttgtaatttttgtttggatattgtagatttaatttagatatgtatgtttatggaatgatatatgatgactcaatatatgctgtcaaatttttatagtattttattgctagattaggaatgagatttgtagcttgaaaatttttgctgttttagtatataaaattattgatttttctcgattaatttagtagctaaattaaaggaggaggagagagcatgagctagagaggagagctacagagcagtgtgcaccgcaaacgcatgcgagtgggagggggcagcgagtggttttttacttttaaagttctctacatatagttctaatggttaaaacaaatgggtccatcgatctaagtgagagtgcggtaagttttttttccatttttgttctcagaatttttagatcaattttctaatttattagatgcatcttgtggtaggttaggagcacagttaagaatgtttaatggacttttattacataatatattgatatacacgatgtttaatttaatgaatatttattatttgctagctagaaattaaggaggccaaagtgagcaatgagagaggatttttggtagatggtattttgtttttttctattaaaatagatctaatggtgtaaaataatgggcctattaagtgaaaatcgagggtaagatgttttgctttttttagaatttcttggatttctctaatttattagagcgctaagtgatgttttagaagcgtttgtagaaattttaatgaacttttattatataatagatagataactttatcttttacctgtgatccctcttactaaaatcacatgtgacaggaaaaaaggagaaaatatgtagtggaaactgcaacctatatgaaaacttgcaaactcaatcgtggaccattggatccaaaatgtgcagcctgatgaagccttgccagcccaaccgtccccacgttacattttatgaaatgccccccgcaccatgctgtgtacaatttcatatacatcctttaaatttcctcttttctcacgttgctacatctccacttcaacaccaaatggtctagatccaaaccagatccatggaggaggggggaggctgcacggcgcgtggagattgatagagcgacgacgagctcgggccagtcgaatagttgagtgaggagacacaacggtggaggcagaggcggctcatgagcttgaatctggtcttcctcttccccatcgatcctgcggtgagcctctctgaagacctccaaatccctttcctccttagcagtcaaggctggagctgctgctgttctcttaattgccaagagaaatgctccgagaactgagttgttgtggctgctgcattgtactctcgatgattttgtatctttagttccttagagcatcaccaacaatatctgtatatggttatcctgaaatttggagattttcgttcaaaaacccagtccaacagaatccctagccaagcgcccaatagttcaaaaaccgaatttttcgttctccacaagtagggagaggcgctcgctcccaatctccctctctcgtgccgtcgtgcgaattcccacgcgcacgtgaagtgttctcgacagggggttcatcacgaggttgttcgccgtcgcatcgaggtgtcctacaggtgcccacatctcacgcgcgcgccgctgcctagagctttctcggcgtcgatagttcctgctctggcggcggcagcggcaccatctccactacagccaggcgaacttccatcggcccgagttggtttctcctcaaatcgggattggtctctcgatgatggagatgagcgaaggtatctgctagtgcttgctagttttggcgctgctaatctgctactacgaattctacagttggtactgaataatgttgttggtgccggtggtggtgttgaaagttgatgttggtgttgctgatgatgtgctgttgttgatgctactgacctgctgctagttgtgatctgctgcttgttgcttgccatgctattgctaattgccatgctgttgccgatctgaatttttttttgaacgacgtttgctgatctgagttgacgctactgatctgctattgttgaaaatggtacgatgttgttggttctggttggtaattagggactttgctgatgctgctacttgtagtggttctgcttgattgtttgcaggatcagatttgctgacgtgctactgcgtggagaggggtgacagggaggtgaccaccaagtggttcccgcgatcaatggtcacacgggcgagcgtgataatctcacaggagggagagcctgaaacagatttcagttggtagttttgtagagggaccactttttagatttagggagtcaattttagccaatctcttggagggctcaatattttaacaccttaaattttatttaagattcccataaacaaaattttgggatactcttggtgatgctcttactgagttattctagtacagtactgaattttaacacctatcattattctgaatttttttatgctacttgtagagaagtaaagagcaatactttctagtatatctgttagtgggttttattatgacccacacaacgggtaatgtactaatgagaatgatttgaactgaggaaattaaatttatattaatatttggtgctatccctaaatttatattaatatttggtgctatcccaatctgcagtccattggaaaagcttgagaggagagcaacatgcaacagacaataatcctgtgggtctggggttcagcacttcaaaactgacgaccattgtgagaatacataggaggtgctaactaagatgattgaaggtgacaatctagaggaggtgctgcaggaattggaggagatgaagaacttcatcaagacaatgcatagcacttatcatgctattaggatttaaaaagaaaattcatataagagttagtttgtaatcaatttgtctatatactgaaatgacaatattacacaatgtgtaaaatgcctctgcttcttccaacttgacttgcactgcttttgcatctcaatgacagcccgcgcacgagcagaactcgacggcaatccacgacaatgcacggcagtgagagttatcgttcttcccttccttaattcaaaaatgagcacaagaacaaggttttgctgaatttcaagtggacaatggacactgcagagcagactgaagtgaatataatctaccttatgcacatgacaacaggaaatcgtgcctagggtggaaaatggcatctccctcaccacatacacagaccacatatatggacgagggtgaacagatatataccttcatgaaaaaaaattgacatctgaacattcagggaacttaattctgaagaaactcaacatgaatatattgttatagagacacgaaaaactttcatgaccatggtgtgcaaatgcagcacaccggtttgtgggaacacaggtgcagaaaattactagttcaagtagaaaaatacagcacacagaaaatttatccagttcaagtatatttaggattttcctagaaaatcataggtccagattgtggccacaaacaattggcagagtcaacctagtccatcaatgtataccgacatggtctgatattcagatgtcttctgctgacacaatttagatcccacagagttttggcaggtaataacattcataagttacaacacttgtgcacaaatattagttatccccttcaaggtgttgtctaatcaaaatgcaaccttgctattaaatggctaaaatctattaatagatcacacacgtgtgcactggatgatggcagtggctctactttgaacaaaaaactactctcagcaaaagaattctcgccagctgctctcagcaaaaaaaaacctgcacccagcaaactgcatagtgaaaaaaattgttaagaaggacatatatacttgtgagcatagataaaaaattgttaaggacatatatactggtgagcatagatacatacaaagttttattcacactacggaccaaactaagataacaaaatgttcctggaacacaatggttgttctaatatttttttcctgtcttcccatatgtactcttaaccatttcaagctgaatattagctgtccaaaatgtccttgtcgcaatatacatttgtatatgagccgaacttgtcgcaatatatttaaatattttccatatgtaattcttaaccattccaaactgaaaatgcaatccaaaatgattgtgcttcctacacatcccgctgtatattacatgcccacttgcccacctcgaatccttcccatatttttttatactttgttccaagttgataacactaggtcccaaatcatacagtcaaaaacttaaagagctataaataagaacccatgcaaaaatgcaagggaccacatcagctaacaggacaattgtacatttgcgatttatattattaattagactcacgacgacaatactaaaaatgttattacctcacaatggtcccaactaattatatttcaacatgtgttcactacctactgttagttaaatattatatggccacctattatcttttacatgaattgctactttgttccaaggaaatctacagtatgtccattagaaccagaatgttcttggcacactatagactttacgatacaccgttagttgaattttggatgacaacacacaatcttttacagagaaacgctaacttcttccaggaaattgtatgacaactattataagatgactgatagttaaggaagcatgatgtatagaaccttgcatcactgttgtggttctttgttaggacagttgcgcgaatcgtgcagcacgacttgtttgcacttcttgcacctttgtggtactctctcttttttctttatcttcttgttttgctttttctccttgtcattgtgccctttaattctctttatccgacccctggaacgagtgtcatttggcgggtggatttcaatttgacttggaatgctacatccaagatatgattcaaattcctcaatttggctaagctctttttcaggaaccatctcatttaatttatcaccaagcacaactagttcatccctcaaaagttgcatagctgctgctgattgcttagcttgtaggataagcttctccatttggttgcatgcttctgaaagcattttttgcatcacaggatcattactgttgcttgtgttttcttccaacaagataccatctgcatcgaacacatgtgtcttcttgcagtccttcctaaacctttctaataaatagtatctcggcagttcacttagctgggcacttcttaggactggaattagatgacgacatggtataccatgagtttcaaatagcatacatgtgcacgttgcaaccattgtctgtctatcataacgcacaactcttggcttcctggattcttcaatgatatcaatgattttgacctagccctcttgttgcacattgtcaataaggcaacggtccctggcagctagcacctctttctgaattatgctaaatacctcatgtgtgaagaactcacttgcatgcttctctatcacccattctgtcttcaaattgcggattgtgtggagcgtaatgttatcttcttctagttccttatgtctttgttcttctagtgcagcatcaaacctgagccaaaactccaccaaagcaagcttccgcccaattagacgagaaaagaatgaattggcactctctgaccttgaggtggtccttaacaatcctgacaaaggtatgtcactaaaataagctggcacccatgaacgccgttgatcgaactttgtactgaaccccagaccccagacccacatctcaccatcattctaatgcaatatgcaagataatggagaacataaagcacgacggcaggccggcagcagcaacatcaattctacgcacgatcctcccatcgatgaataacacaacagtaacagctgcagacgccgccggttgctccacatcagtgggtagctcatcataaccttacagaacagcagtaatggagggacaccattactaccttttgttggccaatcgatgaggggccaggcccaagtggagggaaggacaagaagaacaacaagaagaggaagctgtagctgtctctacaagaacaccgacggaatactaactctagttcatctgcagttgtcagtgttggtggcatcaaaaccctagttcatctcagcccccaaattgttcaaaccaagcacattccacggaagaacatacacgaactatagcagggatcaagaagagagaatgaccttaattcagtggatgctggaggagcaatcggcgaatcgaggccgccgttcgcagatgcctcgacgtcaccggagcagcatgggggttgattcgtgttgccgtgaatcacgtggaaaggtggcgctgctgccgaccaccgccggtgccccaccccaccccaccgccgtgccgccgccgcaccacccctcccccaaccccaccgtcgtgccgcagcagagagttgagtttggggatggatttggggatggatcccttctgaatcggagaagatgtgctgtgggacaatttgggggctgagatgctaaagtttggaattaggcggggtgttttttgaacatttcattctgtggtgacgtggacatatctggaacctacgttttgcatccaagtgtggtttctatgtttgcactagagatagtgtttccattacatatcttctcggaaaaaagctcacctctcctccctctcgcctcatatcaccgccgtgccctccagctggtgccgccgctgttgaccatgcaccctcgatctttcatgtatgcacaataatattttttaaaacaattgaaacatgcaaacaccctataagtaatacccaaacttcaatgatactctataaaaccactcaaatatttgaaataattttagaagcatacttagacaattgtcaataattttaggtcagtttttagaacgtatgatatgatgtgaagacatggaaaacaaacatgaatttaaacggttgaatggaaatagtatatatggataatattgtttacacacaaatttggcacctatggacgaaataggggaaaattaccaaagtttagaaagtgacgggttttcttcacagggccggtcagaccacaggtgtgtgggcggtctgaccggctagtagggccggtctgaccgcaggtatgtgggcggtcagaccggcagggtccgtgtccgagtctgttttcgtcgggtctcgggttttattgctcgggaaggcatgtttcgtgttttctttggtttctatcccgagttgggcatggagaagggcctgtagagggcaagaccaacccctatttaagggacaaggccggttcattataaaacccccgaatacaatctacttgaatcgttcttttaccatgtttttctattttaccctagtttagtccatctttgtcggtttgcgccgtaaaccgtccgccgccgctgcgggagtgcgacacttctttataggtttgtcttgaaaaccttccgttttgcccacgagacgggtagttatcctcttatcgatctaaatcggcctagaggctgattttgatatccaaatcggctccgttagccggtttacctgtttttctacgaaatccatcttgatttggccctttggctagatcgaggtggttggcgactccatatcaccgcaaggcgtttaggtgttacgatcgtgcttgttgacttgtcacagaaagttgccaacacgatttttggcgattccactggggaacgatctaatcggccatatcacggccgaatttcgtttaatctaataattactgtttcgtcgaatcatcgaattagtttcggctaaacagccggaattaacctacactgtaattattattgtcgccgacattggttttgtcttcaagcttaagcttaattgttctgtttgatcacggctagacgttaaaccctgttcacacagggagcagcagccggattagcaacattgtttcctttttgttccacacggcaacagaaagatttgattgaccaaagcttactgtacacgggttagaaaagatcaggctattcaagccgatctattactgttcacattaaaaaaaaagagacaaaaaccgattcaatttgtatcggttacactgtgaaactttagattagtttccaaattttgctaagtctactcggttgattaccaaataaatcaaatacttttgccgagtacagtagcatacaaggaaaatttatgaccgtatattaatttattcggtcaaatattttggctatgagctatatggccgaaattaatcaaggattttcttcatcaactatgacaagcgggaacgggttcaacaatactactacacaatacattaggaccgatcaaggcgtcatgagagaaaactttcaccaaaggtaacctccgattcgcccaacccatactttgctattcaaaaggttaatgatcgttgtgtagattcatatgctacttctagttttgctcctatacaatatgcttataatgatatggggggggggtcaatgggtgtttatacagccgattacataggaatcggctatatgcaaagtcgaactgacggtatgaccagtcgtgacaccggtctaaccgcaccctatgtcggtcagaccatgtccaacatggccggtcagaccatgtactatgccggtcagaccgtgcccaccatagccggtcagaccgtaccctatcctggctagatcaggcctcctatggctagcctgaccgcaccactgacctccggtcagaccgggccatgggccggtcagacgggctatctatagtcggtcagaccggttccctaggaatttctccaggttttcataccacgactagcagtactgattttaattattattcatcacctgttaatactgttagtcatgctactccacatgtccctaatacttacaatgatcctaatggaggatattctcacgatactaggtatggccaatataacaatattgtgccacaacaaccgctctttaggccaccaaatccaccaaggcctgaaatcatggaggtaaggaatcgtgctagggagaaccaaaagccgtattctgatttttatgacgttgtcccatatcctcctaattataaaattcctgaatttaccaaatttagtggtgagtatagtaggactacatacgagcatgtagatcaattcttagcgcaatgtggtagggctagtagtatgaatacatgtaagttgcgcttgttttctttatctttgtccggtactgctttgatatggcttacttctttaccggcaaattctattgatacttgggctcaattagaacaaaaatttcatgattattttcacactaatgaaactgatcttaagttgtctgatttaacatcggttaggcataaatacaatgaatttgttgctgattatattgaaaggttaagagatgttaaaaaccgatgtttcaattagaaaataactgacaaagatttggccaacattgcatatgatggattgcttgattcttttaaagagaaattgaatggctagatatttcttgatgttgatcatgtgttgcatgaagctctggctcaggaaagccgagtggatgacaatagtttaaatgccaccttagatgatagtgcaatatcatgtatagccgaaccaagcgatggttcggatcgtggtaataatttgtgcaatgatgccgtaacgagtatagccgaaccaaatgttgattcagattgtcttactagtttggatgataacgcaataaccaatatagccgaaccaagtgttggttcggattgtgttactagtttagacaataatggaatagtcgaatcaagtaatggttcggattgtattgctagcttacagaataatgccattgaagatatagccgaactaaatgatggttcggattgtatcacatgcgaaagtgaaatagcattgtcacctaagaccgagtcacaaatcggtcatgtggatgttggaaaagatgataacaatgtcttgcgggatagtagtgaaatagaatccaaagttgccatacatacatatcaaaggccgtatcctgaacatgtagattcagttccatacccgcaaagatttgaagtgtccaacttcacgaaattcacaggtgaggatgctataacaacaatagagcatatcggccaatttattgaacaatgtggtaaggctggtagtgatgatttgcttaagttgaagttgtttcccctttccttgtcaaactttgcatctacatggtatagtttacttgctcctagttcaatttctacatggtcatgaatggagcatgagtttcatgattatttcaaagatgcaagcttgatggagcaaagaccgattgatacttcatcggtcacttgtgaaactatttcggttacatctattcctaagaccggaattgttagtgatcctcttcctgttagttctattgatgttgacaaaaagaaagggaaaagtgttatttggggatcctcggcccaagaataggatcaaaaatacgaaggccgaagatcataaagttgcaaaggatgagtcatctatgtcacgtcctgataaattcatcccgaaataaaaatcattcgctaaaaggaataatagaattaattaaaattcgaaaagaaattggcaaacactaaaatacgtacaagaaaaattcaaatgtggcccggagaatttttgttaaattctccttggtctaaaaggagccctcaaattttacttgaattttcagagcaccagaaataattattaagcaaaaaaaacaattatcaaagtttattaaaaagaaaaacctaaaaataatcctccttcctcctttgggccaagtctggcccaaagtcctccctctctctcttggcccagcccaaagtctccctctcctccctctctttcccctctctctcccgggcctctcctccccctcccggcccactccctcctcctccctctctcccccgggccgcctctccctcctctcttcctgggccggccgcccggcccaagccgccccctgcccgagccgcccctccttcccgcgtgcacgcgcgtcgcacgcgcgctgacgccgcgcgcccgcgtggggcccacgcgccaggtcgtcgtcctcctcccgcccggcatcctctctctcttctctctcccgtgaaacctagcgtcgtttcctcccctaaatccacgcgattcaagccggctctttccaaattaattggggggttttaatccccattgaatcctcttcaattgcccccaatttcccccttgaatcgtgcccccaatcgccgggaacgcccgcgccaactccggccaacttccatggccgccggccgccttttccaccgccgttccgacctcccccatggccggctccctctcctctcctataaaatggaaccccctcgccccgttctctcgttttagccccctcccgcgctctcccgtggcctccccacctctccccgccgtcctcctctctctcccgtgccgccggccgcctccagccgcctctcccgcctcgcccgcgcgccgtccggccgtgccgtcgccttcctcggctctgcaacaccgtccccttcaccggtctcaccgtctcctcgccggaaactcgccggaacggtgcccccgccggcaaccagtggcattggtgccactgtactccctccagccggctactgtccctcgtcggtgcggcagccgtcgtcgtcgccacctccctcggctccgcgacgctgccctcatccccggcatcacctcctcctcgcccgaagcttgccggagtggcctcctcgtcggcgtccagtatctccccgcctccggccggctcctgtacgtcgccggtacaccgatcgacgtcgccgcgttgtcctctcctccagctgctcctttgtttcgccggaacgccgtcgcccgtgctggcctctccatcctcatcgtcgccgacgtcccttcggccgcccgttcatcctcgccggctcgtcgtctcgcggcgccgcctccgtcgtcggcatcgcagcggcgtgttccgcgccgtcctcgtctccgtgcagctgccgccggctgccctcgtcgcctcctcgccggttccggtcgtcgtcctctcgtcgttcccggtcgtcatggcgttcgtccctccgtcaagccattctcgtccgtctcgtccgcgtccgtcaagtgtgccgctgcagccccgtcgtcgtcttcgtcctcgcctccgcgtcgtcaagccttgtgccggccgcgtctcgccttcgtccaaggatcgccgccgaagtcgttccctcgccgtccgtctccgcctcgcccgttcgtcgttgtcgttcccacgcctcgtcgcgtggtggtaaggatccctctccctcgctgccccgtcctcgtcctttaggtgtcgcccgtgcccgttgtgcggttgtcggccccggtacccgtgtatcggtgtcggcagtcgttcgcttgtgcgtgtggtgaccgtgttagtgtgtccgctcggtagccgcgtggtttccacgtgtgcaacccgtgtggtgtctagtggagtccgtttgtcggccactcgcctcggttgacacacggggtccgcttccgtcgacccgtggaccgtctctgtgtacccggtctaccgcggtcctttaggttgacatgtggggtccgcatgtcaatggcgcagccttcctgtcttttccaggctagcgcttacatatgttttatggttgcaaagcctaattataataatccgcaaatctccatataacagcattaaacttcggatgatcatatcttggtcatacgaactctgaatcgacccgttcaagtctcctaatgtttgttataacctaaagaaccgtgtgctttctttttatgtattgttattgcttctttataggcttgtagctttgcttgtgtgcttcgcgtagcttctgtcgttccggaggttcccgaagcgtggtttgcggtcgttgccgaaggttcggaaggccgttctctctgagcaaggcaagtcacatcatccttgagcatattgaatcccagtttataaaattattttgatttaaattaatgcattatcgctttatttaaattcctgcgttatcactgttttatttagccatgcctatttacctttgttatgaccttattattattgctattgttattattaccttgttcaccctagaataaacaaaaccccaactagtgggcactctattcatggttccactagtatgaatttaggtagatgcttcgctgattaattaggcaacattaggtggtttcataactctagactttgggaatattcatatcacttggacattatggaatggttagattattgtggaattggatgcatacctccccctctattcaaaaccctcaaaatggttttaggctgggctcggggtgcatggttttgttagtagcacctcggccacctaaggaccggtcttcgggcctctgttgcaaagcactaccgtacttccacatgtctagtgggtaaggcttagtttgtggctcagtctggttataaacaaaagtacacggatggagatggatgaagccgggggtcgatggacatctctaggacaaatgaaggctacacgggctgcggcccggtagtcgagatgtcatggcacagggctggtgtcctgctgctaggggctcaattctgcctgcctgtctgggggttccggccgtaggtaggttgggtcggtactcttgtctatggctaggatgggttggaaactatgtcatgtcttccgtccatatgccgtggtggtatgtggcacgtggttgcacgtgaggaagacgtgtcttgtgggtaaagatgtacacctctgatcagagtataacctattcgaatagccgcgccctcggttatgggcaagcctagcaatgtacccaagttagtgttttaaattcttaaaacctgcttaataactaaaatgtggaatggttggcctgggttggcttgggacgagctgggacccagggtcgggttgccagttcggtctgaatcatcgtaggccttgggttaaggcaggttcgtgtgggttcacggccttgattaataatactgtgtagctctaggatcgcctttataaaatggctttgggcaactaagtgacttttaaatgctgtttactgcaaaacttaaccccgatattattatccccttgtacccccttgcattaattatgcatctccggtgtgacttgctgagtactgtggttgtactcattcttgctcaatctttccccccttcagtaagagaagctttggagaagaagtcttaggtggagtcctggcttataccccagttgagcgcctgtgaagatggagccgtaggcccgctagtccgctgctgtttatttttgattgtcaggcctgaagcgcctttgtaataatgtaaatattatcgatataataaagatgtgtcttttatatcatgtttgtgtggtgtaccccggcttttcctgggacggggattaatacactagcgttcgggaaaaggcaattttctcggtcgcgacaatctagttcccaaaagaccaaaaagccgaagctcacttttgagatgcttatcgctaagttcaagaaaggattagccggtcagcgatttgataatcaaattagtgattcaaaaagaccaagatcatctcgtaggaagagatttggtcaaacatcaaagcaatcggagccatcaactataccaactccatacaaacctccggttgtgatgccatggtatccatattcaatgtcactatatggttatccttttatgtattatatgctatggatgcctcaaccacctatgccgtattatcaaggatggaaggaatcacctaggacagtgtcaaatcattcatctaacccaagacaagaccgtttcccacaaaagaatcggtccggtggatcaaaggtgaaaaaagtgtaaaaggtgtgggtgaggaaagaagccaaaactccggaggtcgttgctatcaaagaggagtctcaagatgttcatgtacctactggagatgcggtggaaaccacgcaagcaaaggagatcgaagccgacgccgtgactgtcaaaattggtggtctaaccgagacagctggccggtctaatcgccagtctacggccggcctgaccgaccttactggccggtctgaccgacggcttatggccggtctgaccgggcctagaggccggtctgaccgaggggcattagagaagagtgggaaaattgaaagcaatacatgagcttccacttcgacaaaaaatatcaagaatcattgcttagctcctggaaaacaaccacagccgaagtggataccttatggcttatctcgctctcaaaagaggaggctacagcgtcttcgggccataggtcaaaaagaaaaggaggccgaagatgcggagaacaagacatgcaataatttagagcctcaaacagcacctaggcaagtatggagacctaaagaagtaaaagttaagagaccggtgatttcccatagtagtagtgataaatccaatttgatgagagaagaatcatcggtcattagagataagtctccttcacatgatgctatggatgttggtgcggtgttcgtcttgccttcaaaatcgtgcagtcgagaaagccgattttgcttggggggcaagacattactatgctcgtgaagaaaccaagagaagatgaacagcgatggatacaacatcacatctttgagccgcattttgttggatgctaaggcaaggtatgggtttattgtgttcatcatcatattatttacctatgtcatgttagaacattgcttactatctagcacatgtgtttgcttatcaaattgatattatacatacatgttgcaaataccagttctaagtagtgaaattggtaggttggcatataatttgtttgaagtatgatttggcttatgagtctttgatatttatttaaagtcaaattgtatgtgtttttatggatcaccatataagatatagattttataattattgtaccatggaagttttgcttattagtaattcggctaatgtcaatggtcaatgtgatgatttattctagagttgttttctttagaaacattggcattgttaatattttgcatacatgctcaagccgattacttacatttgtagtttattggaattcatgtctgtgaggcatatgactttggtgattcattattgaattggctaagtgttttgatgccatgatgattattgtttcaaaagccatttgaattagtattcaactagacatgttagttggatgttatattttttcatatgtctagagagaaggaatttcggtccaataatttgatacaccaagcatctggctattatgtgaagaaaaattatatactaaaggccgatgcttgatttcaaaagtttggacgaaattggcaaagtcatagacagaggtggtctgaccggcattgcacggccggtctgaccggctctgcatggccagtctgaccgggtagacagtgaggtctgaccggcattgcgtgtctggtctgaccgatcctgggcagagagctggggggcacgttacaattgatttaaagaccggattaattgtgaattcggacatttgtgcccataagtaagaaatagattggagaatcactttgaatagaatatttcaatgatcctagtcttgggattgatcggaagattcggcggcaagcgctcaaatattatatcgccgaaaaataaatgtagtattacttggataatgatcaatctaaagttgctaggagagtagtacatgaagggatttgtgaaattcatcaatcggcccgtaagataaattggttgcttaggagagtggggtttcattggccgaaagtaattgatgattgtttcaaatgttatagagggagtgaagcttgttaacggatcggcaatgttcaattagcgcctatcgctgtattgaatcctattatcaaatcatagccgttcggaggttgggctttagatttcattggtcaatcttatgatattaagttgttaagttcttactctcaggctaatggataagccaagtcgagtaataaaacattgttgaaattgccgtttcgccagttgaggtaaatcttggctctcttcggtatttcaagtaagacgagttgtcggttgaagattatacgaccttgatgggaagcaatttttgaagatgtcatcacgagcgtttgaagactttgaacgagatgaagacacttcaagacggtgttttcagagatcaattaatgggaaatacttgaagaaatacttcccgagcatttgacaagatgattaggaagtcctatggccggtaattggattatcaccctgagacaacatattctatgcgtttaggttcacatatgatcaccaaaaaggcggggggcacgtgtttacacccaaatttggcacctatggacgaaataggggaaaattgccaaagtttggaaagtgacgggtttccttcacagggacggtcagaacacaggtgtgtgggcggtctgaccggctagtagggccggtctgacctcaagtatgtgggcggtcagaccggcagggtccgagtcagagtctattgtcgtcgggtctcgggtttcattgctcgagaaggcatgtttcgtgtttcctttggtttctatcccgagttgggcgtggagaagggcctgtagagggcaagaccaacccttatttaagggacaaggccggttcactgtaaaacccccgaatacaatatacttgaatcgttcttttaccatgtttttctattttaccctagtttagtccatctttgtcggtttgcgccgtaaatcgtccgccgtcgctacgagagtgcgacacttctttgtaggtttgtcccgttttgcccacgagacgggtagttatcctcttatcgatctaaatcggcctagaggctgattttgatctctaaatcggctccgttagccggtttagctgtttttctacgaaatccatcttgatttggccctttggctagatcgaggtggttggcgactccatatcaccgcaaggcgtttaggtgttgcgatcatgcttgtcgacttggcacaaaaagttgccaacaaatatacctataactggcctcactttttttagaacaactggcctcacttagtgtatttgtcatggttatggataccacatacctaatagtagtcaactaaatctcggcaggacccaccacataccacgtcttatacggaaactgacttcggatatggagggagttccggataaggaaagacaaccagagttctacatggaaacgacaaggactactcggattgtatccatattgcttttcctagttctacttggacaagggaacacctatgggtataaatacaaggccccctaggaggagaggggacacggacaatcgacgaccacctcaatcaacacctaccacaatctacggaacaatagatctagacacaagatcaacatacaagccaacatacgccaagacaagacgccggatatcgactttagggataagcacggctagtcccctacggtgtctccggatactgtcaggagagacggaagtgctatctctgatctcgccgggcacggattcgaggaggaagactaccctgttgtcgactacgagtcagaactttagacagccatgtcgacaacagttagataggctaccccaaatattgtactggtgtgattatggtaaataaagagcaacgaccggcttcggccaacagggtgtagggttattacctgacaattcaggggcccgaacctgtataaaaatctctatctctatctcttttacctcagtcttgcgtatatcctagtaccaacgatccccatactatgcaaataccagaactgcgacatcaaacatcgacagtggcgcgccaagtaggaggattttggtgcttcaggattttgaagagatgggttcaagagatgaattctccaacaataaactactcgacgacttcactgtggggaagatcaaatccgaccggagtatgtcttccgacgagatcgaaattatcgccgtcgtggaggacgaacgatactggcagcattggtgaccgatccaatatgggactgttctggaagctgacggatgtcctcgcaggcacagacgtgttggtttgattcagactaaggtctacacggcgctgtactccttggattcatacgaaggccgacttcctctatgcgcgatatcgatttctaccgagacaaatgcatccatgtatgtcggttggatttcatatgcgcctgatccaaatatctgtatcgtgtacgtatacggcctgtattggtcctacatgcacacggacaccagatacatgccacgctggaaaagtcaaagcgactctatacacagtcgtgtactcagagacgaatcgaaactttacccaagtacacaggaacatatcagcgcgctaatcaaggtaattagtggattgattttttaaattaatctactaatttcgtaaatacatttggcatgtatctacaaaggtacgcaataatttatatccaatttatcatacctactttttccaatctatacgatattgtcagatctataatttattatgtttacctacagcatgtcttttatacaatatctgctgtgcgagtgtttccgatgttaaatcgactgcggtttaacgctgggggctcgctctattttcttatgtataaatcatgcttacttacggtttacataatgattgatatttaatctgctcgttatatcctgataatactagaagacccatgcagttttttaagtacatactcgatattctctgctatatgtcttgccttctagaaaatatttttcaggaacaattgagcactcgagtaggttgtggtcgagtacatcccactatcgagagcattctcgataaatgcggagttgtcgcgcccaacctaccaacgaagaccgacgacctacctcatagcaccggccatggctggactactcgagaaaaggttgttaacggataattcctcgcgaacgtcgtcggcttgatcacctgacatgattgcgaacggacatccagatatgttataagttgggtatgtgagtcatgctggccacatgagatacacatgtaataaaacaactctagcacttccattggtgttcgagagataattctactcgctcgctggttctcgaaccagtacacagcaatctctcgcaccgcaacttacattggtgttcgagatataattctactcgctccctggttctcgaatcattacgtagcaatctctcgcaccgaaacttccattggtgttcgagagataattctactcgctcactggttctccaaccagtatgtagcaatctctcgcaccgcaaactttcattggtgttcgagagataattctactcactcgctggctctcgaaccagtacatagcaatctctcgcaccacaattttcattggtgttcgagagataattctacttgctcactagttctcgaaccaatacgtagcaatctctcgcaccgaaacttccattggtgttcgagagataattctactcactcactggttctcgaaccagtacgtagcaatctctcgcaccgcaaacttccattggtgttcgagagataattctactcgctcactggctctcgaaccagtacgtagcaatctctcgcaccggaaacttccattggtgttcgagagataattctactcgctcgctggctctcgaaccagtacgtagcaatctctcacaccgcaacttccattggtgttcgagagataattctactcgctcgctggttctcgaaccagtacgtagcaatctctcacaccgcaacttccattggtgttcaagagataattctactcgctcgctatttctcgaactagtaaaacgtagcaatctctcgcatcttaacttcagatggttgaggaacagctacgactgatcttcgaccgacagcgtagcggtcctcgtaccacgactccaaatgatcgagagacacctactcactggttctcaaccagttaatcgtagcgatatctcgtacatttacttctagtggtcaatttacgactactacctggtcctcgaccagcggtgtagcgtttctcccactacttccactttaagtggtcaagatacgactactacctggtcctcgaccagtggtgtagtgattctcccactacctttacttcaagtggtcgagttggggctactacctggtcctcgaccagaggtgtaacgattctcctattacctctacctcaacaaaagttgatatcaggtacacaataatgctaagtgttttacccagagatcccttaccacgacgacacctagtgttgaaacctatcctactgtccctttacgccgtcttgacaaggcctccgaggaacctaagggaacttcggctggggacgcccagagccgataaggccttgtcggatcctgtagagacaaaagaccaagtaagatctggtcgtataagagttctcgccgtgcgtattaaccaagccgtgtaatcggaaattgagttttccaacttcacagctgggggctaggatcagtgcttgttcaaccaaggcaggtcaagggtccaagagccttgtcctccgagaacgattctccgacgacaaggctgggggctagggagagtgtatgactctacaaactgactgatcaaagtcggtaagagagaagacgctcatatataaaacattggtcggtaaatttaattcatttttagttttccatacaaattataacatgtcaccatttgagcgtttgctcgggggctatttctatttgatattcttttctgagtattgatttctggaaaattctattcgacattgtggaaaactccatgtctctatggttctacaccaagatcgactaaggcgagtacgacaaatgttgacaaggctccgtcgcagactctacgccttctcgatcgctcgagaacggttgctggatctcgacaaggaatacggaataaagagatggtgtacccgccgagataaaactttttgacttcaatccaaattctcgattacagcaagacgggagacttagtcgtatgttatgtactttcttggttgacgtcggagattgactcaagacaaaccctttaggtgcccgcacgaggctgataaaggaagtctaacgttatctctgaactcaccgagaacggtcacttgagctcgataacagttactccatggtcagcggtcgagaatatgaattcgttcatttgcattgaagtcgggggctactgtcatggttatggataccacatacctaatagtagtcgactaaatctcggcaggacccaccacataccatgtcttatacggaaactgacttcggatataaagggagttccggataaggaaagacaaccagtgttctacatggaaacgacaaggactgctcggattatatacatattgcttttcctagttctacttggacaagggaacacctatgggaataaatacaaggccccctaggaggagaggggacacggacaatcgacgaccacctcaatcaacacccaccacaatctacggaataatagatcaagacacaagatcaacatacaagccaacatacgccaagacaagacgccggatatcgacttcagggataagcacgactagtcccctacggtgtctctggatactgtcaggagagacggaagcgctatctctgatctcgccgggcacggattcgagaaggaagactaccctgttgtcgactacgagtcagaacttcagaccgccatgtcgacaacagttagataggctaccccaaatattgtactggtgtgattatggtgaataaagagcaacgaccggtttcggccaacaggatgttgggttattacctgataattcagggacccgaacctatataaaaatctctatctccgtctcgtttacctcagtctcgcatatatcctactaacaacgatcctcatactatgtaaataccagaaccgcgacatcaaacgtcgacagtattattgctagctttctctctgtttttttttgataagctatattatctcaaaagtttctagccttctatcttgtacatagttgatctaagaaataggttacatcgaagtctataaatttaaaatggattggtgactggattatttctgtggattacatatttcattatagggataaattagatatttttagaaaataataaaataatgaaataagtggtcttactatacaatggaataagttttttttgggaaatgtatttttgagcaactaattaattgaatgatttagtaaataagctgacaacatggcagtcaagccgtctaactacctagcaaatcaattaatcctcgctcggcgagtgtgtaacacattactccctccctccattctaaattgatctacatatttcataggtacaccaaaaccaagaaaaactaataactctctcatactatatttactctaaaaacaagctcgatgcatacaccatcccattattttctattcaatagcaaatcaagatattgcatgtgggttataaatacttgtgtgcatggatacatgtatcaatgtccatttactccaatattaatgcacaaatactccaacgaataggcttaatgaatgcacataaatataatgataatttaggaataacctaaaaaactatatatagatcaatttaaaataaagggagtatcttagaaaatttccacggcaaacactaattagctaggtttccatcaagctaattagcgagggtgtaacacattatcttcatgaccatcttccgaattttggccatgctctatgatcagctgccatcgcatgcatgcatgcctcgatctggcggtgatctcagtaaccgaatgcttatcggagtcaacatatcgcacatggccctgcttagtaattaagatgcagatcatcagtgagccttaagcccttaattagcacaattttattaaatcattgagtgtattattatggcacgcgtggtataattagcaaacagctagctaacagcccacatttcaaaaagtcaatgtatgaaccttaacaacgctgctatacgtccgaccagcgtacgactcaacggcgaaatacacggcgcaagcccaattgaattagcgatcgttgcagaagttacggacggcggacggccaatgacgtagtcgtgcgctggtcgtacgcgtcggttggacgtatagcattttcggaaccttaattactccctccgtttcacaatgtaagtcattctaacattttccatatttatattgatgttgatgaatctagacatatatatctatctagattcattagcaccaatataaatatggaaaaaactaaaatgacttacattgtgaaacggacaaatagtttttttgttccaaaatcgtgagagcaaaaggatcacggatggattcgcgacatgtgctgggaacagggcatttccggattagtcgtgcagataagctgatccgagcactttccatttgtattaaatttgctcgctcatagtactgctgatgtgatgcaaagattatcttagtctaattttgttgcaccttcttctttaggtacaacgtataataatgatcagaacgcgtgacatgcatgtacgtgctggttattactcccttcgtttcaaaatatttgacaccgttgactttttttaagtacgtgtttgaccattcgtcttattaaaaaaatttaagtaattatttattcttttcatatcatttgctttattgttaaatatactttcatgtacacatataggtttacatatttcacaaaaatttttgaataagacgaacggtcaaacatgtgctaaaaagttaacagtgtcaaatattttgaaacggagggagtacgtgacagtacgccaatgtctgcagttaatcaggactcaggagcatccatgcatgcatgtttccaggatatcaatacgagcccactacacctccaattataattaagttggcataggtaatttggacagctagctagcgcgtcttcgtgcgtaccaattagaacaggctataaatgtaagccctcagtttcattcacatttcaccactcctccggtgacagtgagtgagccgagggttttcgatatctggataggagcagactcatcgctaaatgtcttacccgactattcaaaacaccggagtacgtgggtccgtgacgctgacgctgtgaactagctagccatggccatggctgcttcttcttcttcctcctggtgcgcactgaaacagtcatgcgtggccctcctgatggctttggcttgctgcctaactacgtgcgcgcgcggcgcagtcgaggcgctgtacgtgctgggcgactcgcaggcggacgtagggaacaacaactacctgccggcgtcgctgctcaaggccaactaccctcacaatggcgtcgactacccggggggcaagcccaccggcaggttcagcaatggctacaacttcgtcgacttactcggtgagtgtatatctcaaggccattcattagctagttaattatagtacgtttattagtaatatatatattgagtcaaaaatatattttgatagctgatatttttgggataatcgatctaacattcaacgcaaaaatccctctaaaaatatatcaaatataactacgataaatatatatatatataattatggtgtaattataatataattcgcatgtacttacgtccctaaaaaattcaaaagttgtgctggcttagtgggggctgcctgcggttgtcagtttgaccctcacctcgcgcaatgtcctctgatttttacccaatacaacatgcatagatcgtatagcccattcggtggctgaaaatttgatacgatttttaccaattttttttgtcgaatgtgaaataactaggctgtaaactttttggtgtattcggatgcaccaacactctagctcacccatagacatccaggcggttgctataaaaatagcaaggcactattattccccgggtgagggcgttcacactgcatcaccgtgacgttcagccctcgagacgccaacagagatttggactgccacgttctcgccactgctgcgctcctgcgaggaacgtgctaccaaactatgacgcgcgaacctcgtgttaggtgaggccgcgtgatgggcggagcgacgggatagagtctgcattggacctgcgatgctgtccggcccccacacggcacacccccactcccacaagccaccgcgggtacctcacccaactccggtaagagaacaaaaggggcagcaacagcgagatgggggaagaggggcctacctttccagccgccgctaaccggagaaagaagagaagacaaaagatggaggagaggcacatagccttgcaggcctcgtcggcacgagccgccgccggattccgaggggcgaagctcagcagcggcgtaggcccaagccaccgtggggacctcgtagcccgtgcactacgccactaccccgatctggtcggcggtcaccccgatctactcatcgccacaggtgtcggcgatggggaggggagggagaggtgtcgtcaacagggagggaggggagaagaaccggtgatggagagggaagggagaggtgccatcttgttaatagagaaatagaaagggctaaaatagaaaatatgaggggctaaaacaaaaaaacgaagccacacatagagacccatgcattgtgggagacaattttttttaaggtgtggttttagcccatggcacgtgaggcaggccaaattcttctggcacactgtgaacgccctgagcatacggtatgatcattataaatgatctcttgtgtcagtgcctgcatgtatgtactactttcgcaagatctataattcttagagcatgatcaataataaggtaatttagctccaattatgtccaactcatctataacttactttgcagcttgtacacgcaacatctagttgtattgttgggtcctatatgcttcacatcactattaaaaaattgcagcatcgatcctatgttgcaatttttgcatagcagcatttctctcactctctcacgtccaacgtttttatctagagatgcgtgttgcagcccgatgataaaattgtcgtccgctcgcgccagctcatgcatgttctctctctttagctcttttccctatatcaccattgctatctacgtggacttagtgtcgcctgactaatgtacctgctcttaagaaaactacgaagacccttgctcttaagcaaaccatgcatggttaggcaccgtaaaacttcgccaccgctaatcgattaacttcgccaccgcgcagagcgcttgcttggctagagccaaacaaaatagggaagttctaaattaaataacatgccgaaagtaaaggggaatcagaggaaaaattaactatgtgtagtatagcttcaatagggcaggctagctagtagcttagcttcagcatacacatgcatgcacacccgctgtgaacgaaggagcgagcgagcgacgatgggttcttgcacattgtcctccggcggcgtctgcgtcgtcgtcgtcctcctgtgtttggctgcttgctgcctaacgtgcgcgcgcggcgctgtcccggcgatctacgtgctcggagactcgcaggcagacgtagggaacaacaactacctgctgcactcgctgctcaaggccaacttccctcacaatggcatcgactacccggggggaaagcccaccggcaggttcagcaatggctacaacttcgtcgatttaatcggtgagtatatatccatcatcatcgatcgatcgctgcgtacacgtacgtacggccattgtccacagcgtatttttatgtcaaactgttttcatgtgctatggacgctcgcaccctacgtggaggatatgtgtcgtcctagaatgtttaagcatgattgcaaatctaagtgcctcatcttttcgtttatacttatacttatcagctaaaatttaaattttcaatcttaaatttgaagttgattttgaggtttttcatcaaagtttatttgctagactttgcttttaaatcgataagaatacgtatataaaagttttattcataaattacttttcgtttttaaatatgccgtttggcttattccatgaataagcaatggtcacctaacacaataggtgttttcggtagtgcttgctattacagcagcgtgcaggcgacagcaactaaaaacggccacagcctagcactgcagtagctagcgtttcaatcagcccctatgttgacgagagtatggtttttttttttttagtttttcagttatcaccaaatgtattcatgtgcatatgcatatgtgttttaccgatatttatgtattgtattaaaagtgttactccctctgtattttaatgtatgacaccgttaactttttaacaaacgtttgacctttcgtctaattcaaaaaaattatgtaattatcatttattttattgtgacttgatttatcatcaaatgttctttaagcctaacataagtatttttgtatttgcataacaaatttgaataagacgaatggtcaaacgttagttaaaaagtcaatggcgtcatacattaaaattaaaatacggagggagtatataatattgaaatatacaaacagtaaaatgggattttcgcaggcaccctcctaagctgcagaggcaacccaaaagggaaagcgcttgtgcaacgcttagatcagaaaatccagcttagtaggaattatttaatgacagagagttcgagtttatgaaattaaaatgaaacttccggacatggggttgcatatatactggaacttaagtctaaaattaatggaatcttccggacgaattgtttgaatcaaatagtagagagctcgaggtttgggaaaaccagatctgagccccctccgtttaatttgtacgccaatatgaacatgttggcaggtccgatccagcactgactgattgttattctcacaactaggatggtagctcgcgcattcgcgcgggcattcatgaatcattgcttaaatgtttcttttaagatatttgttagtttacaatatgtaaatttgattcatctatataagcacctatctataaagttaatcatctttatcatttaagaagacgtaggtcttaatccaaattaaagtaaggtgttgtttttatttttaattaaatgttttgggctcttatttaaaaaaaattctcaaaaaggttatttataataaatgtgttttattccttcttttaattggttcacaattgatgcaattttttatacgtacttatgtatgaatcaataaaaatatagagtagatatattctagacctcgcttcctataatatgtgtgatctatatatttgtttaaatacatttagtcaacccgagtgttaaaacccaaatttaatagtaagaaatataatattcaaagccaactatcttctgctatggcatagaacagagagaagtctattgatatgtagtcacttaaaaatgatgaagtggttatgcatggttatctcaatttaagggaaagttatgaaccacaatggttctaagaaattataaggttttctagaattggttcattttacacttttgttttattttatacaaatattattttaagttcaaatgtatgatatgacaaatagtgacatcattacaccctatgtgtcaactttttttaaaaaaaaattatcaataagcaagtaagattggtatagattttcattatttattaataaatggattatatgggacataaggctatggtaaattgatgggtttgtatactccaatatatttgcattatgtgatagataattcatttgggaacgttttatatataatgtgtgaggctctacacaaccattgtgaatacgatttgatggctaataatacatcatagagagagggaaccgaatgggtagagggaccgatatatacatgtatgtactaagtacgcatgtacatgatggaagggaggacgtggcacacgtgggcctttcaattgtttaataacaaaaatctaattagtccaccatgttttatggaaaatcaatggttgtgaatggacttgaattatttattttcgtttttcatctaatctaaataaaaaagaaaaaaatagaaaaagaagtagggtgggatgatacgtacgtacaaacgtacatgctgtacaggtacacggaccgagggataatttaagagagataaattgatttggtaattttgtactcgcaagatagatctaacggtggttgatttggtaattttgtaaaatagatctaatggttgaaaataatgggtctacccgattaaaagaaaatcaacggttagatgttttgttttttacttagaatttttaggatttatcaatacgccacgtggcgactttggagcgtttttagaagcaccacgtggcagcttgagagcgtttgtaggaagtttcatggacttttagtatataaaataaaatagaagatagatagatcttttgaaacttgacattatttttgctttatctctactcaaaaaaaaatttcgttggtgtgtgtgtgtttatatatatatatatatatctctttttgttgtctttttttttaaccttttttccacattgcagctatcagtctcggggtgcccagccctcctccatacctctctataagcagcaaaccaatgaacagctccgtatatctgaagggtgtcaattttgcttcaggaggagcaggggtgtctaatctcacaaacctggtagtactacaacttaatactagggtcgaaataaagaaaattgagtgatgtttcggtgctctctacctataatattatactaccagtatattattataggtaaaatagtaatttactaatacaataattatgatttactttgtcatttatatatgttttttcccggctaaatatatttcatcgaaaaagccaaaaaagagggaaaaagtttagttactgctaatgatgattatacccttttatacattttttgttacaatatacccctccacatttctattactgctaatagtggtagtagtacaaataaattttaacacttcgattaaatgagatcaacggttcatactgtcttccaataataatagagagcaccacactgaggctcaagaaaattttgaatatatttttagtgtaacacgaacagaatatgtatgaatcagaaatttaattacaggttacatacttattaatccatcaattaattattacatgagtatttaattctatattaattattacatgagtatttaattctagtacggcgcatgcaggcccagtgcatcagcttcgacgagcagatagagggggactaccacagagtccacgaggcgctggggaagcagctgggcattcctggggccaaggcccaccttgccaaatcgctcttcgtcgtcgccatcggcggcaacgacatcatcaacgacctcctgctgagtcccgtcagcgagctcctacgctcccgagatgagatcgtcagcaatctggaaaataccctcaaacgccagctgcaggtacgtatacttatgcttgcaaaacgatcttgcaattaaggtcaacgtaacatcaggccgggtttttgcagtttcggtttcgaaacagtaatttcagacacccccaccggccggctggaccaaaattttcgaattttctcaaatgtttatggatttagtaacatcacatcaccttcgttgctctccatacaattctccatgtgcttactactatctccatttcattttataaatcattttgatatttttttttcatttcaaactttcttaagtttgaccaagccttctacctattatatactaaaattttattaaacttcttatgaacgcttctaagccaccatgcgtcattgcttccgagtcgtcacatggcactttaataaaatagagtaatataatcatcgatttttatttaatttggtgtaccattattttagatcaataaatctatttaaaaacaaaactaccttgatctatatatattaaaaaaaacaaaaactcccactgtcccagctgcctaaatgcggcgtacacatgtatgtatgctccctccgttactatatcgctctcctctttctgtcctcgtaataattgaaattaaaattactttcacggggaaaaaaacccacatgtagacctcgacctagctaataagtccagccagctttccctctatccctttatccattaatatttatagtctattaaacaacatacaaatatttctaaaccactacgtggaactacggaattaaaaaaaaaatttgaccatcggtttctaattgatttgataggcacattattttaggtcgttagatctatcatttttcttaaaaaaagcatcccaaacctccatccccagtaaacatcctataagcatttctaaatagatacgtgtactctaaaattagataaaatcttaatattcaaacattttaccaggacaaataaaattgaaatatctaaagttttatatagaatctatcaaaaaattggactttttggtaaatttttttggtacgatatccttctggggagacgaaatacccaaaattttctcattagaatcacatatattattttaacacagtattttctcataaattgaaaattgcacggtttcaaataattttagtatagaatttatatgctgcaatggtaataattagaaaaaaaaatcataaccaacgttcaaaacacatcaaataagtttaattttagtttaggatatagtaaaagaatatttaaattaacagtcactctaacatgaacattcataataaaacttcacgcacattaaataagatgcccacgtatatatgcgggctaccttcgtactttatagaaaaaatttacaatacctaaaatgccaaattagtttatgtaatatagaattcaatatattttgttaatttgtttgttttctattggaaatgctactatattttttttataaaattagtttagacttaaataagtttgataaaagaaatcaaaacgacatgtaatatgaataaggagtgcaaatctatcatgattttagaccttgtacgaccttgggatgcgacggttgttcttcgtggggatagcaccgctgggatgttgcccgttgatacgggagctgaaccccaccaaggaatgtgatgctcaggccaactacatggcaactcggttaaacgatgcggcggtcgtgctcctccgcgacatgagcgagacgcatccggacttcacctactccttcttcgacacatacaccgcggtgctccagtccattcgttacccagaggcacatggtacgtatgtactccttccattttaaaagtatagcaaacctactatactccctcttccactttttaatatataacatcattgttttttaacgtgatatttgatcattcgtcttatttaaaaaatataaatattatttattttgttttgacttattttatcataaaagaaattataattcgaacttatcctttcacatatttatactaaaattttaaataggttgaatgatcaaatgttacgtgaaaaagtgaattgtgtcatatattaaagaaaaaggaggtagtacatatattagacggcaccggggtagtactataaatctatacaggaattagattactatatatattaaggtgaagagaatatggtttattaggattaagattctccacatttgtcactttattcagtgattttgtttttttaataggctataaggaggttaaagcagcgtgctgtggcctaggagataacaacgccatgttcctatgctcgccggcgagcgtgtactgcgacaaccggacgagctacatgttctgggacgtcgtccatcccacgcaggccgcggttgagaagcttatgaagattgcgtttgatggatctgcgccgttggtttccccgaaaaatatcaagcagctcactgagagttaggcattatataaagccaagagtacgtgtctactggtactactatactatactactattatcaccactggagaaattttgaatcattaatttaggagttatatttagtgccagtaactaacgtggtaaagtaaacaagggatttgctagatttgaggtgactgatattaatttgtaaatttacagtctcctaaaattacacattttgcaaagtttaaaattgcatagctatacaatgtgaaactttacttattttaactatgatttttgttgttatatatatccatggtttcactttatttttctccatgtttgatttttttcatttaattatgtattgtgtataagctataagtttatttcattcaattttgtaggttagaataatttattgtacaaccttttgcctaaagaaagaacgtcattgtaataaaaaaacaataggatgatcacaatcattagattatcgtacgatggaggagaaaagtcaccaaaccttttaaaaatttgaggtaccggaaatccagaaactttcaaatatgtggtctagatcagagtactgataaagaccattggaaaagagtagagtacatcactagtttctaaggcttcgttcgtatgtgcgagtcctgatccggttcatgttccgtgcactggaagcgtggtcccgcacacagtaccaaaacgacggcttgtgaggcgacgttaacggcgttaacggatgtgagaagttgcctttgcgcctcggcttttccgtcggagttagggcatccaatgctctcgatccctctttcttcctcctctcgctgttgctctcttgcttccgcggtcgtcgatgcgacgcaggcctggaggagaatcgattcccctccgctgtaggctcccgtcctccccgattctcgccagccaccctcctcccctttcgactgtggcttgcaggcccgtgcccccccccaatcgattctcgtccgcgcgtcgtcttgcggcagcggtcggttcaaggtgctcaaaatcggggggaagtggaagagccccacgcctgtcgagctgtctgcgtcgtcctcgaggggagaaaaagctggccggcgtgctcgctgtgaagcagcaagcatcggcgcccatcaggccgcccatctttggcagtctggctgcctgtgtgctcgtcctctcggcctctcaggtcagacagtgctggcttgaagagtctcatcaaggcatccaagctggcggagttgaggagccagctctatttcaggacgagcgtgtgcgtggtccgatggagacgagagtgaagaagcggaagcaagagcgggatctattgtcgatccaagaggaggggacgattgttcaatcccctcaaacaggggagatctctgtccgcggcgccgatctagagtccggcgaggactcctccgactctgtcacctccgacgctggcagcgccaaggctgctcccgacgacgtgcttcatatcgcgcatgccctctacaaggtttgcgccaagtctcctagagccgtcatcgactttgttcgaagagtgagccctgccaccgtcggccgttcgattgattgggacgtcgtccgtgaggaagagtcatcgaaggtattggtttgtattaatttgttcatttccgattcaattttgtttgacttgcacgtagtagatgggcgatggccgtagccggtggaccgatatggaggttcgtgtgtttcttgagagctgcttggaggagatggcagcgttcaccatcacctccaactcccccaagccgcaggcatggcagaacctaatacacaagatgtacaccaagtgtaagaagaaggtgaacaaggctcaattggagtacatttgggggcagtgtaagaagcggtacaacaggtgggtgtggctagaatcacatgcaagcgggctgggtcgtgatccccatacatcagccattgttgccgatgatgagtggtaggaaagcaaaaatgcggtacgtacacttgacaataaatattttgaaccaacaatttttcctacaagaggtattatctgaaatttagtacatgcatgcagttataaatacagttttgtgaggtgtaataatttttttgttcaagttgtgtgtgccaacaaatgactagctgcagtaaaatggaaggattgtgctcacatatgtttcatagttgttactgtcatgtcgtttttagtaatgtgtgccattcccttgtatttaagttaacaaaatgatgtttacactatttaccatgaactgattggcaatgattgcgagaagtaaatgatcttgtacatgtgacattcaaaagcattttaacagattcacatgtgtttaattgtgaaggatatagcttacacaatgtagcattctattagcttatgcaatgtagcagtcaatgtaacatggtaatgctcataggttttgttctctgcataaacaaaatctatatgcagtgtatcagtaaattaggaaagatcttgtacaagtcatttaggaacatgttaatacatattcaactagctgtacacaccttctttctgatgtatatagagagaatgaacaaaaatgtgctcatctacaaagaatataacatatgcagtttatcttatgtttacaatgttcaaactatctttctttcattctgtcagatgtgtggcccattgtaacatgtactcctgattatatttgataacttggtaccaatgtgcacatttactgccagcattttagtagtaatgcacattggactgcacatattcattacgttcaatgtttgcacaagcctaatgcacttgccttgtactaacttgtttttactgtctacttatgttgcagcaaaataaaggtgtcttaagcttcaggaatgatcctctgaagcacattgaccttcaccacgcggtattcagtgggcgcacagttgtcggaaaccactccgccgtcgcaggggcagccccagccgcaccgcaaggagcagttcagtggcagaccatcgacatggcgcagctcgctgctgcttatagaccaccacctccaactccacccccaacggcagcagaccggggcaagggaaagaggccagcagcaaacactcctgcctcagggagttcttccaagaagtcccgnnnnnnnnnnnnnnnnnnnnnnnnnnngaggattgcggacatccgagagcagagctaccagagtcatgctgcttagatggaagcagagaagtctatgggccttgatgcgtgcatggagttggtggaaaatgatggccatgaaattggaggaagtgtgtggtatgctgcttgtgcgctattccgtgacccattgacctgcaaatgctttgttcaactcaaggacgcctctaggcgcttggaatttatacgcactggtggtactggacagtcatctggtggcaccaaactgtactttactttgagttgtgatgtgcgatgttttccaaataaactagtatttatgtttagaactctgtgtgctaacaatttttacattctgtgagtccctaaacatttgcggctttatatccaattcgagcaactacgtattccattgcattgcttttatatccaaataattcttcgattgcatagatcactgccattattaatttctatccttttgattatgacaaacattgcgtattctccggttctcatatgttaaaggaaatcggcgatgagttacggcgcgggtggatcgagttggaatggaggcggtcacacaagcagcaaagaagaagatgccatcattgagtacgtggctgctacccttgatttcaatgagagggcaccaaggagaataccggtgcaaaccggtatcagttggatgatggacacgatggcaaatcgaagccaatgcagggcaatgttcaggcttactgcggaggagatacacaatttgcatgatctattggtcacttcttttggtcttgtaggaacagcaggggtctgttccatggaaaagcttggtattttcttgtacacgatgggtggaaatcgtccaatcagagacgggaacaatcggtgggtccgctccaactcgacagtgtcggttcacttccaccatgttttgcaggctatgaatgatctcgctgggaaaatattgaaaccggttgatcccaacttcttagattacaaccctcagattctgcaagagaatcctttcaagcctttctaccaatcagtgggagctgtggatggcacacatattccagttctgcctaatgcagctagcgctatgcaacacaggaaccgtcaccacataacaaccagaaatgttctagtaatatgtgatcatgatgggagaattattttctgtgatgctggctggcctggatcagttcacgaccaaaggattctcaatgaggcagtgcaggcttacccctacgatttcccacgggtaccgttaggtgagttgtatcagtcaatacacttttttttattgccaaatgtcttgattttatttaattctacacatgtgcactaatatttaattctgcgccgttaaccaggcaggtacctacttgtcgactccggatttcctaccaggatgggattccttgcaccgtacccacatgtacggtaccacagggatcaacttgcggtcgagggagccccaccacccgtaggacgggaagagactttcaaccatcgacactccacgttgcgagggatcgtggaaagacaatttgtcatcgcaaaaaagatgtggaaaatattgaaagaaatcccttattaccgagatgaggacatccctgcacgcatcattcatgcagctttcgctctacacaactttaggttggatagtaaagatccgacctatcggttcactaatgctctctacaacggcaatccagtgccgctgctgaacgattcattcgaccatatgtattacgcaacaaatagcgaggccgctatgagcatgttgcgtgactgtattgctgatgatgcgtacaataactaccattaggtaggtgatgttacccataatgcttgtcgtatgttcagtacttcaattttcaagattgtatggtttaccatttatttttataacgttaacaacaaatttgatgcaccgaatcttgtgttatttgtttcacaattcatttttttcttaattcttgcgttattatttcagacaaaaaattaatcaatgttattgcaaaatttatgtccgaatcttcacatattatgaaaattattatggtaagaaatactgcgtcattacgaaatggttttctgctactgcatagcacaattgcgaaattcaatctacatacaatctattatttcaaacgaaactacatgaaattgaatccatatgaaattactactgtaatgcaattcccatttcttctcaattttttcaaatcggggtgtgttttcttgtgtgcatctaccaattcctcccacgcatttacaccccctgcagcgcatccggcggcaacggcagccattgtcacgcccagaaattcccgaatagaattccaagcagaatgtgcattaaaacccccgtcgaggactggccggggtacacaaacgacaatgttgacatacagatccatgtcttacaaacattataaaagtcttacataaatgcagcggaaaaacaaaagataactggagctaatccttgacttgaactacagcgggaacaccactccacaggtatcctcgacggcacggacgaagcctactcctcagagaacccgccatcggatacatactcgagctctgggattgggggaaaatagagcaaggctgagtactatccactgtactcagcaagtcataccggaatgggggggtatgatgcagggattcaacaagggatagctaaacaggttcatttgcataaatactggcatttataaacaggaattgaatgcgaaaacagttgtaataattaagcagaattaatcgtccactatccaacgttacaccacgttgcaacaggcccaatcatccacctataccatccaatttcattagactaaactaaggtgagtctaatcacggtgagtctggttgaccgcccataaccgcgggcacggctattcgaatagttttactctgatcagaggtgtacaactgtacccacaagacacagccccacgacacgtttccgtgcgccgacatgccaccacgacataccggaaagaggtcgtgacaggacccttcgcataaccccctctagccaagcacaccacacctcaggtttcacccccgttcccagcgggcaactggcagtcccctctcgtgcctaggtgaatccgaaagcgacagaggccgtcgcagggcccgccctgctccatcacgcccacccttgcctggatgcgtcagctagagaaaagctacactacaagcccagccgttgcccacgctggcttgtggtaagcacgataaattcttccagggtttcccgcgaaccggtccttaattgctatgggcgcgactagcaaaaccttgcacccacagcccaccatgtgattcattttatttaaccaacaccagagcggtggtactaatccaacattatcatataaacctatagtctaggttttaaatgagttttccccattgtgtgctagttgaactaagcatggctaagcaattcctagtccaaagtctaatcatgttataacccaagctaacaaaggagcatggtatccaaaaagcatagctgtaacaataggtaaccatcccatagtataattgcaaaacaaatgcggtatttgaaagaaaacattaggacatttgcaatataggatcaatatgatcaagtgacaagcatgacttgccttgctctgctgctggaggaacctcggcgactatttcgaagtacaccggagcgtcggaagagccggaatctagcgacatacaaggcaaacaatgcaaacaggctataagactactgaaacagagaacaaaaccatttttaatggattctacacatttttcttgatttactgagacttgaatgggcttaaacggagctcggatgaattagttatgaattttagaagattcaatgtgtttattactataacaaaaatccttaaataatttattgcgcaatattttccagggctgacgtcagcacgggggaggcgcggcgccgacaggcgggccccactggtcagcgactcaaggggggcggttcaccgtggaccgggaccacgcgggtggtccaccgccggtccacgggaccgacggcccagatcgccctcggggccgatcggacgggcggcgatagaggcggccgccgggctcggctcggcatcaaagccgaccggccagccagggctagcggcgacggcacgcggccgacggcggcggcgaccggcggcacgggaggcggcggcggcggccgaaggcgacggcgcgcgacttgaagcggcggcgcgacactaggggggaggaaggggaaaagaggggagggatgcctcaccgagggtggccggcgcggaggaagacgacggcgaacggcgacgacgagccacgggaggacgacggcaaccgacggacgggattcggggtgccctaaggaaggagaagagagagattagagggagggagatgaaccacggcgaccggcattcatggccgaaggcggcggtagaggttgaactcaccggagcgcgaggggatgcgaattccggtgatgaatcccgacgtggaaggggcggccggggtgaagcttagcctcgcgaacccgacggcggcgacggcgcggtgcggcggcgaccctagtggcggctagcggcggccggagtggcggaaacggcggcggcgggtggttgcacggcgcgggagcgatggggagcacgagggagttcggcgagatggggaaaaagcgagagggggcgacagggaagcttaaataggggaggggagtcccggacgtggccggtagggcgagattttgccggccaacgtggggagtgggggaggagagagaggcgggattcgaaaatcgaatcccggccatctcgggcgcgggtgcgagcgcgagagagggggaagtgggtgcgggagatgcggcgcactcgcgggtgtggccaacgcggcccggagaaggcggaggcgtggacgcggcggcggttgcgggcgcggcgacgccggctggaggaaggagacgggcccgacaggtggggcccacctgtcggcgtcccttggagagagggaggggcggtttgggccggcccacaaggaggagggcgcgcgcgcggcggggtggaatgtgccgacggcccaagaagaggaaaaggagggaaaaggaaaaaagaaaaggaggaaaagaatttccctgggatttaaaatattgcatgctcgattttaattggttaaaattatttcgagagctctgaaaattccactaaaaatcttgttagtgaatttcgacatgtagaactcaagaaaaattctacatgccaattccgattattatttgcattgatttaatagggttaactcttgctttgcaccggtattttcttagggtctcttattaattcgattttaggcttaggaggagaacttccgggtgtgacagccatccttctctcgacgacggaaagtgtcggcgctccaacggcgcggtggacgccatctcgtccgtcaactgctacagtaatatactacagtagcagctacagtactcaggttcgtaaatccctggaaagcttccaaacttgctcatacgaacagagcctaaacttgttcgtttatgttatctgttttcatacaatcaaaaatagatgtagttattaactggttaacgtgtcatttcagtctgaaattgcacggatccctctaggattctacatggtgttaatgtgccacacggacgctgatatagcatcactactaactctacactgactgaaatgggtcccacttaggaatttccttttccttcttttcttcttttgtatttttccttgtccatcttatctcctttttttcccctttttttctcattttccactacaattgttgtcgtcaaggtcatcgccataaacttgtccatgttgtcattgggatgaagggaacaataacgagtggctcctctgctttgttgtcacctccacgagagggggatcatgcacggtgtcgtctacatccttgggagctgttgtttggtgtaggggcaaaggtccgggccgagatccagacccaaaacaccatgcatggcacgaacaatggataccgaagttggaggttgtccctagtcgccatcaccgagttagcccttgctgcgggccctcgagctcgcccccccccccccccccaaactcttcaccctatcgcctctattgagctcgtattcagtcaccacagatgggctctgccatggtcatgggccctcaagcggtcacccgggttgccaccatccttgagccccttcatgtatatgagccgtgcatgggaagaggagaagattaaaaaaaaagaacaaaaaacagaggaaaagaaaaaaataagaggggaaaattgaaaggaatttccgtgaggtggcaaccaacaccagttaggataccggaggcgtcgtagcaatttgggactaaaatgatatactttaacaacttctaagacctagatatgtattttcagagcatggggcctagatatataggtgaacaaatttagcaactagtcatgcactttatatatataagctaggggcaagaccatataggtgtaaatggccgttgtgaaattcatttacataagggtattaacaagcactattgcaaaaagtcacatcgtcacatggtttaaaactggccgccgcttacacgtgcttgaaccgacaaaagtacaatcttaagtggtactgactagcatgaatatcacaacctactgtgatgagtatcactccaacaattgtactattttcatccgtaagaatacaatacaatttgcattattttagaaaatttactttagtaaagattcctatagtgtcatttttatctcagttgacatttgatcatgaacatcatgagcaacataagtcaaccaacgcatatactccctccattccataatataaagcacaaacactttgtaacgtcccgcctctcccaggccgggcccgcttacatctgatagcttttataggttatagactgccctcacagaccaatacaagtcttttctgcatactttgtcctcactcgtgcgcactcgggaagaatttcccgatcagtcacccatccctaaattgctcaaggccaaacacgcttaaccctggagttctttggaaatcggcttccggaaaagaagttgcaacttgttccaggaacgtcccctcctggccacgtccgtgcgtccagtgccagcacatgtgccatgctgtgtgaccactcccggtccacaccagccatgcgcaccatgcctgcgcaactgcgacacacgcactcgtgaaaccgcgagagtcggctctgataccactttgtaacgtcccgcctctcccaggccaggcccgcttacatctgatagccgtttacatctgatagctttcataggttatagtcttatagactgccctcacagaccaacacaagtcttttctgcatactttgtcctcactcgatcagtcacccatccctaaattgctccaggccaagcacgcttaaccctggagttctttggaaatcggcttccggaaaagaagttgcaactagttgatatgagtattctattaatcctattaagccctgggctgggatgttacacactttttttagatgttccataatataaggcatacatgcatgcatgtcattaactatgacatattctccattaaactactattttttaaaatccttcactctcacattctctaactctattggatgcatgcattacatttattaggataatccaaactacaagataataataactatttcttggtctttggattaaggtggttgtgccttatattttggaatggagggaatatctaactaaaataccaagagcaccacaagagaaacacttacgaggtgttgggcatgacaaagttaggttgtaggagctaaacctggtctctggttcctccatgagaccactttatatggatcataccgatatgtagaaatgaggctgctgccatggcattgagtggcagggtagcaattaccaaggctcaaagcacccaatgccaggtggcctaattaactatcaaaaccttagctataattattaaaaaatggagcaaaaatgttcagaaatgaagatttacaagaaggcattttggtactggtctcccggacttgtacttgaagggaatcaaatggcttgatgagaaggagatgggccacaggagatacgatgacctacaaccagtttcataattcctattaatgaaagattgttatcatttctgattagtgcgtgaaatcagaatctaaactcctttagatattaagtgttgtaacctgagttgaaccaatttagatacttgcatatcagcgaatgggaaagtacaaaattgaactctaaatttcatttgttgttaccggtaacttgtaatatggtgcagtcttgtggcgaacaccaaatccccaatccatttcttctactccaattttcataacaattttgaggcttcatactacactagactcgagtgaatggtggaaattggtggagtctgtgtttgaaagggacaaaaaaccaaggaagaaggaaggttgtttctgttgcaagaaggggatgatgttgaggaaggagcaacaatctacaactacaggagggttcaggaaaagccacaatgggatgggcaatcaggagacagatgggtcgagatgggacaggtggaagagctaattgtgattggtatattggtagagaagaaatagaaaccctgtaaagaaagctatctttatataaactttgattgagagcaagccccgtatatggagttaagtgcatttccaggctccagcaattaatatcccatattttggactccctaaaagccaaatggctccatgtcaagcacaaacatgtattgctcagcctccatttctttttctcttctatataaacatacgctttatgtataagcatagtttaacaccacacaatagttcaaacatgaatatttatggtgcaaagaatttactatattcaaattaaaaatttcaagcaccataatttaaattcaaaattttcaactatggatgtgtcaaataatcctattaacatggatgtctccctcgttgtgtgatgagtatccaacatcagtagttcagaactatgcatgacaataaatcactgaccaaaaaacaagcatcaagcatcacgtattcctgaatgttaggaatgtctcaaatgaatggccatatgtgtagcaaaactagcaaccattgtactatccatgagattcctgaatctcttcgaaaaccttgtagctagccgtcgacaggctatagccgacaacggtatccataaagcataggggtcattggtactaggatatatgcgagattgtatcaagaagacatgggacaaggatttatactggttcaagccctcgagatgaataaaaccctacttcagtttatatgtattgctggaaaaagtaccacacaggttacaatgtgggaatctgtaaactactctaatctaccgactagaacccaccgagtacatctcaacgagtggaatacaatgactagggctttggctttctccggattatttttcagtgtggctctagctatggcttgtgatttgatgccctaccttcgtatggggccttgtatttatagcagtaatcgctttcttcttcaagtagatctcgaagatcacgggcatggtacgaacattggaaaacttatcttctttggatcggactgacacctgctatcccacaaatatagtttccttccgagttcgtcttatctcctcatctaagtataccttctcgtataataacattaggtgtgcggtatctcaatacaccacgaactcaagtataggaggtatgccttattcgtagcactgacgctatccttcacattatcacttctatagtacatggtggggagtgggttacgaacaaaaatactatgaatgaacccatccttaatgatcgatgcatgaagttgtctgtctaactcaattgaatttatagagctgaaaacggaaggttggcatttgtcatttggccctaggccatcatgaatcatccaccttaacaactaaacttttggttactaaccccccaatatgaaggctgaccaaatacttctattgcttaatgtgccaccttcctaacttgctctaacaactcaatagacccaaagtttttatatgttgaaatcaaagtatccttgacaacgtagaccaagaacaactatatctttgttatcataccatgcatctggcaagccttataccatagacttccgagagcaagcaagcaagatatacacgaacccacaccatatcacgaaacatattgatgaacaaacattccatgccattctacactgccatggagataaccacacctgaaaccatgtgttgcactagtccctatctacaaatgccttgaacatgtcagaaaagatgccaggcatagttgcataacagatcaggaagggagcacggtggggcagggaggggagggttgcggactgcccaacttggggatcctagggcatcaggcaaagtaggcttggagtagggtagagtctccagtgacgctgatgacagcaatgaacaatgtagccgggcttcttttctaagatggtgtagcaagatgctagtgtagggcaggcctcaggcggagcgggagcaggtgtcgcagtcacgcgggatcaattcagcacaggcacgagaccagaatattcctctttcacgtagaagctatcgatgggggttatagtttagagctccgggattaagggatatgagttgagatttgggtggccttcctattttttaaagggttctctagcaggggcattgttagacctttttttacatcagtcaaaaatatttatgggttatgtttagaggccttgtgtcacaccccgaagttttcctcccaagccaaaattttaatttttaaaacgaccctaagaaaatgcaggtgaaatcaagagaaaaccctaagaaagtaatgcaaataataatcggatttgacatgtggaattttttcttgagttctacatgtcgaaattcattaacaggatttttagtggaattttcagagctctagaaataattttaaccaattaaaattgagcaagcaatattttaattccagggaaaatcctttttccttttctttttctttttcctctctttttcctcctttttttcgaatgggccgtcggcccattccctccttcctccccctcctccttgctgggccggccgcaggccgaggcccagccaggccgcccgccgccctcctctcccggggtcgccgacaggtggggcccacctgtcgggtccttcccccacctcccgccgctcccggcgcgccgccgcgcccacgtctccgcctcctccgggccatgtcgaccacgcccgcgcgtgcgccgcgtctcccacgcccattcccctctctctcccgcccacgcccgcgcccgcgcccgagatggccgggattcgattttcgaatcccgcctctctctcctcccccactcccccacgtcgcccggcgattcccgcctctcccggccacgtccggtcccctctccccctatttaagcatcgccgtcgtcccctctcactttttccccatttcgccgcactctctcgagcctcccatcgctcccgcgccgtgcaaccccttgccgccgccttttccgctactccggccgccgctagccgccgttagggtcgccgccaggccgcgccgtcgccgccgtcgggttcgcgtggccgagatccaccccgtccacccttcctccgtcgatgttcgtcgccggagccctcgttccctcgcactcgggtgagcaccacctccaccgccgccttcggccatggtttccgatcgccgtggtccatctccctctctctaatccctctcttctccttccttagggcaccccgaagctcgtccgcccgccgacgtcgtcctcccgtggcttgccgtcgccgttcgccatcgtcttcctccgcgccggccgccctcggtgaggcaccccctcccctcttttcccctccctctccctcctagccgccgctttagcgccgccgcccgttagtcgtcgctttagcatcaccgcccttcggcgccgccgtctccgccggcggttgccgtcgtcggcaacgcgcgtgcgcgtgcgcgcgccgtcgccgtgaccggtcggccggctttgtgccgagccgagcctagcctggccgccgccgcaccgtccgatcggccccgggccgatccgggccgtcgatccccgtggaccggcggtggatcacccgcgtggtcccggtccacggtagaccggccacccgtgcgccgctgacatgcgggtcccgcttgccggcgccgcgccccccttgatgacgtcagccctggaaaatattgcgcaataaatcatttaaggatttcttttataggaataaacacagtgaatcttctaaaattcatatctaattcatccgagctccgtttaagcccattcaagtctcagtaaatcaagaaaaatgtgtagaatccattaaaaatggttttgttccctgtttcagtagccttatagcctgtttgcaatgtttgctttgtatgtcgctagattccgattcctccgacgctccggtgtacttcgagatagtcgccgaggttcctccagcagcagagcaaggcaagtcatgcttgtcacttgaacatgttgatcctatattgcaaatgctctattgttttctttcaaatattgcattgttttataatagtatactatgggatggttacatgttgttacagccatgcttttggataccatgctcctttgttagcttgggttataacatgattagactttggactaggaattgcttagccatgcttagttcaactagcacacaatggggaaatctcatttaaaacctagactataggtttataagataatgttggattagtaccaccgctctggtgttggttaaataaaatgaatcacatggtgggctgtgggtgcaaggttttgctggtcgcacccatggcagttaaggaccggttcgcgggatgccctggaagaacttatcgtacttaccacaagccagcgtgggcaacggctgggcttgtagtgtagctttcctctagtcgacgcatccaggcaagggtgggcgtgatggagcagggcgggccctgcgacggcctctgtcgctttcggattcacctaggcacgagaggggactgcccgttgcccgctggggacgggggtgaaacctgaggtgtggtgtgcttggctagagggggttatgcgaaggatcctgtcacggcctctttccggtatgtcgtggtggcatgtcggcgcacggaaacgtgtcgtggggctgtgtcttgtgggtacagttgtacacctctgatcagagtaaaactattcgaatagccgtgcccgcggttatgggcggtcaaccagattcaccgtgattagtctcacattagtttagtctaatgaatttggatggtataggtggatggttgggcctgttgcaacgtggtgtagcgttggacagtggatgtttaatactgcttaattattacaactgttttcgcattcaattcctgtttataaatgccagtatttatgcaaatgaacctgcttagctatcccttgttgaatccctgcatcatacccccattccggtatgacttgctgagtacagtgggtagtactcagccttgctctatttcccccccccccaatcccagagctcgagtatgtgtccgatggcgggttctccgaggagtaggcttcgtccgtgccgtcgaggatgcctgtggagtggtgttcccgctgcagttcaagtcaaggcttagctcttgttgtctttcttttcttccgctgcatttatgtaagacttttatgatgtttgtaagacgtggatctgaatgtcaacattgtcgtttgtgtaccccggccggtcctggacggggattttaatgcacattctgcttgaaattctattcgggaatttctgggcgtgacaccttgctagagtcgctcttagatggataaatgggcaagacaggtataggcatgaatacacatgcctaccctcttgcatggagcgctagataattggacttagtagcatagggtatggtatcaagattcaacaagtcatgtcacgtgcacatgcacataattagtgaagcccattagcatagaaggccaagataaaactaacagttagtgggatttggattgcaagtgtactatagtgatactatatgttcacgagagtcctgtttggtccatgttaatcagtctagtgcgtggcttgcaggaaagtacgaaaggagtgacaagttttccagtggcgcgtgtctgagacagtgcttattatcgaaaaaaaagaacaagcctggacttagtgcatcatcaattaaggctgagttctttccccagttttcccaactcatcttccttgtttttcatccgcatacttttcaaattgctaaacggtacttttttaaaaaagtttctatacgaaaattgcttaaaaaatcatattgattcatttttgaagaaaataattagctaatacttaattaatcatatgctaatgggtcgttccgttttctgtgcgcaggagatgggtttccaacccaaatcaaccaacacagcctaaatatgagcaataggatataactaggatgtttgttggatgtacaatgacattaagtaaacactagtacagacccctctattggcaccggttggaaaccgaccatagatgttggttttatagtcggaaccaatttaacggcaccacaccaatacccaagggcaaaggtgacggttcacgacacttatagagattatagtggccagttcttgcctaacaaccagaacctatagttttcaatgaaacaaaaaaaaaaaagacagccggtggaggtagacatacacggagcaccagcgctcgcggccggcggcaaaagtgtcgagcgatggaggctgttgcacaatcacgaaaacacctgacaaccacccgagatcccatccaataacatcatccccatatatatatataaaacacgatcttgaaacacacaaaaacacatggcatgaaggcgcagacaaggccagtgatgatggggccggtgccgcggctcctccggcgctagtacccccttcggaccagcggcttggtggcagcggggtcacctccaccaaccaccgctgccggaagggaagaaggaaaagggaagaacaggaaagggagagggaggcagcaagggagtagggaagggagaggggaggcggcaagagaaggggagggagaggggaggggtggcgaacgaagagggaaggggaggatgcgcagcgagggagtggggaaggagcgcgaagaggggagagaaggttggggagaaacaagagaagggggagaggggatcgactgggtgtggctctgtgtagtggataaggacatgcatagtggtatggataagcacgttggctagctctggctcggctcgtatgggtacccattttttaaccggtatttataatatgttataggtaccggttcttttaaaaaataacacctataatattggtgcatgtttttgctccggaagcggcacctattgttgcctaaaagtgctggttctatattttcctgtgtgaaaaggactataggtgccagttttaaattaactaacaccaatgaacctatacctatgaggtgttttgtaatagtgaaaagaggctaattaagttataactcttattttaagagctaaaaggtgaaatttataagaacaaaataaaaggatactaaaataattttgattgtgggaaacaatgtaactagattataaatatgtgaaacaaaattataccaaatcatggagtaaaacatatctccatcaaaaattagttcaaccaataaacggtatgcaaataaattaatttaaaacggtgatataaaagctaaatttttgtatgaacatgactttgacttattatcatattaacggtgaatatatattgggttttaagatggatatcaaagtggcgcaaagcatgactatatggctagtatacagagtgagcgaaaagagggtcagacttatttctgagtatttaactatcctggtcattttggccattttactttcattaaacatttttcgtatctgcctcatgcctcttaattttttaataaaaaatagaagaaaaaaaagaaacttttcaaccgaaacacgcatagatactgtgtgggatcacaaagaatgaaaaccgcttgcagataaagctgcacaaaaccggagggagggctgatctacgcacgcattcgcgtgtttctactgttgcgaacattctcagccacgccgataattggctgtgcgacgctgacggcgttctattttaacatttactagggcagttgaccagttaatccggggaaaaaactcctgcatacatgcgcgtaaatagttggacgatccaaaagaacttttgcacgcatgttggagattagtttgaggactttgtaattaattgggtttcgcgtgattactgttaactttgctatattaaatattaagaaatacattctattatactgaaaaaattcaatggaaaaaccttcttatcaacaccttctagtatttgaattttctaatagttgacatcaaaactttgtactttgataaaatttatattcataaactttctagataaaatattttcattcataaactttatacataaaagaaaacatatctgttgaaaaactttatacgtaaataaaaaaaattagattcagaaattttctacgtagataaaacattttcatttatatactttataaataaaagaaaaaatctattgatgaactttatacctaaataaaaaaattacattcataaactttatacataaataaaaaaaatcatatttatcagttctgacatattcgctggatcggaagttagcgaacgttcgctaactaccagtttggcaaaaggagagagaacagatccaccaagcatatactgtacaatcttgaaagtgatatcactgtgtggtgtgtactggtccatcgtccacatgtagacagcgtgcaactcgagtcttgaatatcgccaaattaacctgcgcttgtgttgatggaggccatgtcgtccacacgaccaaactctccaccgatttcattgtagcctccacatatatagcagtactccgctgcgaatagtgggggagcttttcgcagacttctttcaaaaaaagatattcttttacagaagcttctgggtcaacgcagactggccacagcacagcctatatgagctggaatcttcctgccagttcgtctgagaattacacgcgcacatacagaacaacgcggccaagattacatggaaaaaggttgcacatagggccggtttagttgtcaaaataaattttgcctttacatgtcacattgaatatacgaacacatatttaaaatattaaacgttatttaataacaaaataaattacagattctactagaaaattacgagacaaatttattaagcctaattaatctatcattagcaaatatttactgtagcaccacattatcaaatcatggcgcaattagacttaaaaaattcgtctcgcaatttacacgcaaactgtgtaattggtttttatttttgtctatatttaatactccatgtatgtgtaaatattcgatgtgatggacgaaaattttttgttttgaaaactaaacagtccaatagtacaagctttgctcattagctgtgactacccatgcacaagcttagtaatccctctgtcccacaattactcaaaccctatatttccaaggtggatttaaagagagatatgaatgatcaagatatctctaattaattgtgaagttatatcgatgaataggtaggtaaagggtatgaaagaaataaaatttttagatttgcaaactaatggtaggtaaaagagtaaaagttgatttattttgattttaaattttagaagctgatttattttgggacggagtgagtatatagcatataggaccaccgaaccgcgagacaggcacgtcacgtctccatcgatcgatcgcgcgtcggcgatttgatttagctgcgccttttacatggaaaaggttgcgcatagtgcaagcttagcaatagagatcataacagtgtggctcctgatttagctgcgccttttatatgttctccgtctcgcgcgggcgcatatcgttttcctttgctcgatcggcaacacagtacagcggtgcattattctagctgtttcccccttcctcctgttcggaatgcagctagcagtttggtgcttcacatgctagtatctttgattcctttcgcgtggtcgcgcgtagacataatcattcttaattgatctgatgtacttctctataattttgattaaatttaaagaagcttaatctagaaaaaatcaaagcgcattataatttgaaagggatggatggagtagaatgttaaagtagttttgttccaccaccgttataatatctttatttgttataaccaaattaatagaaaaatattcagtcacaactatgaaatggacctagagacatattgatcgagatggatgaaattgcaagataagagtttttcaggctcaataataatgcaatgtttctttactatatgcatataatctatgcaaaggtcagatgcttaataaaaataatattttctacaaaataaaaataatccaaaagtatttttctgtgacaattaattctataggtcagataatgccacattaaattgtaggactaaaactcttaaatctataataaccagagcagggtgaatagttgcagaaacacctaaatctacatttttcataactaatatttttagaaatttccttgggaagcatatgtaaacgtaagtttagaaatattacttttatatattcataaacaaactgattcatatttaaaattagtgatttgtaatctgcatgcatggaaattaataaatatgtacaaataccattaattttttctactctaaggtcatcttgatataagaaactaattcaactactacaagtccaaaaagtaaataacattccgttcattcagttttcttgacttagtaataattgtgaaggggttgttttttgtaatactccatcaaaatttttcttttaaattttttttttggaatttcaagaaaatgtttaaattcattcaatatctcgtcaaataaaaattttattgagtttttttaaatttggaaatattccattctgttggtccgcaaaaatacctttttttcgcaatttgggaagaaaagtttcgaaatttgcaaatctgttaaaatttagattaatatcattcaatttttcatgttcaattttttgaaattcataaattttccaaaatattttttatttttgaattttgggacaaaaatttactcaaatggagcatgcatgcaacttgtcgtaggggtaaaaacgtcatttgtaaaaattttagatgccaaattgaaatagaaatgttaaattaaattaataatggtcatattgcgttctagcaaattactatatactacaatagaatatgcggcatcagtgtccgtgcgtagtggtgtttggaaaaaactacagcgatttaatttgtttcacacaagctcgtatacatatcgccgtccaggattggcagtatatatgtgaacacgtatcccaagagataaagagaggcggaggtatacgtacgcgccaagccaaataaaatcccgtcaagtcccactccatatacgctcggtcgtttggacgtcgaactatcatatatctccatcgcttttgctattgccagttgacatgccgtcttctccgaacacaccaaacagtcaaacaccgcatacacacgcaagacaacaacatacgttaacgttgtgcctccaatctcccaatcgatcgatcatacattcatactccctatctagctagctagcctagttagctacgtgtgtaccggggagattaatggggatgcatgtaacactcaagaagcaaattagctagggaagatgtgtatctcaaagagtaatagagtggtattatttgcagcacataggctactcgaagctctcagcaattcttagtttcataactactctatatggctgtgttcggcagcctatgttaggaacacattttctgcacacgaaaaacggagtggtccattagcgtgcacgtaattaattaagtattagctattttttttaaaaaaatagatcaatatgattttttaagcagctttcgtataggaactttttttaaaaaaaaacgcaccgtctttagcactgtgaaaagtctgcgagcaaaatacgtgggaggtgagttgggaaaattggaggaaagaacacagcttgtatatgtagttctctgcacgtgtttgtgtctattttacgaaatatcctatagatgcaagtcttcacatgttacatacacataacatgtacattaattaactaacaaatattcacaaaattctaaaaaatatgtatgtatactttcaataaaagaatttgtaatagtattatatccacatatgaaattccatcttcaaattcatcatacatggaaaaaaagacaacattttgacaaatttatagtcttaaaactatcagaattttttttgttgttacagccaaaatataatgaattaatttgtggttagatttatacataggtgtaatactatccatagtatatgcatatatttttttttataattttagataatatttattagttggtatgcacggagtgtgctgtgcacaggatatgttcccaccttactataacaatttacatctgacatagctccatacatattatagtatggtaatttttttggccttttcagtacgatgagtgtagctcaactgattatgttccttgtgatggaacctacccacccaaattcaagttccagacttgatatagatgagtttaagtcctatacttgacacgactgctcgcatctatggctaattagctttttaaggataggcaacttaccatcggtgattttatttgggtgctcgcatttacggctaattaggttttcagtgatagatgacttacccgtgggttcaagttttagacttagacacatgtgtttgtatgtatggctaattatattttcaatgatagacgacttacccattaattgatagtgaggccctattgatgacttcgtcgattttaaaatatgcgacatgatgactttatcaattttaagatataccggttcagtctttagatatgtttataaaaatatccgcgtatttataagcccttggatttgtagtatgttttaaaaaagaaatattttatcaccaacatataggaactggataaatctacgtgcatggtgcatctatgattggtgtagagaggaagactcgtttagcagtgtttgcagtttgcataatgtatagtaaatactcggtgcatatatatgcacgcacacgttttgatagctagtatcttgtagtttagcttctaggaaaaatatcaatatttatgggtggacgactgaaaaatgcttgagttgttctcgctatggtataaagtctgcaggtagcgcgcgtcgtctccagtccagtgaagaaagctcacgcacgcaacacgcacgcacccctagctcatgtgcaagacgagccggcgagctgtatacgtagcagctggactctggagaagcatcagctaagctgtacgtactactgtagttcgatcgatggatgctggtaataacgcaatcgctgcggcgtccttcgccatcgtcgtccttgtcgccgccgccgcctcgtctttagcggcggcggtgccggcggtgtacgtgctcggcgactcgctggcggacgtggggaacaacaaccacctgctgacgctgctcaaggcggacttcccgcacaacgggatcgactacccgggggggaaggccaccggccgcttcagcaacggcaagaacttccccgatttcctcggtgcgttatcgtcgcaagccccccacccccctcccccctttcttttttcttctcttttttttctttctcctccctcttccnctctttcaatctccccctttctcttntttctttcctctttttttcttctattatctatatatattaccctctttatttctac

SEQ ID NO: 5993 - DNA, 72420 bp, Oryza sativa
taacgagttaagacgcgatagatgtgaataaacgtcgaattagaagatcatagtaaatatccatcataacactataccaacatacatcatatatatgaatgagataaaccatcaaatatggttaagcataatagaatagagatatcgagattgcaacgtccctagtaagaatatatatttaatagctagtaggacaagtagttacaccaccagcgggcgaaatagaggtgatagagagggcgaaagatattgcgaactattaagtatacataggaaacgtctcatcgctgttagtagattatgcaatgagagggagaggaagtcgcgagggaaggatactatcgattttgggatgagagagtataaaatagattgaatagcagaagaacaaaaagtgggggatagaaggaagtattaagagaagattttttaaaagaagatctgtgagagaaagacgaaatattggtttaataggccgaaaaaaagggattatgaatgtaatattaccaccggttgtaataaaagggagtaagtaggcagacggtgggtttactgctagtaaaaagagcgtgaggtgagcaaggcggataagacccaatatcgaacagaacaacttctccggatagataagagatgtacaatttaagttggtatccacggaggttttaagacggccccctagtggtacgtgtagtgatggtgcaaaaggaccggcaacctcctccccctaaaggtccaggccttgacaacaaaactctcttcgctcccggggggttgtctgtatggcaaacccacatttaaattttgtttcacggggaggaagaaaaaaggaataagatgcgtgtggggcccacatgttagtgggccccacaaatgtgtatgtgaatgacaaatgggtcccacgtataactttttaattgaaatgccacctaagcgccacgtcaacgccacgtgtaaaaaagacccggtcaataccgccacgtcagcgccacatcagcgaaaccgccctctaaaaccgccgagggagtcaaattgtaccgatttccatagtttgggggtcaagatatccggttctgtggtttagggtcacggattagattacaatcacttttgagagtcaccaagtgaacttattccttttttttaagggtgaataactaacatggtcactgaagtttcgctttgggctcagtttagttcttgaggtttcaaatcgtccaaacaagtcctccaaattaatcatttgggttaatatagtcctttgaccaaaaaaaaaaagccatgtgagcatgctaagtcatcctcgcatgcagcggtatgaacaaaatgaccattctacccttatataccatataaaaaagaaagaagataaaagaagataaatgtttcacacgtatatgatcgttttataattatcacttacgattgctgcagcgatcatgtaaattaacaatgttgggactgggctggcctgttattttttctgtttgtctttttttttctatatggtatataagggtagaatagtcattttattcataccgctacatacaaggatgacttgatatgctttcgtggctttttttttctaaggactatattaacccaaataataaatttggaggactttttttggacggtttgaaacatcaacaactaaattgagctcgaagcgaaacttcataggctattcacctttttttttattggaaaatggagtcgtacaacgtatactggtaaaaaaaaagtccaagtatatttggtcccgtcagagccccatcaatcgaaattgttcccaaaataaaacaagatcagcccaacctggtctatccgctcaagatactgagcagattcaatgagatgccaagttggaagggcaggtcaatctagaaatacagatgtggacatactgcgtagttactgatgataccatgttggtgcttagtatgtggtatatcatgtcagcgccaggatctcgaaaggattatgacagttttggaccggaatgacacactttgtcaaattatgagacctgaatagcacaagtttagagaccggccgtgcactttactctataattcaaggaacaagccatacataacaaaaaaaagtgggttcaaaaagttaaaacaaaatgatatatatctcatcaccaaaccaatcttttgaaccatatggtggaagttacgactagaattccatcgatgctatagaacaatcatgacgatagtatgattcatatctggactaaccataggcttcagggcatctaaacgaatttcaatattgtctcctaggtggtttcgattctgctactgtaactcggatctgtctgccatccatgtcctgcacaacaaagaaaataggcttgttttagcacacactaaaagaacaatgatgctgaaagacatatgagaataagaaaccagccagacttagtgaaaactcacagcgccatcaagatttgaaactgcattctcaacctcttcagcggaaccatacgtgacaaaaccaaatccccttgacctgccactctccctgtcatagatgaccttggcttccaagacctccccttccccactgaataggtttgcgagagctgcattgtcaacaccccaagaaaggttacctacatagaccctgttggcctcacccctgggtgctctctgcgatgattgctcccttggtggtggtggccctgagttaaccctcaaagatctcccatcaagtatctgttttaagaaatgaaatcagcaaattagttaagcacaattcaatgatgttgtataggatataacacaacatatgtccagcaacatgccagaaaagagtaaattaaagtttgttttctagtcatgaataagctaaaagcaaacaaggattaaaacaagcaagcaggttcatatcgagcaacctcagctacagttatcttgaaagaatgcaagccacagcatgcaaaccaaagagatgaaataggagcgcactttatgcaatatatttttagccagcccatataccaacatggagcaaaaataatgacttagaagtatggaagcatatactcacatagccattgaattgctcgacagctgcctcaacttcttcaacactagacattgtcacaaacccaaacccacgactccttccagtcagcttatcatagatgacctgcaacaatgcagtttagcatgatacaatataggaaaaatcaaccaaagccgagtactactcttaaaattgagcaattaaccagaaaaatgcaatcctaaatctttcgccagtcacagaattaatagcatgagcgccagcacaccaaatttaacaaccttaaataatggcaaccttatcgcatccttaatcatctccaaatacaacctcacaatgagcacccgaaataagtttttttttcttaaaagaacgagaatatgcccacactaccatatgcaacccaattgtatcgcggtttaagctaaattaacaacagaatgaatttgtcgtgaactgtaatatgaagcaactagacacaatcattcatcaccacttcaccagcgaccagcggtccatttctggtttcacaaagacagggacacaccagcgagcgactcgacgaaggtggtgtgataggagtacttagtaaggcgagacgaatggggtggtgacctcgaccatctcgacggagccggcctgctcgaagaggccggcgagctgggcgctgtcgacgctgaagggcaggttgccgacgaagaccctcaggtcgtcggagaactcctcgcccccggagccctcctcctcctcctcctcgtcctcctccgtctcgacctcctccgacacggccacggccaccggcacgaaggggctggtcctcctccgcggccatcccgcgacggcgagggcggggagcagcggcttggagaggaaggagagggaggatgaggcggggttggaggaggtggaggggagggggaggaggtgcggggagagggcggtggagaagagcgtggccgccatgggtgaggaggaaaggggatgggatcgatagggttttggggataaggcggagtgaggagaggagagagcacaaactgggaaagaggcaacagtagaggagaggagacgggttttatattgtttgtttatacttgtagctaatttgcccgtgcatgaccaccaaatcttaaaggataattttggcattcatttcaaagccttaagaatctacaattccggctgtcttttgccatcaatttttagatgcttactaaattagccagaccaagaaacacaaagcttatgttgtttcaggatgaaacaccaacaccaccaacagcgtgaaagcctacacgctagtaagagtggtggtgacggaagattcactggcatcaccactgcccacatttaatgtagtatagatattggcttcgtttttttgacatggatgagcaaaaaatactatctctgtttttttcgttggttaactaccgtcaaacatttggggaataagatagtatttttaatagcaggtatatatcttctacttaattttactattgcttccatcacaaggtaattttatttttcacacattccgcatataccgatacaaatataaatttgtatgggcctaggaatcagtaggtagtagctttgtatgtgtgtgtgtgtatatatatatatatatatatatatatatatatatatatatatatatatatatatatatatatatatatatgtggcaacatatcctatgcacacaggccctcacgtgtacacacgtgcacaccaactaaaaaatgtcaccaaaaaatctagaaaaaatcatacacatactttcaattgtattacacctagggttaaaatcttaaagtaaaattcattatattttagccgtaacaaaaaaaaacaaaaaatctgacagttttaaggttgcaattttgtcagaattttatcttttttgttattctctatgtagaatgaatttgaagatgcgactttgcacgtagatgtaatactattgaaagtacatgtatgaattttcctagaattttttgtgataatttttagttggtgttataaaatccattccaatcgaatattgagtaatcaaatccttcaaatcatagtttttgaaatctttttaaaagcggattaatcggacgaggataaagagagagtcccattctacatgtcaatactgacaacaatgaaatttctggtaaaaggaaaatccgtcgactttctaagtcagggttcaagtccctctatccccaaaccctcttttattccctaactctagtatttatatatgccaatgtgtgaatgcaaaaggtgaaggtaaggcccacaagagaaaagaagacctctccatacccccacactgtttattgtacaaataatatagttaatttgcttattactgatagtagttacactttaacaaaccctaatatatttgtccctcacttttataaactctaaaactgggacatgcaagatgatgaaaggtggactataaataagttaccatccctccccgatgggttgactcctccagccaaacaatcccctagcatctgtctagattcgtagtactaggatacgtcacatccctctaaaatcccttacattaggacatccacaatgtgggagaaaagcaggtaataggcattgaatgcttccttccaacctggttatatacactgtgatgtgaaagttggtattagctgttacccaatcatcacgttgctaccggcaacaaacaaataaaaaatgaattgtagttcagtcacaagctaacaaatgtaccttttgtgcatggagccaccttgttttctccatcataggcttatatatattggggtacagatcccctagagttgagtacaactccaccgggtgaattttatcaaatccatggcatctattgcttcctatggctgagatgaagccatctattgcttcctatggtttgaatgggaattactttatttttttattatgttagtaatggttaagtttctgcctaccaaattaacaaagtatacatgttctcttctttcccaaacacaagaagctacattcatgtaaaaaaaaaagtgttaaccgcatagtacatgcaaacacacataaaccatatacatgcaaaactagaggcacgtgctcagtacggtgtttacaccatggattaatcaaagaatttctgggttatgcaagtaaaattagcttgtatattctcaaattgtctaaatatattgtagacggtgatttgttattgttacaagattaggataaattctttttttttcaaaagagactagtgggaagtgggaactaatggcttcatcccaaccgtcgataaaaaagagaccgtagagattctatcaaatccaccgatggagttggagtgactccaggggatccagacccattgcacatgcccttatacaatagagggatcatgttcgtagtaatgtacatatcatatcttactataaagttatctcccactaactcgttaagcttaacatgcaaagatgccacatcatatcatccactaacaagatgtcacattatcatccactaatccactaattaacaagatgccacatcatcatccactaacaatcatcacatttaaacatcatgcaaacatgttatatctttatagtttttataatttaagagcttttcaaatacaaacatgttaaattatcatccaatataattcacataatgtttcaatgtatatctttattatgttttatgatatcctatatacttatatagtttatcctcacttagttggtgcttaaatgattaatctatggtccaaattatctttctcattttttcctctaattaagtcatatcacatcaattattttccgcctttagataattaatctacggtccaaactatctccctacttttcttcttccataaagtcataccaccttactttttacgtttgaatcaccattctacatactatttaaatttaaattatcataaaccacattattttacttaatctgatattatctagctatcttacacgttattttttttattgttatcatactaaatttccgtagcaattcacggggtttcgctaggtataatatatggcagctgccgatgaatctattttccccaccgaaatatgcacagcgcgcacagcgagagaaaaaagtggcaaaatggagatggaacatggaagggaaaaaaagtggcaaaaaaaagtggcccatgcaggtctcgaacctgcgaccttcgcgttattagcacgacgctctaaccagctgagctaataggccttgctgtgcatttgaactttatcctactaatattggtagttccctttattcatttaaatacaattgccacaacactacatttgtctaggaaaatcacaacagcaccggtctatgaaaatcacgtactacaaagtgctcagtagtccatcaccaacaacagtggacatcaatcagtacataagaatgatcggctaattcgaccaaactgttcaaatacaatgttgagagaattgcttttacatgcataaacaaatttggccaaaaaaaagaaatatactgaaagcagcacaatactgtttgccatgttaccgcctacatcgaaaatgtatcatagtctacagcaatacactaacaaatgccctgcatggcatggcaccaacgttctgcaactccagcagtggttccatatagcagtggacaagtctgcagtagcagcacacggcgtatgctcctgcacctccatgagaagggtaaagaagaggaaaagactccaaaacacaaaggaaactcttaactcgataaaatctcaacccagttattaactttgagaggttctctgaaacttacccacactcagattgagcatcagagcacacgtgcacatcaagtcaagatcccatgtatagcatggcttgcacaattgcatgttagggcttttatgatctataaatcagcaaaagcgaaaacttccagctaactgtaaatcgccatagtagtcatatagcttaccagacaggttgatactagaagaccatgctgagattggtttataggtaaacttaagttttatgttagcctattttgagctcactgaggaggtacaattttctctggggaactatgtgcagataggaacgaatgtgaaggatgacacgatccacatccttaaagcaagggcaagtaacttctaggcttttggttggcaaacagggaaccaagttcttccacacgaactactaagatgaagcaggttgcacgagaacacatacaggaagtctcaactgtgaactttcaatacataggtttagaacatgtaagacggggaatcaacatagtcccagaggaaaatataagtaaatgctgtatactagggaaataagatggtctatggcatccaggcaggtccctcttaggcaaagcttccaggttggggccatactcttggtcatctggtttgggaaggggctccaataagcaggctccatacttcattggtcttggcattcttttgtcttggctgtttttagtaagggaggtgggcatggggcaaaggtgaaaagaacaggtccatcagaagatagctgagctgggttaaatgtgtttaaaaggcagaaatgcaataaggagcaagtcttgatcgcatgatcattctgttcatttcaagacaaggtggatgaaccatacctgttgcatttgtcaatctaagtcctaataaccatgtcgctttccataggaaaatgaactagggccagataacctgatgaaaaatgaaatgtgctaagtgagcaaaacatatgatataaagattaatgaaatattaagtagactaggcctaaaaaaaattagtgcacacttaagagtgaatttccatacatagagaaacataaatatttggtattatgacaggtactgtctatactgctgactcataaagtacaggtatgcttacccactgctgccagaacgaccactatatccaccataagccccataacctcctccagagacctggagaaattccagtcgaagttttgataagagtctgttagcatgaagaggaaaggaagggaagtgaaagggaagctatacctgggagctgccataacttgcatagctgtcaatagggccaatatcatctgagccacgatatccacttgaatatggataatcatgcccaagaggcttagtatctctgcctagatactttggcccttcagaaacaccaactggaagaggatggtaagggattacaggtgggaaacctgataaagcaccttctctttcaaagaaattggctttcagcctagtagttatttgcagaagagcatgtcttacaacatcaaggtctccactgatctgttgtgcaagcaaattacattggtgaactcatcgcagtacaaaagaccagtaaaaaaaaattaaaacataagtttaaattgtacctgaaccatctcttcgtcttctgctgctacttttggtacattctccttagaaaggatacgtatgtttgctcttgatgttctccttatctcagtaatgattgaaccaccttttccaatcaagcacccaatacgtgatgtcgacaccaacaagcgtgttgtgtaagacgggatcgctgattccggatcagttttctcactgcatcttggttgtaaatgaactgcagcatttattgttggggagacaggatcttcaaagaactgcatgagaaagagaaagcggaattgatcaggactagaattaaatatccgcatggatgctaaatcagcagaggaccgtaggagaaaagcacctcctttgcagaaacagtaattatgcagtcatcttcagtatttgaactatcaactttgataaaggctccagactcctgcctaatctgtttgataattccaccaccctttccaattacacctcccacatttgatgcagcacaaagaaggcgcaagctaaattcctttgcagagctctcctccctccgtggttgatatatagaaggccaatctccagccacatcacctttgtatcctccataagaactaattaaaggcgtaatccccacaactggtgcagttgaggaactaccaaggtgggagcccactggataaggctgtgtcatgctggatgcaagaagatgctgtgacctagatgggttgtcatggagacgagatgacacttgaagaagagcttttctgacaactgttgagtccccagatatctagtgccaaaagaataaagggttcattagcattattgactattccacagatggcatagcaaaaaaaatcaagtactgtaaatgataaattaaactagtaaaagttattttgctggttgactggaaagtgaaaacagctactattaaatctaagtcactgcaccttaaaaagggtactccgtaaaagagaatgttgcggacgtgtcacaaataacccatgttaccaaacagagccataaatgcctatagtagtaacgcatgtacgacatgtgtaacgcgggaaaaagatggaaacagagatcctccacaaacctgaagaagttcatcaccactgatggcacacgcagggagattttcattgctaagaacacgtatatgagcaccagtgtcactgcggattccctgtataatatgcccaccttttccaataatgcatccaatctggtctgatggcacaagcaaccgaacggtaacttgagctaaaccttcatcactttcttcattcccaatatcatcatctatggatagcttttcatgaactctaaagagagcgtcttgggcagggcaaaccttatcttcagcatctactagggtattagtttccctgcttgagctaaatattgtgataactctctcatcacaaccagatacactctcaccaatccttatcttagcttgagtgtcggccctcatctgcttagcaatttctccacccctcccaatgatgctccctatttttctagaagggcaaagatagcggtagacagtatcatctggaccaggagcatatgtatcatcaccaggattccttctcttgccacctccattttcagcataatcagagtgacgcttcccgtgactgttcctatgcccaggtccaaccattgtctacaatcggagaaagaacggtcaacacagtagagaatattgggtcaaataaatggaaactaaaataacgcgcaagaaggaagctattctaagattattcacatcaaaccctcctgaaattctcatttaccaaataaaatcaactataatcacacgaatcaccctgtcaaattcgtaatgacagcacatattaataatccttacacttgtatggctgcatgatggcatgtttatcatggccaagcgttaaacgaatccacatgaacaaatcaatcccataccacaatgaacaaaagtcatctttcgatcctaccaactagattactataaaagatctaacgagaaaaaataaaaattgtttggtctattcatgataacctctccgactctttttttacagttcaattattattaagttgaagaactaacaaagatatcccgacaaaaaaaaaattctaaccaaaacactccaaccacgcgaatcaggggcggatccaacttgggacgtgggggttcagttgaacccccaaactattggggggaacaaacaaactgttacttgtattaaggttaaggctctgaaatcaaatagaagaacctcttccagatctataagagaagctagggttaacgcaagcaaattccacggaggtgcaatcccggtggaagagagagatagatgaatcagaaagagaatgcagatggatgctcaccaagatcccctcccctcccctgctccgctcgccggatggagatcgccgcccctcccctgttcagccgcgagatggcgcaaggagcggaggagacgacgagacggggagattttcttttacgccaagcctagggaagcggccaagggggagacacccgtgtacaccgccttttatctcaagcttttcactaaagcccgaaaatttgacaaattaaccctttcagaaaacttatctaaaaaataaatcgtgctaaaaactaatcatgcgcttagagccatcgaggttaacaatgacgccgttgattttttttttaacatgtttgaccgtttgtcttgtttaaaacttttgtgaaatatgtaaaactatatgtatacataaaaatatatttaacaataaatcaaatgatatgaaaagaattaataattacttgtttttttaataagacgaacggtaaaacatgttttaaaaagtcagcggtgtcaaatatttaggagcggagggagtatatcctttttaacatctttgacgttggcgtttcatcgaagatgacatgaatttgccaggttatatataaatatcacattaacgctaaagatattgaatattccatcggaagcggcaagaatttaccagattatatataaaaatagtaggtatgaggctatgtctgtcaagcttgaaaccctggttcaaatactagggatgcctcccatttgaaggaatttctttctaccccttattttctttggcgaaattaagaaatagtgacatattttttggtgaaattattttttaatataaaatttaaaatacaaatatattatggataccacataccaaaaagtggttgactaagctcggtagggcacaccatgtaccaagtgttatacggaatcatacctcgtatatagaaggaattccggataaggaatgacgaatagagttctatatgtaaactataaggactacttggattgtatccatattgatctctctagttttacatggacaatgggacacctatggtataaatatatcccataggaggagggaaaaaaagatcaatacacgacacaacaacagatcaacacacgccaagacaagccgctagatatcgacatcagagataagcctagacaaacccaatatgatgtatgcggaggccaataagagagatctagcgctatctctgatctcgtcgagtgcgaattcgaggaggaagactaccccgttgttggctacgtgatggtattttcgggcgccaagtcgataacggctagataggtatatcccaaatattgtactggtctaattataatgaataagagcaacatcggcttcgcccaacatgagtagggctattacctgtcagataaggggcctgagcctgtataaaatttcttgtctccatatcttttacttcaatctcgcatataccttggtaccaacgatccccatactatgcaaaataccgtagtcgcggtatcacccatcgacaatatctattttatagttaatctttaactaaaacactaaatatatataattcttaagagaacactaagctcgaactaaagcaaatgctggtgtcctcgggagctttttatttcttttaaattcctaaaatccttatattattggctaaactaagaaattgtgatatatattttggtgaaaatgtttttattaaaattattgacttcataattaatactttaattaaaacacttattctacataattcttagttttaaaattcctaaaatatttcattattttcttcgtgtatgatttatttaaacaaaatgtgtcatttcccaataaaatacgaaaaataattaacaagtgtagaattggtaaaaaaggtaaagatccttaaaaggagtagaaggaaggactcaaaccagggtcttcaggatgagagcaccagacccagtagcaactcacgtgtgtattacatatacaagcatgtatttatatattttcttataacttagtaccgagcaccagatccagtagcaactcacatgtgcattacatatacaagcatgcatttatatattttcttataacttagtaccaaacaccatgaagctaattctatatgactagttaaatttttgtcttctcgaataggatgtgagtgtcaatattcttgacactaaagcattatatatcaccactaatcttaatagcgttgagctgacgatttatttatgcaaataagtttttagcacggtcgttgcaaaaagttttctggaagggtcagtttgtagagagatctatgctgcgcacaggcacaacctttaggcagccacacgctggtctcctcgaactcgaaccctagccttttgctgctccctccggcctccacacgcgcgagatcccttcccctctcctcccctcccggcgagatgtcgtcgtcggtcggcggcggcggcgggcagcagttccggtacacgcagacgccgtccaaggtgctgcacctgcggaacctgccgtgggagtgcgcggaggaggagctcgtcgagctctgcaaccccttcggccgcatcgtcaacaccaagtgcggcgtcggcgccaaccgcaaccaggccttcgtcgagttcgtaagccctccccccgttctccctccccttccccacccgcctggcccgcctccatctcccccctctcgtcgctcgatctcattcgagatccgttcggatgaatcggccaccggatgatctgccatgttcaatccacgatctatcgattcggccgtataggtatagcgcagtcctgtaattaggggattttgtctcggatagtatagcgcagtccgtaattaggggacagtgggggtcactggctcacatgccgtcctcacatctgcttggttttagctttttttttttttttttttgctatgccaacacatcgcgaagatggaattgatatgagcttcggtcatcgtaaaggatttgataagatgcggctgcaggatacacgcgggactggatatttgatactagtagtaaagttgtttaacaatgttagtattttggatgggttttcaggtggattgttgggtttgtgattggagttgaccgaggttagtttatgatactggaatgctatatgttgtatcaatctgtctgtcaggaatcgatctgtagcatactcggtaaccgctatctatatggatggctgggcctatgtggttttgtggttttaaaagttccacatgtcactgtttggtttgtgataggatacagttacagggatgtgatttgtggctcttggatatatggtggcgggagctgggagctttgaaatgacagcaaagctgtattctgtgtcattagtaactttagagtatgattctatttgtgagattgattatctaataaaatgtggtgtatctttagacttctaggaaaggctttcagaaactttatcttcctacaaattctattattgtttatacttatgttttatttgtaataaatgctgcgcattacttatgcaaagccattccttctttgcagactgacattaatcaagctatttcgatggtttcttactttgcatcatcttcggaaccagcgcaaatccgaggcaaaactgtttacattcagtattcaaacagacaagaaatagttaacaacaagagccctggagagactgctggaaatgtgttgctagttactatagaaggtgttcaagcaaacgatgtcaccatcgatgtgatccatctggtgagttctaaattttagtttcttttccaacatgaaagtatttcaatgggtgaattagtaagatcatgaaaaatttaagtgtgactgttgctatatcggttgccattgactgaagggatccaagggagtctacctgacctgatccttgtaaatcaaagattttacatagctcttcatctcgtagtaacgtattctgcatgaatcagcaggcccatgttaacacggagaaaatgtcgttatcaacatctgcaattggagagatatcatgtttgttttgctgcctctgtcttctaactattacatctgaagtttttatgaactcttggggatgccattttctaattatctttcatcatcacgcttttccacggtgtagggcacctccctgtttatccaagttattgatgaaaggttaaattcccaacctttagaaaattagtacatctatggtgcttcttttgtgatcattttgtggttcttttatccatctattagcaatacaatatagttccattcgtccctggttcatctgtctaagatcttctgtcctctttgtctttttggtggacaaaaggataacctttaagagtttcctgccagatagaatatttaataattgattttatgtactacaactacaagatttttatatgtgctgccagttcctggattaattttctcttttactcctatatatgacccttctattatatttcaggttttctcagcttttggatttgttcacaaaatagccacttttgagaaggctgcaggttttcaggttacttgaaatttcaaattctgttaatatacttgattgtttacaaaggcgatcttcccaccttattttcttcccccgcaggcactgattcaatacacagatgcagccacagcttctgcagcaagagaagccttagatggaagaagcatcccaaggtgacatctttgttctctgtacattgcatcttttaatattgttcacactttgctcctcctataaactgaattcctctgagactttaatttaatgtaggtacttgcttccagagcatgtaacatcttgttgtttgcgtatttcgttctctgcgcataaggatctgaatatcaagttccagtcacatcgcagcaggtatcacttatatcttttttgccttgagttaatttacaaagatcaaatttcgcggttgttaagatggatctctatatgtctaggaggattgtaatatcaacatactacctggtaccatattttaatgtctacattaagatttatgcctaggcattgcaagatcatacctcatattttccctgcaaattcagaaatacgtgttctgccacatcatgggcattttacctttattcatctttcctgttcatcctgctgcctccttatatactgacacatgattactttgaaaacctggtaaaatagactatcaaccactggattccagatttgaatttgcaacctaatcgttggctaaaacaaagtagcttttttcatgggttaagggcatattcatccatagtagcacttggcttccatttttttagcctcttgctttttgtatggaacttccatatttgtatgagtatattactgcaaaatctttatttgtcagtggattcgtcttctccatctttgttccttatcttatttgccttgtgttattatagatcaaaatgcttcttactatgtatcttgttaaacatgttttcttttttattttgcagggattacaccaacccttaccttccggttaattcatctgcaatagatacgttacaggtactactattggatatcaccaacatttgaataatttaattgtctttttttttccatttatatgaacctgcctttcatataaactgccttttgatgttccttcacagcctgctgttggtgccgatggaaggaaagtggaagctgaaggcaatgttcttctcgcatcaattgaaaatatgcaatatgcagtcacggtggatgttctccatactgtaagttaaattggaaagcacttattcaaagattttgttgttttgtagttactatatgctgactaagattaatcaattccaggtgttctctgcatttggtacagtccagaaaatagctatttttgagaagaacggtggaacacaagctttgattcagtaccctggtatgaaccttggaacatatcatcttagtagaattacagaataattatgttttgtgttgaattagtgctttcattttcaacatttgacctagcagaccacacctccaacaaagcttgatattgttatttcgtttacagaaattattttcctatttttgtaattgaagtgaatgtgcagaagttgtgcagaactaaccaatgtaaacatgctttcctttacatcgtaacaaacatgtgcttgttctgtttatgatttcatgtgctttaaattcagacattttttcatgatctgacttcattacattaccattcagatgtaactacagcttcagttgcgaaggaagcattggaagggcattgcatctacgatggtggctactgtaagctccacctgtcatattctcgtcatactgatctcaatgtaaaggtataataggtgtgcattttctttagtgtattatgggcatgaaacctgtttagacgatatgatttactgccatcatagaacccttcatcttgtattcaagcacagactttcctatcatatgaattatgaaccatgtatctgtctgttctttcaggcacacagtgacaagagcagggattacacaatccctcaaggtgcgatgcaagcagtaccacaaccgcctggtgtaccaacaacatctgctgggtggcaaggtaatccacaagccggtggtgcatatgcaccacctggagctgctgctccaaaccacggcacaacagggcaagtgccaaattggaatcccgggaactctgggtatgctccagctccaggagcatatccaggtcaaatgtactcgtcaccaatgcagtatggcgcatcagggggcttctctgctcctgctgccccaccacaagagttgcatacttcgcagcagatgccgccgcctcaatatggaaatcagcctggaccagcaggtgcaccaggaaccgggcaaccacatccatattatcgctaaatttagattcctattcacaactggtactatgccctttctaattagtaactttgtgtacctttgcaatagggcaaaaccagttccttttccctgtctttcttctcatggaaccttttttataaataaactcttcatccagttgttctcatccgcggcacaaaatgaagggttttcatcgaaactcatcatagttttctcccaaaggtaactttgtatattcctaatatgtttatcgtcagctcgttggtctgtatcttggaatttagtattccctcgttttttacttgtcactgttgtgacaaaaaaaatcactgctttaactttgatcaccaatcatttttttaagttgaacaaatccacatggttacatttatatcagacgcactttgattaatatggtactatttttttacaagtaaagtgcacaagcggttattaaacttataaggttatgtcatttaggttcctaaactcttaaaatatagatccaagttttagaacttgtcaaagtgtcatttaggtcttaaaacgtcacaacctctttaggatcttacgtgacgtgtgacgttgatgtggcatgccacacgaacatgacgtgacatcatcttgaccggcaaatgagacctagatgagatattttgacaagttttggaaattggatttgtatttgagagtttgggaatctagatgatacacccttacaagtttaagtatcacccatgcactttactcattttttaagtactaggaataatgcccgtgcgttgcaacggtaaagtcgtttgttccagtggtacaacaaaagccaaagccattttctccaatggcacaacaatcattaggagctgagcgataaattaaaacattggtaccgctatacattatattgaataagttaattaaaatccatacttggctttgggtcgaaagcccattctttcctttctttttagccgcagcccggttgtaagatttccataataccgttgggccaaaatagagtgaaatggcatgattgaaataaaatatattaattgtgcacataaataaaaatctattccttaatatcgtagacatatatggaacaataaaatattaaaacataacgtgacaattaacacgcataatttcataggattttaattgtatctcactttggggctataaataaagctaagtgtcaaaatgtcataaaaaacatataatggtttggccaaaatgaagctaaattaacattatatatgaataatggaaataaattaaattttgttgccaaatttattgttggttccatttagctacatatatgatcttaattgcacaagaaagtttataatgcaactttatgtcatcaaataattgcttaaacggattaaaatgctcttatgtaaagaggaaatcattaattcggtccgataataacggaaaatcaatttggcccgaagaccggcaacggctcggaggctagagctggcacgtgatcgtgcggcccatgaggcacgcgaagcccaagcgcggcccgttagcgtgagctgtccgatcctgatggatggctacaatctctgatgggtggctgatgcagtgtgggagagtcgtgggtcctctaatgctgatcggacggtttagattgatcaacccggataaaattgccaccagccgaaaccctaaccctattaccctctctccctggccctattttctggtgctaggcgaggggtagtggtcacggcgacgccgacggagcggcggcgatgttgaggcgccagtgtgtggcgaacctgatgtcgagcatggctccggcgaggccagggcggcggcgcgcagtgggatgccatggccaaggcgacggttcatgtgagctgaggccgtcggcatcgagcgaaatggcggcgatggtggtaaacggcgtgctgcgagctgataccatgcgtcgatccctctctcccacctcagttctcctcctcgacacggcgcaagactacaacaaggcgagcctcgacctcgagcggcaaactgaggcggcgctcaagttcgagttctcctcctcaacatgacggctaagggatgcacggcggtgcgtgtagctgtacaccagtcgcacgaagatggttgagagttcggaggtgcgcacacaggcggagctcatgccgtgcgccacgaagtccgacgaactaaccctaatcccggtgagtcttagggttttccattgagctggtgatttgcctgttcggggttaactgttcttaattttgggaatttcttaggttagggttcgtatttttcggaaaaatcaaaataagggtttcgaatttgggggatattcttactcttataccgatctgattcgcctcctcgtaacaatctcttattgtacttttaggatcggtaggacttaaggtttaggtagtgacaaacgaacaaagattaagtttccttatatatgagctaggggattgggggcgagtccatggcgtaatcggatgtgctcgtatacgaacgaaagattaccgcggaatcgacggatgaaagcttgtatatacgaacgaaagattaccgcggaatcgacggacgaaaacgcggtgacgatcggaaagttacccattttcttttccctttgtttttatttctttttcctgataataggagagcatgcatatttatatttgaccattaggatgggtcaattatttgactgggccaaaaatagaaagatgcacacacgcgcgcaggccatctccatctgaccttcccaggcgcattgtgcacctctctcatcgctacgttgccaagcccatctcttgattgctggatcgcggaaaaaaaggagaactgaatcggaggaggcgatgtgatgcgctacgggctgagaaaaaaaaaaggaaacacatgcgagcgccgagaaaaaaaaaacgatgacgagggaagtgattaggattcgaaggcaacggaccaaactatccggcaaaaatatttttaattttataatagtagagatttaataacttgttattaaaataagagtggtaaaagattgaacatgaatagtgttagcgacatgtaattggaaatggaggcagtgccacattcgtctgtcctgcccccctttgcttctgctgagcaacgcataattttcttgtctgttgtcttacggcccacatctcaaagtaaaaacatcaatttggaggaggcagggcaacgcgtttgggaggccattgtggtgccagcactgctgcagcgatcttggcagtaccagcaacaacagtcagccggttactaatatatactttccttggattcgatcggatgtcattatgaacgattatgggcatgttcactttgatgcaatttttaaccttaccaaattttgataaagttgccaaaaaaaagtggctacatttagtttgctgctaaattttggtaactatataggaaatccagcaaaattttggtaatataatgacaaaatttggtaaggttttttttgacatcaaagtgaacatgccctgtatatgtcaggagcaattaatcacatggcatatgccacgctgcaaagaaaaagctcaagtgactgtgcacttgtcaacctgtccacgcatctctctttgatttttcagtacggagtacccagcaatgacaatgcacgagccaaggttttacaagacatctccattatgtattcactgtgaaagtgtgaattatactcaccacattatttatttattttatttttgttttttttcttgtgaaatcccctggaaaccgcacttgggattgggagacaacaaccagcctactgccatggagtagcaagccactacttagcactagtgccgcgtagttacactggacaaaatcttgtgacactaaccatatggatcaaccaaattgatgtggacgctctacttgtcaccaaacttagattcagttaatgaccagagcttagtgacaatgcagtgtttcttgttcttatctctgttctctgcactcggattgccagggttggagtcatgatatggacaagcccaataaaatctcagcgtgagagctactcctaggaaaggttgtaagcaaatctttcttgtcactttggatatgcctttgtcagtagagagatttttcatcagtgaaaagaataagctctctcacggagaacattttgcagcgaattactgtacaatacaatgtgctctcctttctcggaatctccggctctcgcaaacagagctttaaatttcgctcctacttgtcttacgtcgtaccaaagaaacaggtgatcaatgaaaggaaatctgaaaaaacacacaccatgatttggaacaatggccggcttctttaatagacattagatgaaataaaaggtcaaaggactggaaaggactcaaagctgaggtggttaggcattggcatctaaagtaacaataaagtgaaaatgtcggtcacctacggttgcacctgtgccgtgctctagaaactgttaactgtccagtgtttacctgctgaattactagggttataactactgatggttccttgaaaatcacaggattgaaaaaacgtagaaataagaaacacatagaaatagtaaagaaaatcatatgcaaaacagaggattaaaaacataggaaaactatagaaatgatcgtttgattggtgcataggaaaaacatagtaaagttaagtattaataagttaatagtaatcagagtttgaatgattttgctaggataaaccatatctttcaatagtgctttgccttgatcctacgtgtagcaaaagaaaaatgagctcacggtggatgttaattttcctatgattttttcttgaaatcatggtcgtaggaaaattttacatgcttttcctttgttcagttcctattaatcaaagggatgaatagtaccaattcccctggtattcttgttcctatgtttttcctccagttttttcccatgaatcaaaggaggcctaaactcttatagtagtattgagaaaattcttaacaaaaaggaattgctttactgaaagatacttcttcgatagatgcatctaagacacatggaaatgataaagatttgttatctgcatacggcaatttttacaggctagcttgtaattttggttcctctaacggtaaatctgtttggttgaacttctctgacatatgagtgtgctaccgacaagaaaaaaaatgtctgaaaaatatgggcctcagttttctgtttgttctgacatgacagcgaagatgtcaacactgaaacagcgtcccaattactgagccaccataattagcatcgtaaaatctccgtggagaattctaagatctcgcagtgcacagaggctcttttactgaagatgctgtgtgcatcagtgcaatgtacccagccctgagatgctgttctttcctatctttcctggatctgcatagtttgatgccaacaggcagcaggacatcatgatctgaaattgggagacttccataactgatatccatggcctatctctgttcataaatatgcctacacagtcttcagtctcacgcacagatcttgttggtttcatctccaccgtacgtaccaaatactagttggttactggttacaacttacaaccaaacaggagcaacttgcaggctggagagatctattagcatccatatcatcacctacctacctctggcactggcaatggcaaaagagccaagaatggttttatacttgtatgcacaatgcaattggaaggagaaggtaaagaaaaggggatgtagtttgagaagaacacacagaggcagttccccaattggttgtggaggcttaaaggcttgtcttgcctgcacatttagtgcccccacatgtatgcagattgcagccactctttgcaatcttgttggagatggtctagggatcttgacatcatgggatatgtcatggttgctgctggtcctgcttggcttatgcaatgcaggtagcattcaatttagcctcaggcatgcaaaccacaagcatgcaccgtacatgaaactgatgagcggatacagactacaaaaggggccatggatgtgctgttctgctgtagatttggtccctcgaagggaaatgcacaacatggttgtcgcatctagtcatttactacttcatataagaattaaaggtgtgaaacacactttgaagcaaaatgtagacccatttcatggttctgcattaatattttgcatgtggttttggctttgcaagccatctctgattacataactgaaggctgaatagcaggcggcctaaatttgaaacgatacatttgacttgcttttttctcataaatattcgggatgtaaactttttagcagaaatatatcgtcaatctcgcacaaccgttacacgaaaataacgacgcgagcagtctcgcccgacgaaacaacgagaccgaacggcgaaaacaaggacatgcgcggtggcgacgcgagaccgtgcggccaaaccgcgagaccgagcagtctcgctgaaccagccagcgataccgactgacatgccgattgaaaattgttaattagtgattaagtaccctaattatccattaattaattaaagaaacaatacatgtagtgtacaatatgaggtaaaatttagaacagaaactaaaatgatttctgaaaattggaaaaatgaaataaaagttcaagtagtaatataatttataaataaaaaatgagaatgaaaaatgttgaatgttgaaagttctatcagtataaaacacaaatagtagtaaatgaaaataaagtgggtaggagcaacttgctcttgggtgacattggttgatgggatatataaaactataaataaaaccttaaaaaatattatatttgatttttaaaattcctattacgattaaaaggagaataacaagcatatcgttaagcaactcagcctcaacggttggtgggacttttagccattaattaatcaattaataattactaattatgattaattaattattaattagggtaattactcactaattaagcggcaccgttggacaagacgttcggtctcgctgattccttatgcaagaccattccgcgcgtgtcgtcacgccaacatcattttcacacaacagttgtgcaagatcgatgatatatttctgctaaaaaattacatcccaaaatttctgagaaaaaagcaaatcattatgttttcaaatttaattctcgtagcaggccagccctgacctttttatcggcagatcagaactgtacagtgtctgtactgtagcaattaaccacatgaaaatatgcatgctacctagctttatattcttatcacccaaaaactatttgaactccttgcattttggagaaaagttgtagagtactacttcctccgttttatattataagactttctagtattgctcacgttcgtatatatgttaatgaatctaaacatatatatatgtttagatttattaacatctatataaatatgtgtaatgctataaagtctaataatatgaaacggagggagtatttattaaggcccttgtcgaggagtgatcctctctagcgggagatcgtgagatccccttttatgagttcggccaggggaaaagggttcacctctcgaaatcgtgtatccgccctaagtgtttcctaaccgcgtatgggcgacaagattatacaggttcgggccgctatggagcgtaataccctactcctgtgtgtgggatttatggttgaatgttacaagggttcctcaactccggagaacgttcttgctcttcgcttcctggagtttaggcctactgagtgtcgtcctctttttcggcggggaaggtcctccttttatagttcaaggggataccacatgtgctgcttctacctcttctctcacgggagaggaaccctccttaccttgatcggaccacgatccgtgccttcgcccggaagctaagcagcagtccgtccttgagtgggacccggcgccgccccccgcctgacacgggggacagccctgtcattccctcttaaatgagcgaaggcttgtggcggtcctcctcacgtggagggaactccggataacgctccgatgggacaggacatacctacctccactccgccggatacagaggcgacgtgggggcacgaccgcccgtccaatcggcaataggccggtcacagattggtcacacccgattgacgtgggtccatcgggcggcaccgcacgtctgcccttaccgcattaaacgcggtgagggacagttgggacgccgcgcgcactgatggctgttcagcctgggtctcctccccgctcgcttcccccgccacatggcagttgggcgagggcctcggggcgaggcagcgcgagggcccgaggggtgtgacgtggaaccccgaggccccctggctgcttctgcgactcgcgagacgcggggggagggccaggctgtagagccacgtggctggatgggaaggtgacttcccctcactttgcattcccccgggcctatatctccgatagccctgtttcttttagcttgggattattataatctagattattgagtcagattactataagctagattgttataatctgtagtagaataagcggttagttgtttcttttctagattattagagcctagattattgggtttgcaagtctaaagagggagtggggtggcatggtgggtaatttttcacctaataatctggaaaaagctcaccaaaatgagcttatcatattataataagctgggctccagattataataagctactttaataagttatctgtttctttcaacttactcccaataatctggattataataatcccaagctaaaagaaacagggcctaatatacttagaaaaaatgcccgtgcgttgcaacgggtgaaaactattttaatcttattattgttatacggtttagttaaggtgaaattcactatgagaattcgtttggatatataattttctagaaaatcattagctacaattaggagtccgatcatctcaagttagcatgcgagttttttttgaaaagatttcttatacgactccttctgtatttctaaaaacggacaaacttaaaacacgacccaaatacggtttccaaaagagaatgaacttaaaaaccgactcatacacggatgacgtgttaaagtaccagcaaaaacatcttcaatttttataatagtagagatattgaaagttgttagtcatagagcagtgacgatgccataaatttttaaagactagaggtaaggtaaggcacaactaataaagtattggttttctataaaatttacgtagtatatttaatacaatttaaacaagattttggaagcctgcctctgccccaagtcacaggatcgatgcccatgaacaaccttgttcatggacagcctgaagcctaaactctgaatgacggtgagatcgacgaggttctgggacgattcaattgtataaaaatttcgggctccaccacaatgaatgaagttcggaaatttcggatgtcaaattcaaactaaataggatataagagcacccgcaatggtaagtaagatgctctctataaaatatgtacatctcagcaatagactagattaatagtaaaccatctcaatagtatgtctacatgggtatctatagctctttaatacattgcctcgtttttctctatatactatcttcaggttagtagatagctttgctctctctcttcatttaatctcttccaagtagaaaaatatgctaatatagatatcttgtagagagcctatagataaccattgcgggtgccctaatgttgtgtaggttctcactgaaatcaaaatggatgaaatttgcccgattttcgatacacacttacgtatgagagaaaaggcatgcattcgtgctgtcggaggaacaaggacgggtccccgggcctctgcggtcttggggacaacaaatgtgacgtacttccttcgttttataacgtaagtctttataggattatccatatttacatagatgttaatatacatatacatatatatatatatatatatatatatatatatatatatatatatatatatatatatatatatatatatatataggacactcatatggggcaccatggtgcccgggcaccatggtttcaaatgcacaaaatcacttaaatttttcaaaattttcaaattgtgagtatatacctagttataagaattcgattcatacctatacctatcaacaaaacaactcaaatttaactttatttcacaatccatgattacatacctaactaattatatgtatggatgctatatacctagaatcaaaatctaacaaaaacaagttcaaattcagttcaaacttgctttcaactagttagtaaagtagttaatattaatacctaaataattgaaaaagtttcatgctcatttgaattgggtatatactcaatttcaacaatggtgcccgggcaccatggagcaccaaacaaatttactatatatatatatatatatatatatatatatatatatgtgtgtgtgtgtttagattcattaacatttacatgaatatgaacaatgctagaaagtcttacattatgaaacggagggagtatttctttaaaagacgtactccctccgttaaaaaaaacaaaaagacaaccgagagggatagtataactaatttggacaaccctccatccaaattcgttgtacaagatctatatgttcaaattgccgaagagacaactggcaacttagtacaccccatcctccatgggcggagtacttgttcatcatcgacatcttcaaaaagctcgttcatactaacaagaaaacctgtaaatatattagttttgtaagttgtaatattaaatatattttgataatatgtttattttgggttaacaatattactatatattttttcacaaatttagtcaaacttaaaaatgtttaactaagaaaaaaaagttaaagtaacttataatatgaagccgaatgagtaaattacaaactcatacgcacggtttgaaattttgattcgaaatttctaaaatttcggtaatttcaccctcgccggcatgctcaaatcttgcccgaaatttttggttttttgcatttttttataaatttggtcaaattttcaaataatttcggtcagagattcccgaaatttccaatatttcgttcacctccggcataacacctaatttcgaaattgaaaacctgctcgtagtcatatgtgttttcttctatgttttagctagccagctatggcgcctatataaatcccccacacgaacgaacaaaacgatcgatgtgtcgaagtggacaagctgcttaactaatcagctttccctttcgcttgcgcacgtacgtacgatacgacaatggcgccgccgtcgctaccgattctcctcgtcttgctctcgctgtcgtcgtcgctgtcctcctcctcggcggcggcggccggccgctggaccgacgcccacgccaccttctacggcggcgccgacgcctccggcaccatgggtacgtaaccaatgcacgccgatacatatacatctatctcagctcagaattgatcgaagtggcggcaatggcgccgccggttgtgtgcaggtggcgcgtgcgggtacgggaacacgtacgggcaggggtacggcacggacacggcggcgctgagcgcggtgatgttcggggacgggctgagctgcggcgcctgcttcgagctgcggtgcggcggcggcggcggcggcgaccggcgggggtgcctgccgccggcggccggcaagtccatcgtggtgacggccaccgacctgtgcccggccaaccacgcgctccccggcgaccgcggcggctggtgcaacccgccgctccaccacttcgacctctcccagcccgccttcctccgcatcgcccgcttccagtccggcatcgtccccgtctcctaccgccggtcagcaaccgccgccgccgccatcgattgatcaactcgtcgtactagctgataattaatccgccattgatttacccgtcttgtttagctcccaaaataaaaaattaaatatagaaaaaaacaattatgtgtaaatgacgagatgaattttttaagcctaattacgtcatgatttaacaatatggtgctataataaacatttactaatgatagattaattaggcttaattaataaattcgtctcgcagattcgtagcggaatctgtaatttattttgttattatacttcaaatgtgtgtccgtatattctatgtgacatgttaaaacaaaatttttcgctgactaaacaaggtctaaatgtgtgtgtagggtggcgtgccggaggaagggagggatgaggttcaccatcaacgggcactcctacttcaacctggtgctggtgagcaacgtgggcggcgccggcgacgtgcacgcggtggcggtgaaggccggcgggggaaggaaggcgcggtggcaggccatggcgaggaactggggccagaactggcagagcggcgcgctgctcgacgggcaggcgctgtcgttcacggtgaccaccggcgaccgccgatccgtcgtgtcgtacaacgtcgcgccggcgggatgggcgttcggccagaccttcaccggacgccagttcacctgagaagatcgatgagatgactcgtacgtatagtagcgcgcctagaacgatgatgtatgttgtccattgataggtcggataaaaaaaacaagatttcgaggaagagacatcccttaaacttcagattgaaatcgcataccccttgccacttattgcataccccttgccacttattaagtggatctccatcgatcgatcaatcattaggttcgattgacacgtaggaattccactgtattgcaatagtatgttgttagtagtgcgatggatgtaatatgtgaaactgacgtaatccagacaacactaatgtaatatattccccgtcttaaattagttgtcttactggattttaaattttgtttcaaaataattattattaaagtactacttatctcatcaatgaccccatataaatttctttccattttaccccaaccaccttctcactacaatacaaataagggcactataatttttccttccttactaaaccttaatttatgctaaataacctagaacgataaatattgtaggatgaaggtagtatgtaataggagaattgatccatgtgtcagttgcatgttgttggtgtactgctcatatgtttttggtggtgcgctattttctgtgcttgttaggtactatatatggatttcgcaagacatatcgagaagacatgtttaaatatagtgttataataaaacttacaacattcttctactgagcaatactaccacttcgtgttgccaatatgcttccaattccaattagacttgttaaacctagcccttcccattgttctcgttgactacccctctacctagcttgatctttgatcctctatcctccatctcccatccttcaaatttcattatactcctattactaatctcgcccaacactaactaccaacccaattgcttcactgttgttgccgcaacatcaacgtccctatttttcaccacccatcacagggtccaccctgtccgttagctttatgagcccgggatactcttcttttttctcatcgcactccaattacaattgtttggtgtgttcaggagagattgttgtagttgcagcttctttgcagcaacagtggcagctacagctagaatgttgatagatattattggtgctaagcagctgctgccgcaaataactaaagtgaacagattgttatctgtatcgttcctaccatcaaatctcatcgaaatggcgaagatagataatgtcactacaaaaacatagagtatattcagggagttaaagaagtttgcaacattttatccttattttttaatcggatttaccacctaattttaccatctttttcaggttggaccaggtttatggcatgggttgtgcttcggcctaatccacacgagcagctggtgtttgctcatggtggcgatggtgcgcgataccaggagcgtgcgcgacgcgtcggggtggtcatcagtgagggctagcatgtcgtcgtccagtggacgcctgacacggaccctgtggtgatcatgctcggccctatcgcactcaaaacaatactacgacacatctgattatgttgacaggatctaagactataccagaactatcccattcagatcatgcatgagaagcaaaaaaggccaactattacatttagcagtaatcaagatccgatcttctcttttcatgagaaaattcaacatgtttccgattaccaagcgaggaacacggattaattactctagttttttgaagagcataagaggaatattgattgccccacaaaacccaaatctcctaggaattactgaatacattgctttgtttcactctcccagatctcagggtcaactttcctccatggattgctccatgatcgaatagcagacgcatacctgtgtacctcataaacccaaaacaagcatgatagcaacgagccagccgacgaccccaatgattccatcttcaggaagccatcgatcgaggtggcatgggcgtccaccaggcagaggcccttcgccctgacgctagcgacatggccggatgacgagactttctccaccttggcaccgacgacctccagccgtatgcaacaagggtcttcagccggtggccggtggacctagatggtagcgtttgtgtgttgactgttgagtttgatcatgctgctgcatagcagttgcgtgtgaagggagacttttttaggttgggagggaagtactcgtaccagagaggcaggcggaaccgccgtcgagggatccctcgccggagcctggagaaggggactgccgaccgctagtaaatgcataccaagtgacccaatcagtaaacatggttcaacttgcaaaggatggtaaaaataggtggtgtaaaaatcgtcttttacccctatgccattaaaaaagttgcagcttacctgtgtgccacaaaaaagtttggagtcacctgtatgccatgagaaaaactttcgttgacccgtgtgacattccgtccaccttctgttagaacttaacggttccatagctctgacatgtgggacccatgtatgaaaatgactaatttgcccctaaggattttcagctctattctcctctcctgctatctcccgtgagtgcatgctctctcccagttgcgctgcaagccgccgcaccctaaccctagccgcacgccgccgccgcctcgcctcgccggagccgtcgccgcctcgcctcgctggagccggagccgtcgccgtgcgcccaggccgtcgtgcctcctcctctcctcctccagggcccacgcgttcccgcgtcctccctcgtcgcgcggcacgtgggcggcacgcgcggcgggtggtggttggtccgggagggcggcatcgtcgtcggtcaccgggtggtgcagcgccgtcgcgccctccgtcgatggccgccaccgcaggtgagcgagtgagatatttgcggtggtcacgtgagattcgaatcacgatgtgctagctgtggctactgctctcgtgctatctcttgatctctcgctctcgctctctcgtgtggggtttcaagatgcatctgtatatggtttggagttctcgtcttttgcgagaaacggaatttggaattatgcgattgcttttggaaattggtgccctttggaagctctatgtgtatgcttgattcgaagcattaaataaaaaaaagggcatatgcttgtttttatgtattggacaataatacctgcccacatgaatttctgtcactcacactaaactataatatttgattacccgttatttgtcggtatgcaatggtcatgcacctgttttttcctttttacaaaatttatttccaatttttccttattttttccaccattttctaatatttcccacattttccttttttcccggatttttaaacacttttaaaatttattctcactttttctgatttttaccttttttaaatattatttttcattttttctgatttttaacgcttttcctaaattatttttcacttttctaattttttaaacccattattgtacataagggcaaaaccgtctttacacagcccctaacaacccctaacacctctgttatgtctccatccatccaaaatagcacacgggtcaacgaaagttgggctcatggtatacatgtaactctaaacttttttttggcatacaggtaaccagcaactttattaatgacatagggtaaaggactccaaatttgaaggcgcagacagtagggtttttggtaatagaagggggtgttttgtgattttgtgaaaggttgagggggtaaagcagagagttttccccgaacagtcagaaaaaaaaaagggaaattcgaagtccgcagccggaggcccccacggcggcggcgctatggcgatctctccgcctccgccgagccctagctccggcgacccgatcgaggccgcgagacacgccgccgcggccgccctggcagtgcccgcacgcctatggggctccctcctcgcccgcctcccttcgctctcggaccgccgcccccgccgccgccgacgccctgctcttccgctccccttccgcacagccgccgcccattccgcccggtgagaaaccactgcttggattttagtgtgcctcctgtgcttcttatgcttgtgctgcaagctctcgcttgctagtgttatgctagtgcattcgtggactggacagaccgagtaaatttgggcaaattttggggttttaggttggtagctggtggtatgtgaggaattcgtacaatgcgtttggaattagtgactaggtgcaatataggcaaaatctaccgattacaaatgcgaatatctgataggaatgttgtgtaagcgtgtggctaatgcctaatgttctggtattttctttgcgtcgtcgatgaccgtgatgactgatgacacataattgcatgaagtttgttttttaaatcatttgttactttcagggctaccggtgagacgcccaaagcttttggcatcctagaagatattgtacaacacacgctgtgtagtttgcatggtattcagaaaagcttactcttttggcagtccaaagctgaggtctcaagttaattcataaatcttttattttttttacgctgcaattaattaaaagagtgcatcttatacttcatgctatttacctatttttggttctgttatatttattcagggaacaaattcacagaaaatgtattttatgatctttgaaaggggaccaagggcctttgttaaagcaacatatcagacattgactagactaaggagcaatgagagtccaacccagtacattttgcactctgcatctgatatggtctcaacaaaacttgctgtcctgacaaacatgcaacactgcttggctgcttttcttgctgaggtttgtttagtcagatgtttatcattacaaatgcttatgtctagtagaataaaactcgtgtcagcagttctttcaaagctaactttgtagttgctcgcttccaaaaattgctgtactactctagtcagatcattcaaacccaattttctaactctttgataacattgtttgttttacatgacacagttccacatttataaatccaaatcataccttgcttgttctataggtttattgcgaagttgacaaattcaaagaaggattaactgaaaattcagataaatcgcttcacacactgtttgctgttttgaatactgtcttctccaaattggaggtatcactccaaaatgtttgtgaggtatgcattgtttgcttttcttgcatttggatgttatatgtataatatacttttgtgtttggcattatgtaatatattttcttcaggggcatactctactgttcgcactcgatggaagcccatctgaacttctctttgaaagattaccagaaattgattatgataactcagagtggacagaggcctcctcaacagatgctatatgttttatctaccaaaacctccagaagctagataaccttgtttgctctcaggtaagcaactttctctttcaacaacagcaacttgtctcgcatttgctacttctattaatgttacctgagttgtagatggggtatggttggatcaatgttatactattggaggttctatgattgggcctgttcggctgcctgttctgcagttgtggcacagccggcaccaacagtgccacatgcacacgcgcagccgcagccgccgctgccagcttgctgaacaggcccactacctgtttgtgcttgctgtataaaatgtttatatagctatatgcatatgcattgtttcagactataaatgagtggtattgtcatacctatagttctgaacaggcgccccattagcatgcatataatggagcaacatgctgattatcaaaaccatgagatttgagatgtgagaattaatcatgtggatgaactagtgaaaatgtgttcaatgccaaacttgtatctcaatacagagtaaatgtgtaaatgtatagcattctccaggtagtattttattttttgtgatttctccatttatcatatttttacttttataaactatgtaagttgcagttatgtagaaataagtgggtttgttcactgtacaacaataaatcttacatttcttatcagatgattatatgttgcttaattgcctgaagcaaatattttctgcaattatagctctcaaggcataaaaaaccaagacatatgaccatatactggttgccctacacatgtggagcgttgggtctctcggcatgttctctgtggcttttgcgacacagtagcttgatgggaagttctgacatcgacaactgggttcaaagtgccaaagagtcaatagctggattttgggatgtgcatgttgagaaacctgtaggatactttctatttatgtccttctattatttatcttatgcatttttaaatgatgctagtgtaagttaactgagggtgaatcaaggcattctagttaaagtcttttctcgttattccgacattgacatatatgagatgttctctgaggtacaggaggataagattttgttaatctattcatgcaaatatttgtctaacaaaaaggaaaaccagataaagggaaagaaaagcatgctgccttgtgcatactagccgtactgttttcttatagtataagcatatatgatagagtatagaaacaatttcatgtgtttgtttactgcagcacttgcacttattaccatgaacatccttaagtttacatgtgtatataaggcatataactaactactatctttgttgacaattataaggcacacacgtagtttcaaaattttggacattgtaattttttaccaataaataagtaatgtaagatgcaacattatatagttgtgtgatacaaaaatggtaattttgaatttttgtttgcaataacttatgatcatgattttgtagttacacacgctatattgcaaaagattcacagtcataaattcattttggcagaccacaccaagtcaaatcgcacacaatattatataaaaatcaacagatagtagagtaatatgcaccaacatctgcaccgaaatagtctaaatactattccttgtggaaccattgaatgcaacatgatataacttcagagagcattagtgtaggagatcaagtgtcaagttttagtggggaacttctagttggatttaatatagctgcaatttttttccacacctttgttgtggctgaattttgatattgttcttaaaatttggaaatcaattatgttattgtgattgcatcatgattgttttattctcatttgatgatcattagatcatttccatcagaggtgagctttttgagacattcaaaaacagaggtaaacatgtaatggatacacaagaggtccaactgaatgaagaagtattgcgcaggttattccctgatactacatctctaatatgcaaatttaatggtaatcatatcacatagttttttctgccactcgacaaattagtaccatattgcatatctaatattgcattttcatcatgttcatctgtttactcagatatgaatactttagatgatatttacctgtggtttcaagaattttaagtcgagtatgccagtatgggggtttcaataatgcagcagatatgcttgtaattttgatttgggatacccaccaccatattttgaagtgctttccaattattttaggcataaatagtggggtagtcactatgagtatttgtcttgtgtgacatgaagtagatgtggtggcacaagagcacagtggtaccagcttagaatttctgtttcctttttgttatcttttgtttactactgttaggattctgtcctcgtcctcaagataccaagtaagtagctgctatgctgagataagatatgttaggtcctttctctgtataaagggtcagacaaactgcacctgctttgaggaatcaatcaatggaaaaaaaatcctaaaatatctctcactccttgcttccctcgccatgcaacagctacactacagctagtcagtcatgcagtaggtgtctagggacatgtcctgaaaacttcccactacttccattcccgttttaacccacagtaaacaatatgaaagtattgtacaggtgtgatgattgatgaagccattgatgacatagtaaatactgtacaaaagagtggtgacgcctaaacaaaaagattccccaacccagcaccaagattttcttcgtttatctacttttttgttgatattattggttttgactaatgttttttcatcctggagtgctgtaactttttcagtaaaaaatttgcaatttcttttgtcttgaacaaaaaattacaaactttaattttcttgaatatgcaaaacttcagctttgcagccatttttttctgagtccattagaggagcataaattatattttgcattttttaagcccactggttacatattggatttgtaggatgatgcttgaattttgtcagcaaacttcaaatgagaagctgccacaagatatatcagatcaagcacttatggagaatttcatggagaggtaagtctgtttgaaaactataaactgatgtggtgttgacttgtttgcatttatgcgttacagtgttaggccaaatgttgcaagttcaaaaggcacctgtaatatttttttctcaagaattttactgtattttccttatgctgaagaaagtaattcttcatcttgatctttctctgctaccttttaagagcaaatattatagaggtaattccatatgaggagcttttgattcagggttggaacttgggatcatttgatcacaaaggaaaacatggcatgtgcttcatatacttcatttgagtttcagttgcttttttgaaactaaagtgattatatttgcacgtggggtaaaccttgcaccgtaaggctcttccaacttcagggttcatttgtttcctagtatgtttggatgaaagcaatgagccatctgaatttcttgggaactctatttcatgtctcagtaaaattctgcaaggtggtgatagaagttaaaagttcaagatgaatgtaattctatgctcgaaacccagcatttgacgttaaaacagatttgacattacttttcaataatggaaattaacttattagcttcttagtttccaatagcatctggaagattcgtgttacacatgctttatagctattttacatagtagtaggttctacatatttacatacttcttgtatagctagctgttccaaaatttctgtttaggatgaccagttaatcacttaatgctcagattgtgcttctgtagtggaaagctaaattgacagtagacatatcctttatcttgtttatttgtgcattgaactatatgcatgtatttgcgcagatatgagaaggaatggacccatcctgttaagaatcttttcggtggagagttagcatatgccatgcttatccaggttagttcacttgactctattttggatgcatcgaatattccacttcatgatatttcctattctcaccttcaactttgaacattcagcttcagaagcgcacagtggatatcaagcagtaagttatactatttctgtctgacaataataactaaaatgcataaagatatatttttcttgtctaatattcatcaacagatgtaattggattcttcttacacagggcaatgctggaactggatcagattcttaaaggaaatgcgataaacttcgctattcttgcagctttacctgcatttggtgtttcgcttttgctcctcactgtggtgcaagcatggattatgaatgtatgttaatagagttccgtgattctatcattctctctttgaaatatcatcatctgtcagaagtatctgtaggtctgtggggccttgttgtgtttccctgtaacctatttgtgccacagatctttgcagtatgtggacatgcgtgtagaaaagcaaaaaaatatggtgactaatgtcttaattataaattaggaccaaggcgccgagggaagaggcaggattgcacggcgccaaagaaggctgctgcttcttgatgcagagagaaaacttatggagtttaaaaattgcatgattaatggaatggtaatgttatctacatctatatgagttgctctttaggattcattctctcaatctttaaagagcttttcggcctaaatttgttgactgagaatgcttcttttgtatcgatgacaaagccactttgatgagtgctccctcttattattattaacttttggattataaatttaataatattggaatgaggggcaccctttacaaatgatgcctctgaatttcttcctttacaggaggaagaggcatgctgtaagttcggattaacactgtacaaccttgatagattatacagagctgttgaatcacatgcagaagaaacaggcgagtggtcaaggtcagtatcaactcatattctttaccatttgattcctggttactctggatgacctttccacaaaatcgtttgtgttgcagattaagagaagacattttggatctggcgaaacctaagatgagtatgacagacaagctggtggttctttcacgactgaagggaacgtatgactgctttccatagccattagggggtgtttgatgcatctgaaatttttcatcatcctttttttttcctcgggtgatgattggtgaacttactgtggttcattttgagacgatgaatgcgcaaatcctgcctaggcattcagtctgatgcacctgctggtaggatttccatgaagattttgataccgaaaatacgatagagaaatggccttgtgccgctcctaatgtctagtacttatttcttatgatgtgaatggatgatctttttgatgagccactggaaataacagtttttactctcatgagctataaagaacaaacggttcgaggtgataagaaaacagaagcagattgtgttgttttgaaacttcattttctgatcatccagatcaaagacatcgttacaggatcagcggaaaatggcattatgtttttttttttgcctgaacatatctaaagtattgaaagaaataaagtttcttgcaatctggttgggccacgtcatccataaaacagggaccgtccgatacaactgctggtaaacgaccaccgtcggatctgataagagaagatttcagaaacaacccttcaagaaacttctctcagcttctagtcctcctatgcctgtgtattttcattttccccctccctctcctgtgtatcgctgcgactcctcgcacgcgtcgcttcgccacctccgcctcttctccttccaccgccaccgctgtcttctcctcccggccctcactgccatcgctgcctcctcctcgtccccagtgccccacagcctccgcctcctcctcctctccctctcctctcctctcatctccgtgtaacactactagatcatagcagaggaagaactagagtaggagaggtgaagaacagaggaggaggagacagagtcgaggaagaaaggggcagagcagagttgagaggagagattcgtttttcctttcttcatttcacacctctctcattacagggttccttacttataaaggtcatacatgccatcctggccgcttggccgaatcacacaacacacatgcgcacacacctacccgacacgttactgtaaacgtcatcctggcgttgtagctcgtcacgcgtgtggcacaggcgtgacagtaccgcccgccggagaaacagcttgtccccaagctggtgctgatggaaagcgggtcttgagcacttcataatcctcccaggtagcctgatgcgccggtaaagaagaccacttaatcaacacctgaacatgtgttgcattgccctttttcacaagccgacgatcgagtatttcttcaggccaaacgtcagcggcatccaaaaccacagggtgaggaagagaagtaaagaccggtgtatgatcaggaacatgtgctttcaactgagagacatgaaagacgggatgaatcaaacttgagtctggtaactgtaaccgataagccgactgaccaattttctccagaatttcaaatgggccaaagaacttgaaagctagtttggggtatggacgattcaccaccgaagattgagtatatggctgcaacttcagaaacacatgatccccaactgcaaaggatcgttcagaccggcctttgtctgcttgatgcttcatgcgcaactgagcccgttgcagttgttgttgtaagaaagcagatagctgattgcgttcagaaacaagatcaaccactgactgatggaccgaggagagaagtactagcacttgactgacatgaggatcagctccaaacaaagctttatgaggagaacaacccaatgcagtgtgaaaagaggtattgtaccagtactctgccaagtgcagccatttgttccacttagttggtgttgcttgagtcatacaacgcaagtacatttcaagacattgattaacacgctcggtctagccgtccgtttgaggatgataagcgaagctcatactcagagtagtgtcccacactttgaacaaatcactccaaaatcggctggtgaaaattttatcccgatctgagatagaatgagggatgccatgtgtcttgaaaactgttttgtcaactgcattggccacttgggaagcagtaaatggatgacgcaagggaataaaatgggcaaacttagtgaatctatccactaccacaagaatgacagtgaatccatcagacttgggaagaccttcgataaaatccattgatatgtccacccaggcttccttaggaattggtaatggtgttaacaagccagggagcttgcagtgttcagacttggcctgctgacaaatctgacactgcttaacaaagttagccacatctgatttcagacctacccaagaaaataacttcttcatcctttgataggtagcagtagtgccagaatgacccccaacaggagaagaatgaaaagcagtaatcaatttcgtttgtaatccaatgttagctccaatccatactcggccatgatgtctgatcaatctatcatgcagagaaaaaccttgtgtattagtagattgaacagccaattcagtcagcaaagtttgagcagcaggatccactgaataagaatttaacacctcctggagccagaggggagaagccactgacagtgcagcacaatgaggtataacaggcatcctggacagcgcatcagcaactatattgtcaactccttttttgtattgaaaagtatattgaaaacccatcaatttagtcatagccttctattgcaaatcagttccaagaacttgatcattcaagtgacatagacttttgtgatcagtgcgaatagtaaaagggcagcgctacaaataacatctccatttgtcaacagccatcattatagccaaaaactctttttcatagatagaaaatttctgattagctggtcccaaagctttgctatagtaagcaatagggtgattcaactggctgagcacagcactaactccataagcacaggcatctgtctccaaaacaaagggaagactgaaattaggtaatgctagcaccggggtagaactcatggctagtttgagctgttgaaaagcttgttgagcagcatctgaccagaggaatgctttcttttttaataacactgtcaaaggtttggctataatgctgtaattcggaacaaatttgcgatagtaacctgtgaggcccagaaaacctctcaactcagttgcagtttgtggaacaggccaagctaacatcgctgcagttttggcaggatcagtactgacacctttagcagaaattatgtggcccaaatactctaattgagcacaagcaaaagagcacttagacattttggcatataactgattctgtcgcaacaacataaacacttgtctcagatgatgtaggtgagaatccaagttagggttgtacactaaaatgtcatccatgaaaaccaatacacatttgcaaataagagatgcaaatactgaattcatcaggcattgaaatgtagatggagcatttattaaaccaaagggcataacgctgaattgaaactgcccatgatgagttttgaaagcggttttaaactcatcctgttccaccatacggatttgatgataaccggctctcaagtccagtttagagaagtattgtgtgcccgctaactcatccaataactcatcaaccactggcattggaaacttactcttaacagtgacagagttgagtttgcgataatccacacaaaaacgccatgtcccatctttctttttgaccaacaagactggggaggcaaaagggctcatgctgggagtaataagaccagaatcaatcatgtccttgacttggcgttcaatctcatccttttgtaaaggagaatacctgtaaggtttactgttgacaggagcagcatcagggtacaaggagatagcataatcaaaagtgcgatgaggaggtaaacacttgggctcttgaaaaacatcagcaaactcagacagtaatggagctactacttctgaaatggactgagaatctgcattgtcagtaggttcaagcaaaacagcatcccaaatatcacaacccttctgccatttcaatatttgagggtaagaaatagcacataattcagtctgggaatcagactcttgaacaccttgcagtgcaatccactgatcttggtagaaaaacttcagagttttagttgcccagttacaagacatatcaccccattgagccaaccaatccatccccaatattgcatcatggccccccaactgaaccactttcagatcataagagaatgtctgaccttggatccaccatgtgaaattaggaaccacatattgacaagagagaaagtcaccattagctacctgaaccaaggaaggggaaatagggcacaactacaaacccaacagctgagcaaaattgagatcaatgaaactatgagagctgccggaatccaccaacatcaacaatactttattctgaaccaatgctctcaaacgaatagcattatggcgagatgcaccagataatgcattcaaagaaatatgatactgctcctcagcatcagaatcttcttcggcaaccactgcattcaaaagatcatctggaataacttcagtgatttgcatagcttttaattaaccagtgatcacacactgatgatcaggtgaatatttatccccacatttaaaacagattccattcgctcttctatattccttcaactgtttagctttccataattcagctctttcaggtttaatggccgatggctcagagataggaacagatgtatccactttagtgccaacccctttgtatgtcaatttcttaagaggtttctgtccactgtctagtaacacactttcttgcactaaagcaattgcagcagcctgctgaacagtgtcaggtaactggaccagcagaactgagcggatttcttcctttagacccagaataaaacgatacagcagcatcatccctcccacagatggatcaaacacacgcacctggtacactagtgaatcaaactgggacttataatcggcaactgaaccagtttgccgtaaggtttgcagcgcctgaactttttcacactgtgcagtactttcaaactcgagagcaaccgcataacaaaattgagaccagtcacaaatctcttctactaacttaaaggattggtaccactatgctgcatttccagacatatgcaagactgctgcagaaaccttaaacatagccggaatctggtacatgtcaaaataggtctcgcacatatctagccaaatacagacatcagagccatcaaaacgaggaaaatccatcttaggcaagcaactcttagcacgaacaccctaatcaaaaccctggctagactccgcttcgttgcgagtaaacacaggatgagtatggaaccttggcggcggcggcggcggcggcggtggtggtggtggtggggaaacacccgcactgccaagagaaaccgcagatggggagcccaaaatactcacttgattggaagacgccaaactcttttgcaactgcgccgcctgaagctgatcttgctgcagcttcccgaccgcctccagagcgagatccaccttgacgacggcgtgatcgagccgccctccgtgtttcgtcatcttgtcgtccatagcctccatcttctgagtgagtaactccaacttctccaacaatttcccctccatcgactcgagcgattggcgtaatggagcgctgagcttgatgggcgtcgtggtgagcgttcgctccaaatccaaccaaacctgaactggacttacagcagccgcacccgagggtagccgtctaccggagcacagggattttaccagtcggatcgagagaatttgaacgcatcaaccacagaaaacccgaatctgataccactgtaacactactagatcatagcaaaggaagaactagagcaggagaggtgaagaacagaggaggaggagacagagtcgaggaagaaaggggcagagcagagttgttgagaggagagattcgtttttcctttcttcatttcacacctctcttcattacagggttccttacttataaagatcatacatgccagcctggccgcttggccgaatcacacaacacacatgcgcacacacccacccgacacgttactgtaaacgtcatcctggcattgtagctcgtcacgcgtgtggcacaggcgtgacatcccgccaccgccgctgccgctgccgccaccccctcctcttcctcatccctatccccaacacaaccacctcctatcagggctggattcggcaattgtggggataatctggattcgagaggcatggctcgacccgacagcgacgcactggtggatcgctgccacctcatcttgcgcatttttccacctgagcgcctttggttccccaggacctcctttgtagcgcctcttctcatcgtcctccaatgacgatggccaagggaaatacaaaaggtccgaggaactgcaccattatgtaagtatctaaaaacctctagcttctcacggtgtttatgttggtgaagcctgtacgatgtgtcctaccacgggcttcacctagcgttaagaagttgaatccatgcatgccctaactgctaaattggaaataacagtacatatcaattaagttttgtaataataatgtaagtagtaaatttagactaaagggtgatcaataagttctataatggagttcttaattaagcctctcatgtaatttcagtttttgagtgtgcaaatttcaattaagagcactataaaaaagaatgcatcctatcaaatgtatgtattgatagttcaggttcattataattataaatatttacacacacaattgtttcaatagctatcaaagatatgtgtgataactaatggatttcaaactagcagaaaaatgatttacaaatggattgaaatagtattttgctccggatgcccgaggtccgactcgctgaatcaagccgacggcagtggctcaccgggagataactaatactaataatcccccccccccaaaaaaaaaaagaagtaatactaactattcatgtatttagaaaaaaaagaaaaggttgcccctaacattatataaatgaatggtgtatttctagatgtgtgtatctatatatgtgtgtctaacgagcaaaagttgtagcaagcagaggagtggaaacctagaaaagatagttctacaaggtgatttgcttaactgtaaataaagtactattaacgatcagatgtatttgactctaagctagcctctggtttgctgtgaagggtgtattcactgattcaataatgatttctgtgaatttatgaagcaaataataaagcaatcaaatatggtattattaagtatctcttgatgttacaagttttaaagcagcaattaaaatgactgcaatattgatttgcattattcgttttcacctgaagtgacattaatgaattaaatggcctttccaaacttgtggtttcactttttgttcgatttactgccgtgcatctaaggcctctatatgaatcatgaacattagtacattttgaatggtaaaaactggataggagttgttgaggaataatgttgtttcatagaacaataaatttatttttgctgactgtgtcataaatcaagtcctttttagttttgctgattgaagttttctatttaacataattgaaattttctactctttcaccacttccgtggtaattattgaacaggaaacagaaagcagcaggaagaacatctcagatggaaagcttcaatgtgttcttaattatgctttcgtttggtcaagagctttattccctgagcctcttaatacattacaaccagttctcaactggaaattaaactgttacaaacggataaagatggtctgttcatgctccagttaaattcatatcaaatcattgttagcatacagtgacgtttcaagtggatttacaatttagtgaggtggcgtgaatgcatggccttaaaatgtcttgatttgtgggaaatactttcatgaggcaaagttactgatcttgcaatctatagaagctttaaagtttgcatccaacctgttttgactggatggaagaaaaactaaaagtgtaatggcccctctatatttgaattggtttcagatttaataaatgccaatatatttgtagaagaatgtgtttgtttttattgtgagaatttctgctaatgaaaaacatttaaagttggctctgtatgcaaataatgatcatatatatttcagttgttttcacttttatctatatggtaggtcagagctggagtacagtataattttgactaaactataccgagtgttaaataatcaatatgatgttatcagctatataaaaatatcaaaataaaattgaatgtacatactgagatatataaaaaggtaaccatagatgtctgctcatggtcacgcaaggcgtgacttaaatggctagtctaaacttgattcatggacccggcacttaatattatgaattttttctctctttgtttaaattctcgttcttcagcttcgaaacaggtaaaataaccagtctctcaactcccagaacggtaaaactcgtccacttcaaaaaaaaaaaaaagggggaacggtaaaactcttaaagccttgaatggtaggacatcgtacgggaaactacaatgaaacaaacaagctaggaagagaaaaatatacttcccgatcaaaagcatactatcacgaattcgaaaacttttggagaaattcaaatttgaaatgaacaaaccataaaaaaaatcctacaaatacgattatattgatagtaaaaattttcaaaaagaaatattgaatttacccatcgtttttgaatggaacagatgggaacaatatgtgaaaatgagaaaaaaatgcctaatgggctgacgactcaataagcccaaaacacacgcgagtccaaagcatcacagcacgagccgtcgcggcgtctccggccgccgccgcagccgccgccgccgtagcacatctcccgctcgctggagtatggctgcttcgccgcctccgcggagccctagctccggcgatccggctgaggccgccgacctggccgcctccgccgccgccgctctagcatctcccgctcgcgtatggagctccctcctcgcccgccttccctcgctctcggactactcccgcctcctctccgtaggccgcggccgcggccgccgacggcgtcgcgccgctctcccgctccccattcggcctgccgccgcccactccgcccggtgaggaatcccctcggctcctatgcttcttatgcttcgcaggcttttcatggagtagtgtagtaactagtaccattaccatgtacttgtgattcgtggattggtggacatgacaggtaaaacaaattggggcgaattctcggttagcaggtggtgtatgtggaactcgtactaatgtgtttcgatgttgatcactgcttgcagtatgtgctaatgtgcatcagtttttcttctactatattcgatgcatcttgttatgtggctggttcatgtaatgcattactgatttttcacatgccattgattattggtgtgcacagagttacttggatatgtttctgactatatgttattcgcaggattgccggtcagatgcccaaagcttttgacatcctacaagatgttgcgcaacacactctgtctaatttgcatgatatccagaagagcttaatattttggcagtccaaagcagaggtataaagttgattcataaaaattgaagtgcttctacacttttaatatgtagagaagtccactacttactcatcttccgttgtcctatgctattttctccagggaacaagttcacagaaactgtattttatgatctttgaaagaggtccaagggcctttgtcgaagcagcatggcaaacactgactagactcaagagcaatgggagtccagtcccgcaccttttgcactctgcttctgatatggtctcaacaaaacttgctgtcctgacaagtatgcaacactgcttggctgcttttcttgctgaggtttgtttaatcaaatgcgattatcaatatcaaatgctgatgtcaagtagaataaattgttctttacaatagtttcaatatcaactttgaagcagctcccctatcaactggtgtactatggtgtccaaattattcaagctcttctttttaatactttggataaatttacttatagaacatggctactgtttctcatacatgaattcgaattctaccttgcctcttctataggtttactttgaagttgataagtgcagaaaaggactaacagaaagttcagataaatcgctacatactctattcattgttctgaattctgtcttctccaaattggaggtatcatttagaaatgctgttgaggtatgcaatgttctttttgcatgttttggatgttacaagtatgacatgctagctatttcacatagtttcatttcttcagggacaaactctattatgcacacatgatgggaagtcgcctgaacttatctttgaaagattgccagaagttgatgttgagagttcagagtggacagaggtgttatcagcaaatgctataacattgatctaccaaaacctccagaagttcgatgattttatttctgatcaggtaatcaactctcctttttacaacaagacacatgccatattgttacttctcagccttgcgggttccacattaatgctaaccgagttggtgaaggcgtattgagggagcatttctatagatcaccctctatggctgtacctgtttgtgcttcctgtagaaaatatttgtgtttacacaacttagcaactaatttctgtccatgcaatgtgaatgctttcagtctagaaactagtggtagaagtatagatataatgcaagacacaacggtagttgattctaactgacaactcttttatcataataaccgtgtggataagaaggttaatctgttgaaacaccaaatattctcaaagtactagtttagcattgtccagtgaatcttttctttttcttttttgcaaaagttagttcccttttcactgaaattacacatgtttaacttcataccactgaaatattgctgttaacttttattttcaccgcgatgttactccattaactgctattatcaccttaaatccttccttttcctcttctcaatttcctttctaccctcgttttctcctgacctgatcttcaccctcctctgttgacgtggtgccaccacctaacgccatctctgcctggtctcggcatgaatctgtgtgtggtgttttagttgtatatgcccatccaccaccatctccaggactccgcatcaattttgcttcgacactggcaatgtggacataccacagaggcatgcgttccttcagctttagcaaggagataccagcaagacattcacctgctcctgctgcaacaaggatatggatgtgggtaatgagagcttgctgattgttaccccttgttgccgtgttgctgtctcttgccagcgagtgaatgagggttcagttcctttatgcttcttccttcttgagcttgacctgggccgtgtcctttatcatgcgtgccatgcctctcgctgactggcatgtgcactgcttgctgccttcttctctactctcacacagggtaaatacgaaagtacacgtgtcttttgcctaaaaaaaagtaaaaacaaattataattgttatatagaagtgaacaatgcaaagttttagtggtatagaagttaacggtgagatttctatagcataactctgagctggtgcggttttggtgatatgaaaccaattcttttggttaaatattttcaacttattctgttattaccgtaataaacaattgagttaatctgtaattcttacttggaataagtgaggattgttcacttttgaaaatataaatttgctactgttcgcagaagttagaagtatgtatatgtgttacagttccattatgtgaagcaatatgttgcataattatctcaagcatattttttttctattgtagttttcgaaccacaaaagaccaagaaatacgaccatatattggttgccctacacatgtggagcattgggcctctctgcatgttctttatggcttttgcgccacagtagcttgatgggaagttctgacattgacaactggattcaagatgcaaaagaatcgatggttggtttttgggatgtgcatgttgggcaaccagtaagatactttctggatatgtccttttattgtgtaccatatgcatgatgctagcattagttaactaaagtcgaattgagttactttagggctcattttgataggtgtagtttatgtccaatcccttcaagttggcaaggaatttgaactaaaatctccaccaagggatgaggtctaatccccctatatgcagtatgtgagggtagagatatcagataatcacattaaccagtatagataattatattggaagacatacaagatgttctatgaaatactgtatcccaatatttatctgttaaaaatgaaaagcagattactgcttaattagcaagtgtggtatgctgttttgtgtactattagctgtgcttttgtgtcaatgttaaaaaatcgacttgcctttaccggatgacttcacttattagttattaccatcaacaatcttaaggcaattagtatatccaggttaagaaacttgttaatatgcaccttcatcagcatgcacatttcatcagtgcactaaattctgctcattcaactcctatgtgtgtccataacattttttacagaactcctgcaattatgcttgatttggctgataacttataattgaccttactatgtcaacaaaaagaatgcatccctctgtgactgtgtccagctaaactcgatgttctttgtacttttcaaatttagaaatcatctatattactaagctctatcatgacctcattcttctctttgagaatcattagatcatttccatcagggatgaactttttgagacattcaaacaaagatctaaacatgaaatggaaaaacaagaggtccaacaaactgaagaatcattgcgcaggttattccaatgatgcccatgctcttttgtaaagcttacacatgcatgcttccttactcaaaacttagtaaagtattgttctgaattaggcttttctccttcaaacctacacgtgcctttctccttaccaaaactttttatagaagtgttctaagttaatatccatttgatatggcctaagtttcacctccttacccaaacaagatgacatgtatctgcagtttcaagattttacaatgactatatatggttcagtaatgtaccagacatccatgccatttgaattatatgcgcccttttactttcttggaagtgttcctgtatgaaattgtgggttaaaattaggttttgcttcttgtgccttttttatatatctcaggtaatatcgatctgttgactgttgagattgactaattttcgttagtaatcaacaaaaagggcttcatctcataacctacatcctgtttcttgcttgcttccttctttttttttctttttttctttttttgccttttctagtcccttgacaatattcatcaccctggagctatgtactttattcccacattttcttggaactatgtaaaatttcaggtttgcattgcatttattttctgaaacacattgagtattataaaatggtcttgcattatctcaccgtacatgttacatgttgcctttgtaggatgttgcttgacttttgtgggaacacttcaaatgaaaaaccgccacaagatatgtcagagctagcaatgatggagattgtcatgaagaggtaagagtgtttgaatatttatggtgtcttggctttgacagtcatagcttatttcaaggggaaaatttgcacgctcaaaagtcacctggaattattttgcttttgtatcggaatctattgacaagaaaaaatttgtgtttgtcaagtaccattttttaatttttgtttgtttcgaaactaaattaattcagttggtactggggacagaccttgtcttttttttttttggtggaatgaccaaaggaggtcattcaatgtaattaagataggaagaaaaagttacagaccttgtaatgaaaaactaaatattagtgattctcataaggctgtacataagtgcatcccttgatacctccgaggggtataagtttcgtttgaaaaaagtagaaacgaaccccacccaacactaacacgtaacaccccttactctatacttttctaacaaactacatatcttattccaaactaaactgataccttcctaactaatagatatgatagcaaataagtactctctattattgcaaactaccgaatttatttgggcaataggcgttattattgtgtaaggtttaccctttcctagtcatactgctgcagtattgcttgctgaaaaactgacgcgcgttccagctgtggtcacaaaaagcttttgaacttccattttattttctctgcctggtttcacagtgtaggctggtagcaactggttacccatagttactggccagtaggtttttctctgctggttactagttaccactcggtggtacttgccagtaactaaagcctgtgagaccaaaaaaggcatagcacatctttggctttccaactgtaattttctcaaggatttctctcttttgtttcagtaaaggtttataacctgttggtgaaataatggtactatttagagttaaaacttcaagatgggtttgactcagttccaaagtgggctgaatcaatattttcttagtcaaaaataaattttaaaatgatttgatcttgatgtgcataacagttaagttcgtgttgtagaattctaatctatgtctcatcttgcattaaaaatgatgaatttttgttaacaatcctaagtttagtatctttgagtttctgccatgatcgatgaattaataactttctaaattctaatattagacacaagcttcaggaagttaagaatcatttgtatagttgcttctatgactccttggagtgacttgttgcatggcttatgtcaatagaatctgaacttctgcaggagactttttgtgtattacatgctttgtatgcacttatgttgcttacataacttaatgggcacttcacattttatccttatttatctgatacctaaatttctatgcttttgacgatcactcaatggactaaattgatggagcttcttttgttaaaaaatgaaaactaaactagctgtttacattttactgactcaagcaatgaacaatgacacttctctaatatgttgatacagatatgagaaggaagcaatgcatccatttaaaggtctttccagtggaaaattaacatgtgcattgtctattcaggttcttccccttctatctctatttaggatgcactcagttcaagttaacctgcattttttctaacattctgatcctaaaaattcagattgagaagcataaactggctcttctggagtaagttatactaatgtattctgacaatactgcttaaaatgcatgatgataaattttttatgtctaatattaaactgcaagagatgattgaattgtttttacacagggcaatgctggagctggaccagatccttagggcaaatgagataaactttgctattcttgcagcactacctgcatttggtgtttcacttctgctgctctttgcagttcgagcatgggctacacatgtatgtataaccatatagacccattgctgtcttattcaggggcatctagcacaaatagggaagattttcactactttctttttgaaaaaaaatacaaattgatccctagcaaaacatttttgcagaaatggaactttctgcactacaccgtgatattaagcactatatattcgtagcatgggatctcaggattcggggctgtgtaaactaccacataggatggtccctagatatgctagagttctacaaaacatcccatgtggtagtatacaccgtgtcatgtacgtaaacaactaatgtcatggctctgatctatttttagcaaagtttcatgaaaggtctatttgtaataatattttctaaaaggggacaaattgtgaaaacactatccgcaactagcaggagatataatcttgatatattatatcccagtggtttgcagttttcaccatggacaagtgtgcatgaaaaagataataggaatactaggttcagatatggttaattattgtcctcactatgaaatagggccgtggtgctgagggaagaggtaggactgcacggcgtcagcgaaggctgcttcttgctgatgtagagaaaaggcttatggagtttcagaattgcatggctaatggaatggtaaccttatcattatcttaaattagactacatgaccttatcttgatcttaaattagactacattgacatttatttggatgagggacaaaatacttgatctggtttcctgttggtggctattcccttctctaagaaatactaccttcgttttttaataaataacaccgttgactttcagaattacgtttgatcatttgtcttattaattaaaaaaactagtgtaaatatactaaagtacaagtcatatttaaagtttctttaatgataaaacatgtcacagcaaaacaaatgacatttgtataaatttttttaataggatgaatggttaaatgtcatgtcataagtcaacaacttgaaaaaacagagggagtatataacgctttcctattgtattttgtctgcaaaaaccttattccttcacctagtatgagaaaacaagaaactgccattttcaagattggacatccccaccttcgtcttgaaaatccaagattgaagtgctttcgtattgatgagaaagtcattttctttcgactttcgaattacaaacttgaaaaatattaggattacaatacgtactaataaatgtctggctgaatttcctaattttacaggaggaagaggcatgctgtaagttcgggttaacactgtacacccttgatagactatacaaagctgttgaatcgcaggcgagagaaacaggagagtggtcaaggtgagtctcaaactcatagctctttttgatacttcccttggctacctaggtttgattgcctgtgaaccaaaaaaatcgttttccgattgcagcttgagagaagacatgtttgatctggcaaagcctggtgtgggcatggaagacaagctggttctgctgtcccggctcaaagggatgtacgactgcttacttccatcaccgtcaggtgtcttgccccgtctgtagtcttctcatcttcctttcctttccttttcttcttttctttttggtcacgtgtgacgattagtgaaccccaatcttagacgacatgaatttgcttggcgttttaagagtcgtcaaattttgaattttttatgccccgggtactttgattgtagccctttcggctccatggagtgatgatggcttttgtgctgctgcaatgtttgcaccagagattactgactgtaaatccaaaatctcttctaactggatgcttaattcatgtgccacacccattttacatttgtttctcatcattgaagcacatcgaaatttagggtggggatcctctaccataatatcactatcattataagtcacttggtatgtgggtctcattctcctattgtcctacacataagtgtctataattggagtgccactatggtagaggatgtaaaccctgaaatttggccctggaaagcgtgaatgtgtccagatactccatgttactagtatttcgtagtatatgttagctgtgatctaaggttgtgttttttcctccaacttcaatgaacgatatgttttttcacaaattttctataggaaagttgtttaaaaaaatcacattaatctatttttcaaaaaaagttaatacttaattaatcatgtgctaataaatcgtttcgttttatgtgcgcgtgagatgggttctcaactcattgggaagaacatagcctaaatccacactgcaacttccatttttagttagtacgcttttcaaactatattaaaatagtatattttttcttaaaaaatgtttctaaaaagctcattttaaagtgagtaataattaatactccatccccaaaatatatgacactgttattttttattttttcataaaaaatatagtataaatatgtaaaagtataagttaagaaattgtagattacagtttcttttgatgataaaacaggtaaaaaaattattcagatggtttttgaaaaaaaagagactaacatccattttcattttccatgacggagataagaaaatactactaataacctttcatcaaaagattagtttatgaaaaaaaaatgctatctgtaaattagcccttaaagaaagaagcacctcgacattccttctatttactttatacttaaacaaagggaaagcattgcatacttacatttgcatgcgagtatatacatagatagcacggcaaaatcctagttaatccagatcaccctttcttaaatttgagaggagttattaattaatccacatcatctatgagcacacgcggaagaggaggaatcggatccgtgccgcgttgctccgggccctcgccgtcatcgtgggcccggcccatgaccagcacgctcagcaccacgcgccttcccctcatcaccaccctctccccatgcaccatcgccaccaccaccttcttcttctccggctccgccgccgtcgccggcggcatctcgtgccggcacagcgggcagctgccgtggatccccagccaccgctccacgcactcgccgtggaaccggtgcccgcacggcatctccttcctcctcccgctcccgcacgtctccctggactcctccccgtcgtcgaggcagatcgcgcagtcggacgcctcctcgccgtcgtcatcctcctcctcgacctccctcagcgccgcgatcgatgccctggacgccggggccacgccgccgccaccgtcggcgctggcgctgccgtcctcgtagaagacgtggtgcaccaggtacgcccgcccccgcagctccggcgccgacgagacggacgccccgacgagcaccggcggcacgcccgccaccgtccgcccgctgtccctgtccgtcaccggcgtcacgatcgacaccatcgacgagggagcattggtgagcgacattacccgatctcttcaatttcctcttaataattcttcgcgatgcttttgctaccatctgcctcgctctcgctatcgttctcgctcgatttgatatagaggaggaaaagacgccttctcgatgatcggtggattgggttgatgatgcgcatggcgccaaagggttcgaggtaggtgagccttttttttcttttttgtctcacaattttgcagctccgacaaagcggtggcgatcgattgggatttgggctccacatgtgcacttcgtcttcttgcagcaacacaaggtccatcacttcaattttggatgcatgctgattttgcttggattcaggctgaatttggtttgtttggacaccagaaatgtccttttttgactaggaaggttgttgctgttcttgacatcccagtgcaaaaggggtttgatgattcacaattttggaatgttcttggaagatctctttgatgattgacaattttggggtgttcttggaagatttctcatggtggagccatgtgcgcagaaactcagcaaaaaggcagacctgtgaatttgttgatatatactggattgttattgacatttttgaccttttgtaactatgcaaaatactacaggtcaacataaactgtgacgtactctacaatttaaaaatgctttctggagaaatttaaacacagaaaagaatcacatatcagattgatgaaacggcagcagatttgacttgatttgtcagaagcagcaatgatcaggtagagtgccaacgcaattcagccccagaagaaagaaggctaatccttggagatagagatttatgtagaagctgttctttccatggaagacaaggttgtaggatgcacaaaagatgaggaacaccgataatccgatctcaggtagattcactctgcagcaaatgacaatgtcaggttaagcatgcatgcagaactccagcacctaccactaccagcttatctaaagattgcagtagcaaattggagaaataaattttacctgtttattaaccttttcctggatttttgaagcaatggagtctcattattctcgtcgaaggcattgttccccactttcttcgtcacaatccattggttgaattcttgcagttgcagcagaccagctacagcagctctcaaccgatgcatggacatgacgctctcgaataaaatccacagtggcactgtgtgcagatttctggagtgaaaagacagttatggcaaatcaaattcatccaaaagggtaaagcgatgaacaaactgtttgagaattgtaacaaagattgtaagagagaactgactctggatttcttatggcagtgacaatcaggagtgctgtaggaatgtaggcaacgccccagattggcaggaagagctctgggatcatgaccgacacagggatgataacattgtagagaataaaggcaacagcaggggcaacaactctcctcaccaggaagaagctatacagtatgtagatcttcttcaaggatgacactttctgacggagcaacagtggcaggttatgttttatgcagatttacttgttctggttcatcaaaaaaggagaagaaatggtaccttggcaaccaagacatcccatatcatctttcggaacaagtttgcaccgccacaagaccaccggaactgttgtcggcagtatgctttataagtggatggaagctcactctttacctgtgacgtatttgctttatcagatgctatcgtcgagtgattgaacagaacaaattaaggattcggtcttcttactctgaggtcccctaaatagatgaatttccatccctttaaggttgctcggacagccaagtccatgtcttcaactgtagttcgatccttccaacctcctgcgtcattgatagcttctgtgcgccatacaccagcggtccctaacaaggtaccagtgtttaggagactatcaccatgttccttttgtgatctacataaaacatgaacagtcgaggtgtgcaccattgaaactgaagaaagcaaatgtagccgatcctgcctcctgctcagctttgaagtggtaatcaaggaatgtcttctgtatccttgtcagtaggcttactctgtcattcactgtaaaattcggtcaactaaaaattggacagatcagaataaataaaattgctatatcagagttcaatgatgtgatattatctacagaaccatttgtttcgatctttgtcttttgtaacaccacaagaatcaagagctaacagaaggccacttcaaatgcaaaattttggtcaccttaccaatatatactgaatacttcccgctagcaagaactgcaaaaggtagtctcaatgacatatcaaaagatgaggtcttaccaaaaacccaccgagcttgtacaagcgcaacattctgattgtgcatgaggaacgggacagttctgagaaggaaatccggttctggctggaaatcagcatcaaatatggcaacatattcgcattgcttggcatagtcccactccattcccttcttcaaggctcctgctttgaaccctttgcggccacttctggtggcatacttaatgtttagacctttgcttgcccaatcctcacattccagctcaaccaaattctgcaaattaagtaaattcttgttcattttcattacattttcacaaggtagatgattaatttattgcccttctgtgttaacaaagtgctagggactgcaaatatatgcacactaaaatgacatgtacagatgtactaaggacgactagaggttgagttgggtaatttataacttttcagcttggataagaaaatatttacacatgccagtcaaaggtgacatcattcagttcaccagatgccaaatgctgagatatcccgaccgcaactgccttttatccaactacaactgcctttttacacaaaaagtaagccacaaaggtaattgatgtaaatagtagtttgtcaaataggatgtctcatgcaagtaaattactatttaagattaagtacttattgtctagacaaggatacttgaatcagctaatacttctttacatgaaactaaccatttatgacagtgatcatgttttttacagctacagggtatgtcgtcatccttttctttaaaaggtaatgatcaatgacgtgcatttcatttttcttagagaagggtttttttttttacctggcctctacatccaaccagatatatgcaaccttacaaattgagaacttagcccctcgaataacccaatctgaaattcgctcttatggagatttaaactcaggactttaggatgctacttaggtcactgtaaccactagactacatgctcttttactgtaatcacgtgcatttcatatggtccaggcacatgacttagctttcagtcctaggacctaagacagttaactacttaaggttaggttcctatgacgaaacttagttgcttttgctcctttttatactgatagtgatatatgaaagtgaaaagcaatgtcatccttatgtacaactaatccaactcattactcttcagtcttcacacaggaacaatgctaactcgttaagctaacatacagaaaaagtgataatctacactaattacagattttcagaggtctaagctcctgacgaaaaaaaaacccggagtttggacatctcaatcatatcattcagccagaaacttgcctaacaataagaaaaaggagagataccttgataaatgcgtccgtggaatcatccaaaacttggattatcaacctctcctttggccacttgagcccacaaactgctccgattgacaacttgtacacctacacccaagaatccaaaacatttgaattcggccgtatttgtgtctaatttgaatcttgttgaattgattggttattacctcgagctcattatacatgggtatctggaccatgaccatgggataagcagcagcagcagcctcccccttctcctcgtcgccggcgccggcgccgccgccgaggggctcccacttgaaccaccgctccggcctccagccgacgagcctggcggcgacgctgacggcggagttgtaggtggcctccaccaccagcatcaccgacatcaccatgcacgcccacaccccgacctgcagcgccggcgccaccgcgcgcgaccgcgcccccacccacgcctcgcgccaccacgcgccgccgccgctccccggcgacgtcgacgatccctcgccgacgactgggaacgtaccacgacaagagctcagctcactgaaagcaagaagctaattaacttggatgggaaaataaaaatggaaagaaaatcttggaacctgtgacgaggtaggtgaagtcgagggcgccggtggagacggcggcgaggagggagacggcggcggcgaggaggaagaggacggcgccggctgcctcgccggcctccattgtttctccgggcggtggcggctgccgtggcctctggagagagagaggagaggagagtgatgtacaacgcaggctgagctgagctgagctgagcagttggatttttatcgctcagctctcggggggcacgtggacgggacagcgacacggcggggccattatattgggtctcaatgccaatattttgcgcttaatagtttagggatatttaccattttcgttaattgcttattaaatcaaaaaccgtcctaaaaaaacgagagaggatgataatagtgatatggtgatggactggtggattcatttgatttgttgcattctgggtaaggacaaggaaagattcatattcagcttaatttgtcaaaatgttgagaattaaagcactatagtttaaattatatctatgagtatattatacacttatgagtgtcctttcaaggattcaaatcgatttccataagattaaacacacaaaattgcgttcccaatagtttagtgcacaatatgttggagatggatttttatccctcgaggaaatatcctcttgttttgtgtctgttatttaaaaaatcatcaaaaatttgaaaataaattatgaagataaatcaatatatgaaatacctttccacaaacatacatgttaaaatttgaaatataagattcgaaacaaaaataataaatttgactgcggttacgcgttctattcatagtcaaatttgttattttgttttttcttgtataagttgaatttgaacgtgcatgtttgtgaagtgacatatcacatattgatctatcttactatttttttctattttttatgacttttaagttacataaaaaaaataaggggatattcccttaagaaatgaatagagtttccccaattgttactagttgtgagtagagcagggtcgcggctctaggctaaggccggttgtgggatcgcctaaggcacaaaccaaagggaacctcagccctcaaatcaaatcgatatcgtgccaaaaaaggcgtgcggacagccatgtttagaagggcaatttaatttgatgatctagggtgtcaagcgtgttgagtattttagatctttcagttgaggcattgagccattgaatatctcgggcatcatgtccgtcggtttgtcctcgatctggcggttgtgacacatgtgtagtttatgttacagttaaaaagaaaagccttacgagcctatagtgtcgaactatcaaatttacctaggccctcgaaattgtagagccgatccgatagtaaatgtgatggttaatataactgtgtgagtgtgggttggttatgtataatattttatccatgctttttttttagggaatccatgctcttttttttttggcattgcacaggtgcaaatatcataataaaaaggaaaataaatcagttcgggtggtatggtgatttggagagagagagcaatgtgctggaaagatggtgagtcaccagtcaaatgtcatatgtggctgtgtcatatgagattgaagcttgcccattgcatgatgagctaagaattaaaatttcctgcgagaaacatcctgagagagaacacctgtcacccggaaagattagtttagatcgcccccatttgcatagtactagtatatagtactatgagccaaaattagtaggtcacgatggaaaacgttacaatatttcagagaaacaacctaactaaagttttacttgtttctcttgccttcttctcagatcgatcaatctattatatctatttaccagagtgttgcacaccggctgaccgatttgctgtgtaattatctatggtactatgcgccacgtggataaattaaatgctgtcgaatttaagctgcaaatcctaacaagttagtggtggcagttgagctctcatccatgcctagaaaatccaggtgtacaactttagcggacagagatttgatagcaggggacgaaagaagaagaagaagaagaacaagttgcaatttgcatcatgcatgtaatcatcatacgtgtgcctgaattttgaacgagatgatgatcgagcttgaagaaccagcctaaaattaaatgaaacctatgcaggattaaccaaataatccaagtggcgagagctagctagcttagggcggaggtggagtggagtatgggagggccgatcgaggggctgcccacgaatccggtcaaacaaaattttgtagccatatcttacttattttcaccatatatacaccctctcaatacaaacttatacatccacatctgcttaaatttgatctaaagtaaattaagcaagtgttactctctatttcgttctagctccgcccttaaatttacagcgcgccaaatctaatggtccaacaataattaactaattaagctggctgatctcggccgtatcatatgtgtgttttgctgggtaaatcatcgatgcatgcgcgcgactgcatatatatgcagggatttggagaaaacaaaaaggaaatgtccagctcgatataaagtgtgcaatttaattgtcctgctctattctatcataaatatttgacaatcagaataaattttgataaatagtttctcaaatgcttagtgtaaaacacaaacaaaatagtatacctacatttgcattgaaaaataatattatatatcatgaacttattggattttataaacttatactgatatataaaattaatggtcaaaaatttgaaaaaaatggatcagacattgcttaaatatttataactgggtaaagtatctgttttcctataaagcgatgacatgtatgatatgtaccgtttcttccttggactcctcgatctattctactacttcacttacatataaatcatcttatcaatcaagttgaatgaaaatatgtcaagttcattttttttggctaaggttaaaatggctgaaatgcatctttataggtggaagtagcaactccttgcgctaggtgtatgtaaaaattgaggttttcctaggcgatcaacacaactgcaagtgaaaaataagatttttgcatgtggcacatcacgatgcttgcctgtaaaaagaatttttagccaaaaagaaaatttttgaaaccctagcttggtagcggtcgtcgttcccatgcccagggtcgttgtcaccgctgcccctaaggtcaccacaatctttagtcaccactcaccgctcctgaggcaggcagcattcgatccgcactcctaaggctaccgtagtcgttagtcgatcctcccatgcatggcggatccaccactcccaaggccagcggcggtaggtccgcactcccgaggccattgcggtcgtcgttgccactcccatgcctggtggcagtaaatctgctattgaggtcggcggcggtagatccgttctcttgaggccgttgcagtcatcattgctgctcccatgccgcccggtggcgacaaatccattctcctaaggcttctacagtcgtcgttgctgctcccatatgcccggtggcggcgacaaatccattctcctgaggctgctacagtcgtcattgctgctcccatatgcccggcgatggcggatccatgcgctaagtatggggagaagcgatggaagggagaggtcaccggtggatccgcttctcctgttgctaccgacggatccacatacctcgagtctaccgtcattgtcgtggtcccacttagccgatgtttcgcccctccccaccgtcgtcgtggtcaccctagcaaccatcacggcatcgccccttcccgcacgaggcaaatctgacgcctccaccaccactcatcccaccccttcgccgctatcggatccggttaccaaccgtcgaggagaggagataaagggaggagaggccgaaaggaggataggtgaagtaatagggaggatggaaaaggaattaacgcatgggaggagagaaaaggagagggagcgggactacgaaaataaaccatgtaggtaggttttttattgggccccctcctattttttctacattttacatactagtaagcatgcacgtgaaatccacgtgactaaatatttaataaattatcataactcaaagattgacaacaattgcatgtacaggttcagaagcaacaaatatcccctttactgatcaatacatatcctcaaatttgacaagcaaaatatgattgttaaagatcatattatgaaattcacatagcacatgccaaaatcaggagataatatagcaaatcttgagactttggatgctcaaacacagccaatgtaagatgcttgtttggttcaaaaaattaaactacaaacactaatgtgcagaatgacaggactaggccatcttgtaaacaactcttctaactcgaacacctcaacataattcaggaagaacacaagaaatagggcaaccaatttagattacaatgctccaatccaacaggattgagccgccgccgccatcgccaccaagttgcccgttctgagttttaattcagttcattacattgcttatgtctgaatctcacccactcactcgttctttcccctcacacacgccaattcacacagctttcaacagcacacttacatggcccaatcaggcccataattacgaggattcgccttggcctgtctagccggacgccgagtctgaattgggtccttcaggctggacggcctcccctgtagcccatccgatacgcctccttgttcagcagtatcatccccttctggtacatcatcagtgctcctggcacatctgcagtttggtaataagctcataaacatcccactacttgaactcacattatgttcatatcaatttgaaacatctttggggatacaataactgacgggtctgcactttaaagttctgaaagaaaacttgatccaagacagaagacatggagatatgtcagtgttaacctgttggtaagatctgtgtagggaagagacctgaaagatggaaaaagacctgaaaggaagtgaattgaagtggcctgtatacaattcgctggtgttttttgcagggataatgcttaccaggctgtgcaaaggcagacgatggtgcaggtccaatggaaggcatgagcgtgggtcagtcggcggcaggagcgcggttgccagcctaggaaaaggcaaggggtcagtcggcggcagcgttcaggcagggcaatggcgaggagaggcgacgccggcgggagcgcgcgcggttgccggtggagagaaggcgaggggtcagtcgatggcagcggtgttcaggcgaagtgatcgcgatggcgagataggctgggtgcaggcggagtgcggttaccggtcgaggtcaagggaaggcggaggcacggagggcaggcgtgttatcgatcgagaggtgaggcggaggcggagcacgtgggctaggggtcgtgggactgaaggaggattgcgtgtttccttcggaaaatccaagacttaatcccgtgcgttaattcgagtggatcggacggataggaaagacctgtggggggtagtccaagttgctcattgtagtatagacggttctttttaaccttgcctaaaaactgagggtgtatgaaaaatcatttctttacattcctctaactgtactacttatgccaacgttaatcaaatacagcctctgcaggtcatgaccttcctgttgttatcctcagaaaaaaactccataaatggggccgcatcagttctacatggatcgccacatcgatcgatcacacaaaccaaacgccgccgagcacgcgcgcgtcgatcgtcaaccgatcgatcggctacttcactgcgcggttaaaaaagaagagggagagcgatcgatctgctcgatggggaaactaattaaccgagctgtatcgatctcggcattgatcggcaaacatgaatgatcagatacgcgtgtggtgagcttgcatttccgtcattaacttcttgttgtctcctgcgaacgaacgaacgggatcccaaattcggcaggggggggcgccgccatggatactgtcgagatatgcatgcggctatagtaaggaaacaaaatcccgtgtcgattatattccggggggcaaattaattctctcgatctctgggttggcaatgcagtttttatgttcgtgagatctttttcacttgggtttgttggcatgtgattatgttcgtgatctctctagctatctgtgtgctagctatagcgaattaagagccgagattcataattaattaatttagctagtagagcatccccataggtttggatgtatttttggagcattgcatgcataggttgtgaatttggtggcggttttgttgtcagatggactcctaaacaggatagagtttaatttatgcgttgtggagattttcagattatagcattaatttgtccccatttatcagttttttttatgaggataacaacgttggctcatgaactgtagaggctgtatttgatttacgttggcatgagtagagagttagcacaatgtaaagaaatgatttttcatacaccctcagttttttggcaaggttaaaaagaaccgtctatactacaatggagcaacttggactaccccccacaggtctttcctatccgtccgatccactcgaattaacgcacgggattaagtcttggattttccgaaggaaacacgcaatcctccttcagtcccacgacccctagcccacgtgctccggctccgcctcacctttcgatcgataacacgcctgccctccgtgccttcgatttcccttgacctggaccggtaaccgca

SEQ ID NO: 5994 - DNA, 36525 bp, Oryza sativa
  unsure (1)..(36525): unsure at all n locations
cctcccccggggtagatgggccgagagagattcggcccatcgaccccgggggaggcaaaatagacttttgcggaggaatttgatttggaaggatttggattcgggattgaactcgacgatagatcggggatttgagatcttgagatggcacggacactagacaataagcaaagaaacaaatttcgcaattagggtttttaagagataattttcccgctaggcgccacgacggaacgggcgctacagttaatcctatatcctatatatctataaatatcatccccactaagtatagttaatgctaattttctctactctcatgaagccacatcacttcagttacttttaaccttcagatcattcatcaagggtgcaaatttcatctcttgtccaaaaaccacaccatatataaccgaatcattataacctttggataattgatcaagttacaaaatatataagcacattaaagaaaattgtattttaattatgagataaaattttacaacgcatatttactatttttttcacataatttcctccgccgcaaagcgcagtctatactttctataaagttataacatgcaaccatgccacatcacactggtggagaaaccatctttgctcggttagccaaaatccacaatagtctcggttgcaataaaaaccgggattaaagattatctttagtcccggttaaaaagtttagagctgctttttaatctttagtcccggttggtggtgttaccaaccgggacttaagatctattttctatttttagtcccggttggtaacaccaaccgggaaaaaagatgcctactatctttagtcctggttggtgttaccaaccgggactaaagatctatgtttactccctggtggtgataccaaccacaacaaattttttttggcggagagtacggagggcatctgccatctgcgagatcgaggaggaggagacgggcagccttatctcttcacctcttcctccactgaccttatctcttcatcccatctcttcatcttcctcctcctcctctcctgtaactcctctccttccctcccccatcatcccttcctcttcctcctctctaacttctcctataactcctctccttccccctccatcatcccatcgggcggccggcggccggcggcctcgcggcggcacgccgacgggcaaaggcccgggcggcggcctcgcggcggtgggcggcgctgcggcgcggcggcggaccgcggggcctcgtggcgggcggcgcgccggctgtcggcgcagcggcgggcggcgcgccggctgtcgacgcagcggccgacagccttgtgttttttcttctttttctttctaagaatcttgtcgattcgtgattctgtgctattctgatcttgtgctgtgatncgtccgtacaatatcgtgcatgtattctgtgcatgaaattcttgctagaagcttgtgcatgctaatttttcgttcttaagcattcttgctgcatcttattttgcaatactgcgccgccgatttggggatttgaggatcggggataatttatttgggatttttggatggggatagagtaaaatcaatatattaaaaacacaatgaagaaaagaaaataataatagagcaaccggatctagctagctaggctagctctatcttaccaaccgggactaaaaaggctctatctttagtcccagttggtaacaccaaccgggactaaagatgtatttttactcccggttttttcacccgggactaaagatagtgatctttagtcccggattggttgtcccggtttgaaaaccgggactataggggggttacgaaccgggagtaaagcccctttctccaccagtgtcatcacccactagcaataattgcatgcaagcatacaccatcatctacaatatatttaattctacaaatcaacatacaagcatatcaaatcaccaccctcacatcatttacacaatattttaacaaatctatctatcatttttatagtatttaacataaatttatcaacatgttgaaaaaatatagtcagaattacttagtaatctcacagcaaagcgcggggaatcacctagctaactaatagatgggtacctgcgcgttgcggccaagccctgctcgatgttggcatatatggtgccgtggggttttggcaccagtggctggaaggtgtcggcccaatcaatctccttaacttgcttctagaaaaaaaaaatctatactaccaatcatgtatatactatgacagcacacgtgcttttgtttcacatcctatcgaataattaaatgttagcttgtttgagttgtggcttataaattgaaatcagttttgaatggtagaacataattttaggattagcttagggattttcttttgtcactgtgtcttattattttctatgttaaaagtagatctagaaaatgtaaaattttaccctaaaattattttgaattccaccagtcacatgtttttagctcataaaccgtacggggaaaaaacatccagctagaccctagatcgtcctagacctgccgaatatatatagctagcatccccgacaaatatttccattttatatcaacaagctatttatatatgtatatattttaataacatattagcgagatgtatgataaaataattatgtatgaataaaaacagtacaagaatattacagttgacttgtctacaaaatttactagagaaattttacacagtgtagttctaggaaaagcatttctcacggagagagtgtgcgcttctatacgcacaattgcacgagtcgcaagtcgcaacacgatttttttctgttattatacctgccaagtaacaagccaccttttcaatcttagaacacataaattttataagttctttatagggattagttcgatttccctaaaaattcttcacggtttctccatttcaaaggaggctggttccctgaagtgtagtgtgactgcaacataagcaatcacaggctacaactattcgatttgaatttaagggtaaggatttgctatagatgagctattatagcgcaatagatctgaattcttcgtgcaaaaaaatggatggacaagatcaactgcagttacgactgtagctgatctcaatccatgggagctcctgtgacaccaaaataatctaatggcatgggagctcctgcgtcacattggaggcccccagttggtgtggtgttctctgtggcgatgttccaaccagaccggcttcaatggttagagcgatggcaagatctaggcgaatgactgaattacgtcccagttaatctgcaacgttatctttctttgtggttcttatggtcaatgatgtgagtgagattcaatctgtaatgatcatctcatgtttttagagattatgtttctttgtttgagaagatcataattaaatataacttgcaagctattgggaaacaacggttatatacacagattctcaatagcagttttacctctgtctttaggttgatagttcaagcagttttctcgttttaatttaagttgtgattttgtaattcatagttatttgaccagtaatctgtgtaataataattggctatatatatatatatatatatatatatatatatatatatatatatatatagtttagagcaagactagaatcaattcaatctctgctattataaaaattaaagatgtttttgccgatattttggtacgtcatccgtgtatgagtcggtttttaagttcgtttgattttagaaatacatatccgtatttgagtcggttttaagatcattcacttttggtaatacagaaggaatcatataagaaatctgtataaaaaaaaactcgcatgctaacttaaaacgatcggactcctaactgcagctcattattttccaaaaaaatatatatccaagcgaactcccacagtgaacttcatcttaactaaaccatataacagtaataagattaaaatagacttcacccgttgcaacgcactggcattttttatagttatttaaaaaaaacaagatggtatgcaccatagggagtagtattaatatagacacgtatgcatgatactaataaatataaaaaataattttacattttgataagtattatttttctacctgctccactgactcttgctaatccatgtaacagatcagtgtatattcatgtgtgtactgttgtacggatccagagcactagtagcaagagtaaacagtaaaatccagcaacaactagtagtagtaaccactggctcgctagctaggctaaaagctaagcaattaactcgaattaattcttaatcaagtcgtgtggctctagtaccagtacttgcattgattggtagtaattaattaattaattaattagaaagcgtaattacggagagctacgtccagcagctgctcgtccagtgccagctgcggctctccgctgtcgtcgagcagcagccacgactcgatcgccgacagcggcgccaccccggccgccgtcgccgtcgcgtcgccgtcgtcgcacgcgaggagcatggacgacggcaggcagttggacgcgctggagtcgccgccgccggagcagcagtcggcggtgagctccaacgacgtcccggccgtggacgcgctctccgcggcggcgccaccgggcgtcgtcgtcgccgccgccgggttgcaggctgacaatcctttcctggccggaggcggcgccgcccagccgctcagcatcacggagatgttgcgctcgctcagggcgtacgccgccgccgccgccggcgcgggcggcccgctgctgatcatcgccggggaggcggcgtcgtcgacggagagggcgtcgcggagggcgcgcctggcgaggtcgatgtcggtctgcagcttgcgctcccactgccccctggcgacgagcggcgtcgtcggcgtcggcggcgaggaggaggaggaggtgagggcgagcttcttcttgaggtgggtgttccagaagttcttgacgtcgttgtcggtgcggtgggggaggtaggaggcgatggcggcccagcggttgccgaggagggcctggaggtggaggatgaggcgctcctcgtggtgggagaagccgccgcggcggatgcccgggcggaggtagttggtccagcggaggcggcagctcttgctgcagcggaggaggcccgtcctgggcggcacggcgcgccagttgcccgggccgtgctcctgcacgtacgacgccagcaccatgtcctcctccggcgtccatggccccttcttcaccccctccttctcgcaacacggcggccgccccatcgatcgatcgatccgtggtccaacacttgctatagctataccagatggaaggaagcttgagcttagctttatatatatatacacacagagacagagagagggagaaaaatgtgaaagtgactgtagcccggtggttataagatcgttagtagtacttttgggagtgaattttccataatttaacggctttgtgcttttagtgataagcgacgtacgtacccgttgacagcgaagcgtctggggtgatttcatcaatctccaggatttgctagcccgttcttcgaaggttctcaatagggtaaggtttgcgtgcgtgcgtttatagaggtgagtgtgcgtgtcttgtaagggtctgtgttgtactgtgtaattaaaaaaaacagggagaatgcccaggcaagcatgtgtgtgtatgcacatatagcctagagctgactagctggatcgtcataattgtttcaacagtggtatccatattagatttagtttttgtatggtgacccagaattatttatttaggagaatggattttaaactatccacgtgttgtctctttatttcttgtatgacattcaaatagttatgaattttttttaaaaaaaagagagaagatagattaattaatacatgatcgattacactgcattttacaaagatataagttaaaattcgacatccataagttgtagaaataataaattaaactttagcttagttaacatatatttacatgcaaatttgtttttaatgttgtagaagtaatatttaaaacttgcatgtgtacggagcaatatatcacatattatctatgttatcgaaatattttaattttttgcacaaccctttatatgacttgtaaggaactggcgaatatattcgcatcagtttagaatcgtttcagttatttagatttaaagtaacagtaagtactctctatgttcataaatacttatcgccgatttaatgagtaaatttcacaaagctacatcagatttaagatttatgagtaaattttacaaaaaatatggatactttgaccaaattatcacaaaattataggtatataataaatttattacaaaactatatgtttaaagctaaatatctaaaactacagatgatataataaaattatgataaaattatagattttagagtttaaagttttaatattatgtttgagttataaatattcaaattttatgattaattaacttgacgttagacttgtagttttatgataactttattattacatatgtagtagttttgtgatatatcattttaaatctatacttttatacttctatgaggtaatgtcaattaataatacttaaaattgtgttacctttcaaacgtaaaatcacttcattaaaattagattctttcgagtcaaaatcgtaactttggattcttccttaattaatcaaagtccagaaagagattttaaggcaacggtacgtgaacggtgtgaatggtgacggacggacggatgcggtgttaagttgatgatagtatcgccgcgtgcgtgcatttatattataaaatattgtataatgacgtacatatagtaatttattaaacttcaatgtggtacaacaatatcggtcaatacctttaatgctatatatgagccaaatacaaatggactaggaaatataattgacaaatttaacatagtacttataatattattattagataatggaattcattccggcctttgctttaaagaagctaaaaccaattattacaaagattatagctcaaaagactataaatgacaaaatcatagcttgattaaaaaacaaagaaaactatttagactacaacctaaagaccaggataagccaatggcttataagttgtacgtatagtctttgtcttcctaagctatgaagcagaatatccaaaaacaattactgatcattaccgattgaaacgcgcatatcatcgatgtcaacacagcgaaagataatgtcggagagcaactaagatgtaaaacaatcctacgcagtggcgaatctagaaaatcgattcattggtgtcataacgtgtctatcggtgtcatagtatactaattatacttaaatcatagtataataatacatggataagcagttttgttataggttttgccgaaagtcgttggtgtcacctgacaccggccctattattgtagctccgcccctgatcctacgctcaaatcttaccaccagcctaaccatcgaaaacggcaacagggatgtacactgcaccaacgggcaggggtgaaaatggtacggaaacagacggaaacaacttttatcgttttcgttttcatattttttccggaatcggaatcggaatcggaaaccccggaaacgaaaacggaaacgaatattatcgaaaccgaaaacggagcgaaaacgaaccggcgcggatacggtaacaaaaattattagaatacaaaaaccccttaaactaagcttcaaacttttgtcaagtccaattctcaactctcaacagtccacaattcatcataaaacacaattatatgaaatcgtctcaacaacaaaatatattcctctataacttcatataatttgcataacaaatattctaaaaaaattacagcaaaaaaccatggtacaaggtatacaatatacactattattcagtgctatactgctaatctgctatgagctatcactccatcatcagtacatagttcatcaatcatcattcatcagtcatcacagaacagcaacacacatcagtccatcagtacagtacttagttcaatcacaaaacagctacttgcatttgatgattcgatccatcgtaaatctgcagcacaaaagaaatcaaatcgatttaggctcgtcggctcgtcgctaggctgctgggactgctgaggcgaggcgtcgtcggctcgtcggtgtggctgtggcgtcgtcgtcagtggttgtagcggcggcgaaacagcgggatggcgccgtggctgcgagacggccgcgaaacggcgggacagcgccgcaagatagtggcggtatgagacggcgaaaacggtgggggcgaggtcgcgaggagccgaggacggcagagaagcggtggcgcgggcaccgggcggtgggcgctggcggtgcgcggagcgcgatgctccgccgccggctcacggtctcgcgaagtcgtgtgcctgtctctctcctctctagggttagccactatttgggttgggctggaaacttagggatgagttatagactattgattctatgggtctttttaacttcggaaattccgacaaattttccagaatttttccgaccgattccgagtttcgacggaaactgctattatcatattcaattccgtttccaagaaaatatttccgttttcgattccgtttccgagaaattccgaaaaaattctgaccggctgattccgtttccgaaaacaggcctggaatccggaaagtttccgtaccgttttcacccctaccaacagggacctctaacacgacgcctctaagaaggtcgtggcatctatggtgtcgtcatcgctattatgggcaaacctgaagtatctactcgaaagcatgaagatgagctagagcattgcgacatcgccttcaggaaggtgtgtggagtccacaggcatcatcgatgttgaacactgccgtcaacctacatcgccacctaagccatgcgtcccctccgtcgccactacaaccagcaccgataagcagcctctggcttggtggtccgcggctgccttcgactctcggccaaatccagctggccctccaactagaagtggccgcagccgcacctgtcatcaacacctatgacatggatctgaggacaagcatacttcgggactttcgctagaggtaagtgcatgatgatgtcatggcaccgcgccaccaccacaatcattcctgccgtgcaacaacggatagctgcagcgatgaggatgccgcaaccgcaccgcaagggccaccgccacgttgcatacgccatgcaacgctgcaacctggagctcacccttcaccccgccgcaacggtcagccacatcgcgatagctgccgtcgtgatgaatccaaaccttgctgccgccttccttgctactacgttggcagtgaacttgagcgttggcgaggcggatgggagaaggaggatgagccggagggaggagggagctcaccaaagggctttgtctgtcgccctaacctgctccgcttgccgtcgccgctgtcattgctcgactgcgtgtcctcttctccgttagagcagttcgcgggagggaaaaggagagggctcactggaggtccgtcacaatcgctggagactcgtcgctcactgttggcgtagagaaagaatgagaggaggggaggggagaggaagggaggggaagaaatggataaggtgagagagagaagggaatagaatggataaggtgagagaaaggggcacacaacttaatctgtcagcgtgcgcgcattagaacccctcatattttggagcgaagggaatactaaacactcaagggtgttggactacgactgataagaaaaaaacgaagcaaccaaaaataatttatgaataaaacctttatatttgcattactagctattgagagccaaagctagaaaatagattaagataaaaagaacctaataaactataaaattaaattaattttaaaaatttaaatttggattataataaaagaaaatgtgtaggcgcatgcgttccttgcgccagagatggctgacttgttcaatcagattgggcggcaagtggtcaatcgaagccctaaatgcagcaagagagaaagaaattaaaagctagctaagctaatcttcctcctgatcacaatcctaccaaccagtctgaagaagaaaaaagaggaccgagtcagctgcatgctttgctagcagccgatgagctctccccatccacgtacaccattcaatgcggtgtatgccatcacagatctgacatccatcaatttggctcgagaaatatatgtgcaggatattgaagattagcccatcatgcaaacgaaccggctcacgaacccacttattttataatataaatagatggataacccggtatataggtttttagattggtccacttatcccttacatcaaatcaaagagaattatcatgcagctaggtattgtctgcggtaagccggtaattaccactgacatataagtctttcatatattttttaaggggagtgctttattaattaggaaatagcagcacagtcttagctcacagccaattttacaaaatcatggaaaaaaaatctccacactgcactagcctcattcctacaagcaaactgagaaaataaatgagctactcagtactcactactaaccagctccatcattttgcttatacttatccttaattatggtttattagtagaaccaataaataatttatgaataaaatttttatatacatatttttaacgatttaaaataaaatactgtaaaataaactacgatgaaaaatatcataaagtcaccttcaaaattaaattttagaattgaaattttagcttaattgtaagcataaatgaaaagaggtagttgatcatatgttctaatattataatactcactctgtttctaaatatttgacatcgttgattttttattacatgtttgaccgttcgtcttattcaaaaacttttgtgaaatatgtaaaactatatgtatacgtataagtatatttaacaatgaattaaatgataggaaaagaattaaaaattacttaaattttttgaataagacgaacggtcaaacatatttaaaaaagttaacggcgttaaatatttagaaacggagagagtattataagtgtcattgataactagtgacacgacagtaagtggttgtacacgtacattttcctaggctgaaaaaaaaaagaagcagccttgtagttgtacttgttcatcgtcctagcaattaaatatgcagtgcaagtgtgcaactagatgtcctgaacagcacactaacacaaccatcaataattaatatagacaagcaggagcatgcaccggcaatcactattatgagacgagaaacagtagaaaaatacaaaagagttaatcaaggccctatttagaatggtgaaaaacgttctgttgatcttaatctacacggagaaaatggactgatttatgtgcaattcagcatttttaatcaaatcgctgagaaaccaaatcggttcacacaaatcggctaacctgcaataacaaagcaatgttttcaggaagctctagatcactatcatttcaattagtagtagggacaaccgtaaaaattattcatcaattattaattgttagacaataatggcagtaatagactaacaacagtggcatgaagtaaaagatagtaattatattgaggcttattcttgcatgcgtttgagaaacagccaagaagaagaccattcaatttcttcccggatatattccagttacgccgaaacggtaagcagaaataaaagcatgaccgacatttaatcatataagctgtggccagcttcaattcctaatctcgccaagagttacgtatgtaatttatcaatcatgaccgacaattaatcatataaaaaatgtattaaaacgtgtcacaaactaagctagtagctactagctgtagctataattaatgacatgcaaattaaagaatccaaagctatatatatagttgttgtcttgtttacattccttcaaatttaagccaaattaaaggcatcacgaatatgaagatatatagagcgttccgcgttgtttggaaataaatttgaaaatacactgttgttgactcgtttttttctcacaaatatttggaatgtaaatttattagcataaatatatcgtcgatctcgcacaacagttccgcgaaagtgacgtggatgtgacgacgcaaacggtctcgcacaatgacagcgcgagaccgcacgatgtcacgtggtggtagcgtgagaccgcacggtctcgcacgatgaaactacgacaccgaacggcgaaatcgaggacgtgtgtggtggcggcgtcagaccacgcggtctcgcacggccaaaccgcgagaccgagcaatctcgctcacccaatgagcgatagcaacggttgaaaattgttagttactttctccgtttcacaatacaagttattctagtatttttcatattcatattaatgttaatgaatttagatagatatatatgtctagattctttaacaccaatatgatataggaaatgctagaataacttacattgcgaaacggagagagtagtgattgattatcctaattagcaattaattaatattaattaatcgctaattaggataattaatagttaattagagtaattaatcactaattaagcagcactgatggacaagacgttcggtctcgctgattccttgtgcgggaccgttcgctctcgctgttttatctcgcgataccacgcggtctcgcgcgacaccgcgtgcatcgtcacgctctcgtcactttcgcgcaacgattgcgcaagatcgacggtatatttctgctaaaaaaattacatcatgaatatttctaagaaaaaaacgaatcacagtatattttcaaatttaatttcgttgtttgcgtgattggcttccttcttactattaattgacgcgtctgatccttgcagttgtagcctaaatgcctaataactaccggcaaaacgatggacttgtcctacgtacagttgccgaggattcaatgcatccaaatacccaatatttgcattggcatggccaaaatattcgagatatatatatacaagaccatatttacattagaaaatatggcactttctcggattcaaaaatataagtgatgggtatgaatatacttatattttgatttatagcaataaatgcttatattttaaaatgaagtgacgagctaaagaacccagagaaaaagaattgtaattaaaatcatttttcaactaatcttcatcaacattgtaagcccagttatcactgcaaatactatagcaagggattttaaatgatccaacaagtttttagcatacaaaatttgagggctgaatctaaaatagtgtggattaaaattttatgtatttttaatctaaaaatatagaagggctaggtagaattgtgaaagaacccatgcattggtctttacccattagttaccaccgctaattatagttctttaattttttttctatctgaatattaaggggttgtttagttgtcagccacactttactatgaatgttttatcaataaaaataaggtggtcaaatttttagccataccattaattatagcaagtataagaaaatattggcatactttggtgaaacggaggaccgtcctttgattaattaattgcctggccaatttaggacttgagaaggagagatattagatgataattaggccgtgcttagctctatcgtacttttgccaccatgtactatcagctcccattgtcacgtaacccttgtcccttggccattatatttcattctcttaattagagatgcaccattggtgggttgacagagttgtgggtgcatgcatgacgcaaaccctataaaagggtaaatctcatgtacatcaatattccataaatatatagatgtgtgtaaccttacttgatgcacagactaaaacttatattattaattattgttaaataattaaagagtcggtgcagaggtcggcatttacaggcccgtccatagacacatgcaagatgagcgaccgtacatggcctccaaaaatttaggccccccagaagtacatgttttaatccatacccatacgttctgatgtgtttaggatttctgcactcctttttttttattttctatctttctgctccgttatattagaccagaacgagatcttttcgtcggctccggtaaatattcgatgacgatatcatagttatcttaaagaaatgtacatcatgatgtgaacctgcattccaagcaataaggattccatttttgcacctattagtcagcaaaactgaattggtgcaatgatttttttttctgcttcatcagatcgccattacttaagtaggtgaatgttctttggtatagcagttgtcgccacggtatcctatctcactgtaaataaagttatctcccactaactccttaagcttaacatgcaaagatgcccatcatcatccactaacaagatgacacatcatcatccactaattaacaagatgcccacatttaaacatcatgcaaacatgctatatctttatagtttttataatttaagagcttttcaaatacaaacatgttaaattatcatccaatataattcacataatgtttcaatatatatctttattatgttttataatatcctatatatttatatagttcatcctcacttagttagtgcttaaataattaatctatggtccaaattatctttctcttttttttcctctaattaagtcgtatcacattaattgtttttaacctttagatgattaatctactgtccaaactatctccctatttttcttcttccataaagtcataccaccttactttttacgtttgaatcgccattctacaattcaagtttaaattatcataaaccacgttaatttacttaatctgatgttatctagctatattacactttatttttttttatcatactaaattcccgcaacaatgcacggggtttcaccaagtacataaggtcttgttccccaagatttttggggacggctctgggaaattatatgtacttttaactaaaagggaaacaaaataaagatggcgtaaattgatattacaccgggaatcagtaaaatagcaaatatttgacttaagttgacctaattacagggagattaatatttggtcagtctcatagaaatcaccgtccagatacagatagcgaccccacctattattattattttgagagggacgatctaaaagaatcgagtttatatatcatgtttatttattcttagctgtagcaggttaaaattatgacatcgatcgagtttaaaaatcttaagacagcaattgcagaaagtaacaatcaagggaggtgccattttcatactgatttgatggttaaaccctatcgtgacaggcgagaactggagagcagtatgtgatactgaatgtgaaattctgacaataacgccaaattaatgtaacaatgagctcttcacatgttgtattcaattcggtcagctgatctgtaatagagtctttttcaacgtcaaaactcaaaagtaaacggcagttttaataagattgaccagttgcgatctgtttagaacgttaggaggctttcaaatgggatagaacatagagaaactcgagcagaaaataggcagaattgatgacaagatggaccaattggtttagcaacttggctacatttcaagaaaacttgctgaccaatttgttgccaaaaccttatgaagtaagagtatttaagtaagtactccctttatcctatattccctttatcctaaaatatagggcctattcaaattgtaaccaaaataaaccataccatgttttggcaatgccaaaattttagcaagatggcaatattatcaaaattttggcaggatttcttatgtattgactaaatttgtgaacaaactagacgtagatattttttggtaactttaaaaaaaatgatatggttgaaaatggcatcaaattgaacaggctcataaacatttataattatatatctaacatgtttccatattcatagctaaaaattgttatattttgatacggaagtagtagtagtacataagtatgtacttgtgaaatttgtgaactgacaaactttcatggttttctgtcgatatgaaaactttgctctccattcatcggttggccaaggttgactgttgattactccctccattttttaatagatgacgccattgactttttttcacatgtttgaccattcgtcttattcaaaaaatttacgtaattataatttattttgttatgagttgttttatcactcataatactttgtgtgatttatatcttatacatttgcttaaaatttttgaataagacgaatggtcaaacctgtgagaaaaagtcgacgatgtcatctattaaaaaacggaggtagtacatgacaaaacatgaccaaaaataatttgtaggtaaagctcttatatgcatgtacttgatgacttaaaatccaatgctgaaaacaaaactatattgaataccctaaagttaactccaaaattaaattttataatttaatttttggtagctgctaatttttttcagggcaaacgatgaggctagaaaacagctgctagcgaagcctattggatatatagacttacaaatcgacaaaattcagcctgattattacgtgtttatgggtcaaaattcgctcttccaaaaactgttgtgtgcctaaattttgtcctggcctgtttatgtttgttccgctcctaattccgccttaccaaaatcatatataggcctaatttgtcctggcctgtttaagatcacccagggcctaaaaactgtttgagcccttttattgtaactggtgggccaaacatttgagataataaggtagtgggccaagtatttagtttcagtccattaaacgggtatcgtgggctaattacagcccattaaagatggcaggagggtagttccagcctgtttattcgggaggaaaaagtccattttgactcccttaaaagtcacccgaatctaatccgtgaccctcaaccgtaaaaccggatatgatgactccccgaactattcaaactagtgcaatttgactccctcagcggttttggatggcggttttgctgacgtggcgctgacatggcggtgttgacccggtcttcatcccacgtggcgcttatgtggcattacaattaaaaatattttgtagggcccgtctgtcatttgcacacaaaatatattgtgggactcacatgtcatcctttctctctccaacccttattcctcccccctctccctcccttctctctcttttctcctgcagccgcactcgctgaacatgccggtgcagttgaacccgtgcgccacctcgccggtgccgaacaccgcgatgagcccgatgaaccctttgtccagccgttccttgacgcagtagtcgatggcctcctgcagcccggcgccccttacttcatcacggcggcgacgtcgcgcgccagcgtggagcgtatgatggccttgccgatgcgcccggtcatcttgttcatcagcccgcccatggacatggccgccgcggtgtggccgtttgagtgcaccactgcgcaacccaccgtctccggcgcgggatacggcagtcaaactgcttgtaccaattaatcacaggatgtcacggttagatgttagcaattttcataggcgaattggtaacatgagtcaatgcgctgatcgacgaaccaagatgctgttagcctccttggcgagcttcaacatgccgacgttgtcctcggtaatgaagtagctattgtctacgacctgaagaccttgcaaacagtgaccacaaagaataaaatcagaccagtccacgacctcaagatctgcaggactcaggtggaccacgctggtaggacggattcgtcctgcagctactggtcctgccaaaattcgactggattccatggcggccgcgccttgctaccccacaccggcgctgcacttgcatctgctaggcaacgctatgcacatgcatgttcttcgggcagaaagaaacagaggcggcaccccctgccggcgcagaccaagaggcacggctggggccagcggcgtctcaggcttcgccgtctacattagccctctcgttcgtcccagcctggcgcggcaccatcgtgggggaggccaccagccgaacgcccccgccttctccggcgagctgaggccgtcgccgccgaacgacccgctcaagttccttcctccgtgccggccctcaccctgccgccgccgccgccactccagattccgcaccgaatctggaggaagagaaacatacagagaagggagaaaggaaggggggaaggaggatagataaaggatgacatgtgggcctcgcaattttttttcatttgaatgacgaatggagcccatataattttttattttaatgccatataagtgccacatcaacaacacagatcaggtcaacatcgccacgtcagcaaaaccgccatccagaaccactgatggagtcaaattgcactagtttgaatagttcggggagtcatcctatccggttttacggttgagggtcacggattagattcgggtcaatttttaagggagtcaaagtggacttattcctattcgggatgtgtgtctgattctggcccaattgaagctggccctattttcggcttattaatttctaaatagtttctaaaaaaattaacaattttgctatatatttgtcgacaaattttctcccaaaaatttgacagatacaattacagtacaatcgtagtgtaattacactgtaacttgcatgtaattacactaactataatgtaacttgtatgtaactttcaaaaatctctccataacatcttatttcggtaaaatgaggctgtgggaacaaatcctttcacacatgtgtgtactgttattttctttcttcctcaccagaacaaatcttgtaatagatctaacgattcaaaattatgtggaacttacatacaagtttcacggtagttatatgcaagttacagtgtaattacatacaagttacagtgtaattacactatgattgtactataattacacctgtcaaattcaaatttttaggagaaaatttgtcaacaaatgtataggtggtcccaaaactaattatttgagaaatgagtggtgattaagttttataagtttttgtgctaaacatcaaaaaatatcggaatgagtaccatttatctgttggattcctctgaaagaaattaaggttgggtcgttgaatgctaagcaggtagttttgtcaaattcttgagtactgcctaattaatggaacaatgagctgttcatagatcgtaatttagccaacatatctgtgatatatgtcttcttaaagtacacggcacgataacctattggcttagctattgcagcttctcagaacgttgaaggtttcatatgggacggaactagagcaatcatctagatctaggtctaagatacagaaaacaggcagaatagatgacaggaaagactaattggtttaacaattggctttattccaagaaagcttgctgagaaagtaattaatatacatacatcgtattagataactcttgaattcaccaaaatttcatcctaataccgcaaaactgagctaaagcagcaatcatgcatagagtaaaggagtatactaacaaaatcatgaaggcggtgccggaagaggcagagagtgtgtcaactgagagatttactacaccagttaggatgtttgcctgtaagatgaagttaaatgttactccatacagacttaccaaaaataagttccaaatatactagaaactcaaattgaggatctattagttggaacatttctgttttgggaaaattattttctaaaattgtgaccaaactgtcttaccagaaggaatgaaccaagcatattttgattgaatgcatcttcaagaaccaggttcttttcatatgaaataaacccagctagtgtgagaatagatataacctgtttttaaaatagccaccgccatcagtgaaatctggacagaaaattttaacatggctatatctagcaaagatacaatcagaaaactctaacaggctatatggttgctaaaccataagtaacagaattatgtcagtcaaattcgtgaacctcgccaaatttcatggttctgacaatacataaaatgtagcccccaatcatcaaagaatgaaaccagctagtgaaacaatgaatacaacagactaagaaattttcaaccatattctatacattagactgagttaaattatttcattctcatttgataatattaaagcatgcagacaaaaaaagatgcacagtgtaggttaactccgatgcacaatcagtttaagatttcaagtgcatagttttatttatatccttgactcatgtaatactactgtactagtgtgttactattaaccattgctggaaatagtacaagtaactaattctcccaatggtagagaggctaattgagaaatatggatacctaaatctggcaatgtatgcaaattaaataaaatcaagaaaggcgaagaacaatacctgaaaattctgtccaaatacaagcataacataagcaaagttgcactgcaaaatgaaatgtacaagttaaattcaaatctaaggacggattaaattgggagttaatggtactaatcctatcttactataaagttatcccccactaactccttaagcttaacatgcaaagatgccacatcatcatccactaacaagatgccacatcatcatccactaattaacaagatgccacatcatcatccactaattaacaagatgccacatcatcatccactaacaatcatcacatttaaacatcatgcaaacatgctatatctttatagtttttataatttaagaccttttcaaatacaaacatgttaaattatcatccaacataattcacataatgtttcaatgtagtacatcatatgcattactatctaagtaacggtatgttttccctttcattttttttgaaaggaaccacatttgtacacaggtgtcaaggcttctaggatcaagttatattgaatatataaggggaacaaacaacctggacaaggccagaatttgttaaaaagaatgtttgaaatgtatcagaaccaatattttggcaagagatttcctcagccttaaataaccacatctacctccgtcccaaaatgtagttatttctagcacagtaacttgttccaaaatgaagctatttcttcacctaccctctcctctcaaccaatcacaaccattcttttcacttattttctcttctccaccaatcacaacactccaatcatctctacctactttcttaatatcggtgcctacctcaaaaaggcctatattttgggacgaaggaagtattatgttagatttggttggtgctaccaaatttttgtagctgctcccagataatggaggcaaacaaaacaacaggaaatttccgttggaactacccatatttagtttggttcaccagtatgaaccaatgaaccaaagaggtcaggtatttgcctcagggtcagcaaagtaatcggatcaggaactatgcactttagatgcggttaattttctaagctatgctggtccatttcatcacagcatactctttaactatcataacaagggtactcagttcaatagaataaaactctgctcaatatactataaactactattaaaatgcacaactatctggtttcttatatttgtcaatctaatgctagtctagattttttgtttcttaagaaagcatgtaatcaattaatatcctaccattcgtcgagaaactctttcaacatagctgtcaagaatgattgccataatcctgtaacatggcatgggaggaattgttaaaaatgaagaaaggttataactgggaataatgcatgaaaaaattgtttcttaccaaaaagatgcagcaagaacccaaacttttaccacttgactgctcctactcttgccttttgaactattgtcgaagaatagattgtaacccaaggaaacaccaatcaggtacataccccagtaacctgttaaaagggatgaatcaatcagattgcatcacatcaccacaactttttcaaaaaagaatcaggtgcatgcaaatttatgacattcgggtataaaaaggatcaaaaagttacatgcaatcagcatataaaggtcagcaaggcaatacaaaagatgtatataataagcatggatattaagaaatccataagtgaatagaaacaaagaaaaagggctagaaatatgctgtgcagacaccttcatgtatgcctgaattatccaccaacaagttggaggctgattatttattggcaccttaagcaaagaaataacagataaataacagactgacatcaaaacttttcatgacaaatagcattggaaaattttgtgaactcaagttgatgtgagtagtacaattgggttgtttaagtgttacattagaggtgagtgttcctggtaatacgaaagaggttttgttgcattagtatacttaccaaatatgctataaacaccttccttattctgactgatgataccaccgtttctttcattagaaatgagatactcattcaacccaaaagagagccacgtttggaatcctgaaaacaaatgaaatatctggtacatgaaaaggaggctgtagcacatttgaaaataaactattcaaatgaatctttagtacctgtaagcacaagcagaccagctaatccacaatacttaggatggatcctgataacggacgtaaggatcgaaattgctgcaagggtgaaaaagaagttccagtgcacgccatattctcctacatgaacctagaaaatgagaaatagaatatgcatctttaggaagacagcagtacatttttgttttgtgcagtacatatacggtatctagaacaagtcaacaagagaaaataatcacatggtaattgaaaatgctggataaggaaagcaaagtttgaggattgtgcataattacgaagtaaatttaatgtcaatgcatatggcaaattgtggcgaaggcataatttaggtaattgacatggttatgaataaaaatacctgataatcaacacctgatgtcgatatgagacgagcaaaaccaagaaatattagagggcttatagacatcagtgctttattccaggtcctaaggacacacatgaagttgcattgtaagacacagcatactagtgactatttgcagacctctcaatcagaatatactcttactatccagagaaaattcaaatattcaaacaatgatgtctgcgaaagtcaaacattaaaatagagtctaaataaggttttagtgattatattagacaaaggtgggatgaattgtcaacatgtcactttctcaggatggtttattatttggagagagaaataaatgggaaggatttaaaaaagatatcgtcctacaataaaacagagcaggtgcagaaatttgatggataataaagcttttgtgggtgaaaagtgatcaagtcaatcttagcttcaacttgacgttattacttttctgacttgtctccagatatacaaatataagaattgtggagatcagcataatttatcttcagtgtgccaattctgaactaactcagcagaccaagctaatttttttatagatagctcgaactggtgaagttgacttgctttgtacctgtaccttctaggtttctaaactagaagttcctactttcaatagataaagccagcggaataaatatatgttctttatatcatttatataacatgtgatatatctaaaccatgatattcctttttacctacagttcctaacaaacaacaatctctaacctgcctaatattataaccaaagaagagtaagattatctgtcgtaagacatggaatctactttctccgcctatatttggccaacttcagaactgaaagtcactgtgatgaaaaccaaaaccctagatttcttagccatatgagatcatatgtagttaaggacttacattgcagtaaagtttcgtgcttgtctagataccagtgcattagccactacaaaagaccctactccgagatccatctgttggacaatgaggcagataccttagtatcatgtcattgaatggggaagaaaacacagaaactttttaagtttcaaacatgatgggaaacacaaataatccaaatcacaagcatgcagaataggtaacagagtggatgcacaatttgcagccagtgtctacttttgcaaaaacaagttcatgattcattaaaaatgctttgagacagtaaagaactaaaatacaaccaatgaaaaagatgaaagatacaacttacgatgccacaaccatatgtttcagccttggcataacgtctagggaagattttgaagtccactgctaatatgcacaggcatgttactagaaccttcaaaacaccccatcaccattaacttcaatagttctgttggatatatagtactgagaagtaattaaatgagtagtatttttccaattaatcaacttttacgtaccacagatactctgtatgatgatatatctgctcggagcaaaggcagctcatttggtccagctttgagatgagatcgagaccttagaatatagggaatgcattagtttctaatcagcatggattttgttgcataaaggaaatagggtggtcgactagaattgtaatagaaattagagagaatgtggcaagaaaaacaggtgtaagaactcagatatggtacctcttaaacatggtgaggatagatatcagcattacaagagaaagtgcacaagcacaagcccattcagctaaaacctgtaacaaaccaaggaataatcaaaagattgctatttaactttttttctctaagaagtgttaaacctcattataacatttgcaataagcaaataacaatagttggttaaaagtttatgcattgtgttccaatgcttggttctctacatattttatgatttctatagttgaacactgctacaatgtaatctccaagtcctatgaaagaatacttactgtgaaaatcagaagaactggcaatacaatactgaggtaatctatagccagtgtagagaagtaatgcacaaaacctttatgaccaggaagggcatcatcatttttcttcaatgaattcttcctagtattatctaaaacaagacaaaaataagggaagaagcaatcactttccagatctactctgaacagtaaaagaagctcgtgttattgatcaatgatgttaaaattcgaaaatccatgaacataacatccataacatcagatgggggcaccacagcataatcaaaaactggagtagagcatggtaaaatttcacataatcgagttaaatttatcaaaactacatgctgagattacgcaaaaaattcaacctgtcaactttctggttcaatctcgcaatggcatatctgaaccaaatgctaaatgtgcaagaatgcagcatactggtaatcttataccacacttctaaatgatatcaacaactcgctcgtctatttcttgtacaaatcgatcagctaaacaatcgcactaatagatcaaacgggtcaaaaattccacaaaatctgtagcgaactgacctccgcagctccatttcctcagaacgaccacagcctgcacaacccaaaaaaaaaggggtcaaaccacagcaccaactaacctacttcagcgggggtaactaagcaactcaccggaaccacggtggagagcgcggcgatctccagcagggaagaccccgtcaagttgctgacgaacctgcgcgaggcgaagaggacggttcttaggaggcgtaccagcgagaggttttcagggggggtttgggggacattttgggactcactgctccttgaggagcttgtgcgcgttgatgggctcgtcgtccattggtggcgcctgctcgaggggcggtggtcgcctcgcggcggcggcggcggagtggaggagaggggaagcagcgcaactgcgccgggggagagggagagggggggggatctgaactgaactggatcgcgcgcgacggcggaaaagaaggcgagaagccgagaagagaaaccgaaggaggagaaggtgtggcgcacgggccaagccggagcagaaaggaagaaaaatggcactctcaaaatataaaaagtaaattgtactagttgttcgtataagcttgtaatgaggttttatctagatctacaaacttgtagaacgtgcatcgatattcttaaaattagtttattgccatgtgaatgatgatgtgacactttttaatttttttcccttttttttcttctttcttcctctctccgataagcagcgacactgacgaccacgacgggtaatggtgatagcgatggcaggccaaaggaatcattaaaggggccgccaccactggtatcatcgttgcccgctgcctccaatggtggcgccgcttgctggagggaggactaaggagaaaaaagaaggaagagagtagataataaaaagagtaaatttcactttggccatgtatatttatcagattggcgcattggaccagggctaaacgtatgttttcacttaacaccacatttctttaccatactttacaggttggaccagagtttagcatctgggccatcaggacagcttcgggctagtccatgtgaagcgtttgcttgtatggaacctcttcgcttctctgtgtcaacccctccatgtccactaaagccgcatcgtgagcttggcctcggcacgtagacatcggctgttatcgacgtctcttcagactcttcaaaggcctcatcatgttcggcggggcgcgtcttccgaccatgttgttggcgtcaaagccaaggaccattctggtggacatcgacgccatcacatacaatggcatccggactccgaagggcagaagctgtggaaccgcccggatcgctacttggcttggtggaggcagtctatatatgctatattagtctgttattcggtcttggaatgtatcatagagaaaaatcaaaacgatgttaaagtctgcaactcaggtgtgttttggggcttgcgggattttattcctgtgtaccttgtgagtaatcaatttgtgttccttactcctgagttcaattggtataacataactttaaaaagaaagtttggttcttaattaatgccaaatggaatagttgggcccttattgcttcacataatctggaagccaatatttaggtctgatatgatttcaaaatctattgacctaatcatgttagcaaaagtttttcaacttctaagtggatcaggggtcatatgcatgaacagaacaccacggcatcggcgattcggcgtggaagtcgtggcccttggccccaacattggttacgctcctgtacaggatgacgttgggatccaccttgccgatgatcaccagtcgacagaaatgcccttggttaaggggcggaagctgtagcctgtaggcagcagcgctatcgaggagatctcacgccgtcgctgctccccaccaagcgtcgacgcatacacacgcctggactcgccccctccacacaaacaagcgcttcacgtggactgggccgaggaggctttcctggtggcccaagggataagccctggtccaacctacaaagcatggtaaagaaagatgttgtcaagtgaaaatataagtttatccctggtccaatgtgccaatcaggtaaatatatatgacccaaagtaaaatttactctaataaaaatataccatgtaagttcacgtggcatgccacgtatgcaagatcattgtcaaacaagactgtgaatcgaagtgatataataaatcaagtttagagacatcgatacgcgtttgcaaatttgtggacataggtgaaacctctttttcaaatttaaggaaatttaagtactaatcgtgcaatttactcaaatataaatataggtaaattgcacttctgactaaagtttcactttatattattcttatagtattttttttcattttgaactagttattgtttccacatgttaccctttagatagggtggcctatataagtgaattatgtacaataaaggtaattagtctcattgatatgtgggtcaaccagtttaaagtgcaacatttggcaataatacgcccaaagtaaaaaaaaacactttgaggatagattaaagtaaaattttgataaaaatatgtggcccaaaatgtaatttactctataaatatcagttgtgtgttttgtttatagagaaattggcacgtcaaattatttggtttagttcaatgtcaaaatgtaattttggcattgaagtccttcccaattcatggagaaaatattaacaatggccaatttggcaaggctaagaattgcaataaaccaaaacaagtcctaaatttgtgtagctctaaaagtttgggggaatactcgtatttctaactggtttgtaaattaagaatgaaaatcaaatcgaagtaaaagaagtcatttctcaagctggtaaaaaaaatactattttaagaaaaatcaaaccaaaatatatgtgaaatgctcatgctgtggctactcgaaatgaattgtatttcaaaagaaaagttatggaattacaaaatcacctttgaagacaaaacctacaaatggttaaaattatattgacatgaaaagtttaagtacatttgcaaaactaaaaatacttgaccaaaccatcgtaaagctaccaatttaagacgtttattaccaaaatatagttttagcacctactttatcatggatgagactacatatttaaagcagagtatcatgaaattacaatagtagtgaagttatcataaaaccaaaatttgcagtttagatcatgacggtattattatttttgagttataaatattctagttgtgttataaaaaatgttactatagtttttcaacagtttgagcaaagtatcaaacgatcaaactgtcagggttatggataccacatacctaatagtagttgactaaatctagacaggacccaccacataccatgtcttatacggaaacaaccttcgaatataggagaagttccgcataaggaaggatgaatagagttctacatggaaacgacaagaactactcggattgtatccatattagtttctctagttctacttggacaaggggatatctgtgggtataaatacaaggccccctaggaggagaggggacacggaacaatagatcaacatacaagccaacatgcatcaaaacaagacgccggatatcgacttcagagataagcatggctagtcccctacggtgtctacggatactgtcaggagagacatagcactatctttgacctcgctggatgcagattcaaggaggaaggctaccctgttgtcgactacgagtcagcacttcagaccgccaagtcgacaacagttagatagactaccccacatattgtactggtgtgattatggtgaataaagagcaacaccggcttcggcaaacaggatgtagggctattacctgtaagataaggggcccgaacctgtataaaaatccttgtccccgtctcttttacctaagtctcgcatatatcctagtaccaacgatccccatactatgcaaataccggaatcgcgacatcaaacgtcgacacaaacagtttttaaaaaattactctaatagttttgtaaaatttactcaaatttaatcgaaattaaagaagtttgacttatgacaatacaaaaacaacttattacaatatggaacggagtagtaatgaagggagagagtttccccttttacaacacaacacatacggaaaattttatcgctgtaagagggaaatgtttgcgtataataggccagtactatgcttagataattttccaaattaaaagggaagaacattcctcactaaattcatggaaaacggatctgataatttgccaacaaagtgaaccgaaattgtgtgcttataaggttgtccagatcgctgcaagagggaaatgtttgcatattattggctagttctatgcttagataaaatttccaaattaaaagggaagaacattcctcactaaattcatgaaaaagggatctaataatttgtcaacaaaagtgaaccgaaattgtgtgtgttaataaggttgtccaccgatgttggcagaaataccttacaccacttaaaactccgtataaacccaaaaaaacaaattatcagaatggcagttaaactctggatgtaaaaataaaaaataaattgtcaagaatgggattcgaacccatgccctttcggaccagtacctgaaactggcgccttagaccaactcggccatcttgactcttactagcttgcagaacattgacaatataacacctcaaacatcttaggaggattaccattttccaacgattttcttgcatgcttcacaattaggggaggcatgcataacaagtggatctgagacatatcacgtacatgagcaaagctaggttattccatcatcaaataaatagaataagtaaatggcaaaatgctctacaagtcctgtacatacacacatgctatccttgatctctcctctaaggctcccacccagctcttaaaaaggagaaagaatacaaagaattgaactcgtacactatggtacacataacaaacatctattcctgtcgtatatatatgtgattcctctgcacaaaggtcagcgtcagctgatgcgtgtgattatgtaccggcctttctccaagtcgtatatgatcttcgtcttgggcttcctccatcttgccaagcaaagtgctccacctagaagaaacacccccagcagcacagcaagcaatggtctacttctatgggctgatctaccagttgctgatggctctacaattacgccttttatgtttgagatgaaagcccccagggcccattcaacttgagtgtctccaacctgatttgaatactcaatcctgcggatataagaacatttaaatttaaaagtaggtaagcatataagatcgctgaagagtgaatttcagcggaagattgatgtgccatggtattcttgcctcttgtcatccagtggtacaccaagactgtcgtgcagtagagctacaatatatgcggatgagaagcaataacgtgaaaaatcatcatctgaccgattaggatacattttcctaagagtagacaagtccttgttgcaaaattgttctccagcaagcacaaaatcagacagtgatgaagattgcttcagtccaaagaactggcacataattatgtgagtaggtgtcctaagaaatggaaaacatgtacaaggaaaacaaggaggatgtagagttgaggacctttgatgtaaaatagaaattttcagttgctaagaaatgtccacgaagctcaggtacaaaagttggtccaagttggcattgttgatatcggcactcttctgcacttaggacataaaatttcagaagataaaagtggtaatgaactgacacatcatgctaaattgaccttgggtcagaacaaagaaaaaactccaacaaagtattcaagctacagaagatattaagtctatgaaatcaaagaacctcccatctttgttgatgttgaacaattgaaggataacctgatatttaaccattataaccttgtttatcttcatcttactggtatgatattttagctaatgatcacatataaaacttttcttcagatcattttcatggtattcttaagcacacaaacagtgaaagtaaaagaaagaaatctgttagcaactaagtaaccaggtaaataaagccttttagggattaacaaaaaacatggcacattcatttcctaccgttgccttttttcagcagtgccaaagaagaagatctgcacactgtaaagtctccatccccactatcagcaaattgattctctaattttgattttgaagcactgcttggtcttgatattacttctttgatgcgagaatatcctttaggagcacatggatcaacaagtgtaccatttttggagtctgcaaccacatgagtcatgataaggcactgctttgaacttcagtacatgcagccaagttcctctaaaagctaattaacgaaaataaaatagaatttgtgtattcatattggtttcattcagagcataaaatgcataaaagaataacaatacaatgatggatgcaagtacataacagctttgatattcaacccagcactcatcaaacttaaaatgtacaactgttgctttgaactatagtcctgacatatttgtgtcactgtagcacatcagaagtagaatagccatagttagtatactaattattgatgttctattggctaacatcagcacatcatatttgttagctgtgaataatattctgatattctcatttctgggaacttagtgttcccttgtcaacctagctaccattgtaagggatgccaaatgtctattttttttgctatcctttacattgaaagaataagtaaaaagataccttttgaccgcagtatttcacggaaggattcttgtgcagcattctgcaaaagaaattgaatcatatggtcagcatatcgtatcatattacaagattgtccataacataagtggtgggtgattcaatgtatacaaatagctcacttgtccaaagtttagaaagctgttgctatagagagtatatgttgttccaccaaaagtgaaatttcttgacagttccggaggaagtacttcatcagaaacaaatgtcagctgaaacaataagcaataattagattggcagaaaatcattaatataaccaaagcattaagcaccgtgttaacattgatattcaaatgtggagcttggttctagataacaccatctcaggtaagtgagtcttttcagattaaataacttaactttattacttattagtaccatcttattagcatggattttaatttaaagaggattcatggctcaaaatcaaaggaaaggaaaggaatcaaagaatttatctgtctttatcagagaacctgtgctgaggcgcccccaagttcaattattccaatggttttgtgtggatcccctccaagtgtgccaagagcatagtttgccgcaacccaagcatagataccctcatcagagcctataagaaatgaaccagccaaaaaatgagcatccatactgacaatatttcagctaatgatgaaaaaccatctgtatccaccatccaatggattttccctttactgattcactacccaaattactttatacaccgctttccctttcgaatagccggattcagtttcttgatgcctctcactaaaccagaatataaaccgaattgaggccgtatttctcaggagtactacacttcaacccgcaacgatacagcctagagaagaaacaacggtaatatccactacacatttttcagaaaatcattcatttcaggaatcaccaatgtgcaaccatcacaacaacgactgaattgacaaccgcggctgtctcagcatgacaccttagcatttccatggaatatgtcagattcatcaccagattcaaattctaacgtctcacctaaatcgaattcccagtcccccatctataaggcaaccagctatatcacttgagcattacgaactgggaagaaatcgacactacctgggatcacctcggcccaagagtcctcgaaccggaatccggaagccctgagcacgtccctgcaggacgacaggatggcctcctggaggcgcccctcctgcagccgcagcccggcggtggccatgagccgcacttccgccgcggcgcccccgaccttctccctggcgaaatcaatcagcggccgcagcgaatccccggcccgcgcgggctcgtcggcgaacgaggagagccccggggtgacgcgcatcacggccgaccgcgccagatccggccgcccgccgggccccgtggcgaagacgtgcgcccggctgccggtgctccccccgtcgatgatgaccgcgaagcgcggtggcgaggaggagggggagggccgcggcggctgcagctgcggctgcggctgcggcggggagaagaggtgggcgagggaggagacgaggagggcgaggagcgcggtgccgaggcagatgccgcagaggcggcagcggcggcggcgggggcgaggggaagggggtttggtgaggtcgggcatggcggggacacggccggggcgcgcccggccggtaccggcaccgccgccgcctctttgactcgtcggcggcgagggagacggcgacgacgacgagctttattttttattaattattaatggatttttaaatttccagggaggggcgtttttatagtacaggctggcacttggacggcgggggtggaggcgccctccaactttacgtaaactttaaaccgaaacgtaattacgtaagcttagagtttttcaatacagaaatgagaaatcagaagtgtttctgaattctgagcgactatgaattcagagtataaataaattactactgaactcaacgttccaatcttttgagttgcaaatttataccactgaattggaaattttggaatatatatattgaagaaagagggcgtctccggggtaataagttacccccaaatgctagtacaactgaactttctatgcaaagaacaaagaatctgttcgtttcagtttaaatctcaacaatctgacagcaatgtgcggatccacaaatggttgatttgatcgcgtggttgtctagagcctgagctccaagtccaattctttcccggcgccgtcgccggcagcagcctcctcgtcgtcgtcgtcgtcgacgaggttcacaaacggaataatactctgagatctactcgccgccgcagtcgtctcgccgtgcagctccatctgcggctgcgctcgacggcggcgataatcctgcagctgcatcctgtatagctcctgcatatatatcattagagcagtgtcaattatattatagagtaaatttcagaaaactgcaatttaaaaaaactattcgtttactgcaattttagcgatatgttttagtttgcttcagcaatagtgtgaaaaattattacaaaactgtaacttttacgttatatactgctacagtatatatgtaacaactgtagcagcaaattaactattatattatattgctactatctagtaactaattaactagcagaatttctcgcgcaattgcacaagtacacatatatatacctgatcagatgaaccctgttgctgtcttaggagaggggacgcgttcacgacgcacttgcctgaagcatcctgattgatctgacgttggaaataagcttggctgctgctgctgctgctgtttgatgcaagtaatagcctgctaataacacaattaaacacgcagaattaagaaaatttagtgattagcagagggtaaaatggaggctaggtcaggacgagtaggaagtaagattttgctctgactttgtcagtatcaaaaggcaaaattaagctaggcacgtgcctggtcaaagcatcattaggagtagtagtgtaatgctgctgcttctgcagtggcgatgagccgtaataatacggagtgaaatggtgatctcttgttcgcgctgctgctccatttccaacctgcacatataaataccaatatcatcgtcagctagggttttgattggatgatgtaagaaaaaattccttgattttcacgtacgtattgttgttgttgttgttgttgttggtggccgtagcgcacgccggccacgtgagacggcagcagcggcgggttttattgtatattaaatttttttccattttttgccttgttcttctattttttatatacaaatttcattggattatctcttatcttggttttttttcacttttacacctttaacccattttttgtatattatttttccttttcgttatggttttttttttccttgcatattaaatattttgactttttttaccttttcttataaaaattttttttgatttatcctaacataaggcttttaatatatcgaacaaatatttttaagattatttttttgatacctaaacatttttttttaatatacttatacatatttttaagttccatacaaaaagcaagacgtttaaaaatttttattcaagtgctactatggattaatatgcccttaacccatgaaaaaagctactttgttttatccaacgatttttttgcaaatttataatctgcaatccaanggttgatagtctatttttccaggttttcaaagtaattattttttactttttaattaaattttttggatctattttttttgtttaataaaggtaaaaatacctcttttgtttttgaacatttatttttttatttta

SEQ ID NO: 5995 - DNA, 1840 bp, Oryza sativa
catatgtcgttcgatgaataccctcaaataaccgaggcggtgtgggaggaattttgctctctcaaaaacacccaagagtttagggaatcaagcgagacacatcgccaactgcaacaacgaaatgagcacccacatcggttgggcaccgcagggtacatcggcaaggaggcaatatgggcccaagaagatgcagccgctgcagcagcgaatgtccctgccccgttttcagacatccctgaacaaggagctcgcaactggtcgcgggcaaggggtaaggtcaacccggacggctctgtcacatttgagaacaaaagtgatgccatcgtctatcaggaactggtgagttcactacttaacctaactaatttccattcgtataaagtagaagtttatataaacgactcctttttttctagttgggcttggctgctgaacaagcttcacaaagcgaggttgagtccgcgccgaagaggcgcgaagatgacatcctcacaaaggcgctcggaaccaaagaacatcctagccgaactaggggaattggtagcgatgtgccctggaagcatggactcccgcagtacagctcccaatacaggaaacggaaagtctccaaggaagagaggggcgctcgtttgaaggccgaatttaaggttgaggtcatccaagaactagaagctagcatgaacgctatggtggaagaaagggttaacaaggtcctcgccgacatgaatataccccgaggcacaacacctgctgtgcatccaactccttgtgcacaacacgacgcgagtccgtcacagcataggagtagttgtgcatccacagaggtgccggcccctggtctcccggtcgcaccactagctgcagtggaccacatagaggtaattgatgttatccaatccatatctaataaaaaaatctttacacgttccaatattaaattcaaactttcacatatgcagggcatagcacagtgtgtcctactggcgagggtccacccaactttcgctcccgaagtcgctaagggcatggctttcaagccctcggttacagacaaggtccacggcgcagacctgctagctaggtatgccaaggtgtccatcgatacagtaaaggacacctggtcaggctatccgctgcccgtgccccccaatgatgaaatcatgactttgggcgatgcgcgcaagacgttcatacaatggcccaaagaagacatagttgtgaagatgactcctcgtccaagtcgaccgacggagcttacacctcccaagtctaagctatcaattgaggctccccgtggaccggcattgtcagtacctcattctcctggtggagctgatatggacttggcaaatatagctcaaagcttggctccaataaagaccacaagaaaggccgatagctccccaccacttgtcaaaggcaagaagcgtgaacgcggcaaggggaaggtcggggagttggcgccggagccaaaaaggggcaaggctgcaacgtcgatgccgctgagcaaagcggggaaggccgtgagggcgccagcccaatttgagctaggcatgccattggtggaggacaatgtgttagccatgatgggtattgcttgccgagagctacataagcaatacatggagctaagcaatggcaagcggaaaatgagggagtcatccatagttggacatcacgaccaccagccgttcctatcgtcgcctgcctatataactataggctttgatgacctctttgaccttttcaggatccgaaagttggacactggtcttctaaaatgctacaccttgtaagtgcataccttctatacttgtgatatgattggactatatctcct

SEQ ID NO: 5996 - DNA, 834 bp, Oryza sativa
ttttttgaggcagggctacggtttccctgcaacgtgttgttgccggagatccttcgcctcttccaggtggaacttccgcagctgagcccgttggcgcttgtttggatcgctatcttcgactaggcgtgccggatttccaggtttcagcctaacgccgagctcttcggcgccatatttttcgccaccgtgaactcgaagacggtgcgtcccagctggaacgaagaagacagtgttcgggagcgtgaactttaacgttcgtcccgagcggtccgatctctggccggtaaacgctgccatgtcgaagtgggactgccattggatggctaggtggttctatcacaccatccccttcgaggctggcactgactcggcgaatgcccaccgttgccgacgtagggcgatcgcgcctaaccggaaacccaagatcaccgtggacggcgctatggaggcgcggttcgttctgctgcggaaggtttgctcccgccttagctgccgtgacttattggaggaattctgtatgcttcgcatctttcccctctcccagtcatggcaagtcagagttgatcaaggcgaagaggttgacggtttgccgaacctggttcttcctgaggggacgaacagtaagactgttctcgtgctatacactgttgtgctttgttatcttgccttatctgactgttaacatagctacacactttacttttgcagcgttgaccctcgaccaggctgaaaacgaggcccgcaggatgatcggcgacgtgtcggtcatcgagtatagccagttgctaacacgacaagaggctgggcgggcgaaccgggtttacaacggcgaat

SEQ ID NO: 5997 - DNA, 3952 bp, Oryza sativa
agaaaaaaaaacaataataaagtcattcggataatatgctggctgatgtgatccctgccatctatttcatcataaatggaaaagattggtatatataacatgtgtaaaaaccgctacaatgacactgagccatacacaacattagcaactgctatattctcaaccgtacaagcagttataatacttgaaatgaaataaattgatattaatgttgagatatcgaccgtaccacacaatattctgccagctcagtttccctttgatgctctcaacctactgacaattctgaacttttactccaagaaaacgtgtgtcatgtccatttttgctatttatggaggaccaaatatttatgacaaagttaattaaggtttatgttaacacaacttaccaaaccttgtggtttaagataaatatttacactggaggtatgggtcgccaaataaagggctattgtttttattgttataaaagcaaaaaatataataatacgctaaacatgttggttatttttcgaattatacctgcttggactaaaaagaagagtgactcaacttgctaatacttgattccgaattttgaaatttttaaaacactaaaaagagtccatgatatttttcgatcgcttgttttctttaatgcaaactcccaacatgttttcggtgatgataatccacgtcatcagtggatataatccctccgtttgcatattacaggacgtcgatcggtttgttctaagtgaaagttcttcatgctagaccaaatttgaaaaagaactagtaacatctgtatttataacggtccatattccacaaggcaatttccaaatttttggtccacctgcaatttttggtaaataatttactgttttgaattagcaattttgtttctttagaacatcaattttgttcaaaattacccgatatgtgttcaactattaagtgttccgtctcaaatgttgggcccatccatcctcctgaaatgtttgcaattttgaaatataaaactctggcatgaatgagaacggggttaagattaggcatatttactatcactgccacagacctccttatcaccaacggttcaaagttgccatttgtaataggcaaattttaatgtaggccaatgagattttgtggttttacctcctacacatgacaacactacaagaaacctgttaatccatgacggattcttgttgacggattctaagactgtcactggtaggcgcgatctgtgatggttatcttattttcgtcatagatgtgcactagtggatattctcggcccgctaactcgtgacggttttatttggaccgtcacagtttatgattttaaattcgtcatactctagttagcccaaagcaataaaaaataaaacatatttagcgcaaagaaaaataaaaaatgtgattgcaagaagaatcaaacccaaaatacgatttgttaaatttgaacaaaataattttgttaatttgttacatgtatatgatgcataatatggcaaactaaaaaaatatggtgcgcatgggtaaaatctgcagcatgtgggatttggacccacaacttagctggaaggtaggaacgtgtcttaccatttgaaccacttgttctagatgtcccaatgtgcacttaaatatttttatttgtcccaatgtcactcgagagttggcgtttcaaaaatgaaaagagaactcgaattggtaaattacccatgacctcttgttgaagataacccatcctaccactgcgctagttgtctggtgtgttacggtaggattctataatttattatagttgaagcaaacgtcatagatttatatattgcattactagaaaaaatatattaaaggtttaaacaatttaatcaagtgaattaacgaggaaactaaaatttttctttaaaaatcattgccgcaattttttttaatattctacgtggtctaaatttttttctgaaattttccataaattttcggagcgcaataactaattttaataccataaagtttatttaacttattaaaataaataaaaaacaaattaaaatccctctctatgtccttgggcctttttcagcccaagtgttactcactccctcccatagtccgtatcccctctctctccttgggccggcttccccttcccctccaccttttcgggccaccggcccagcccatttgctcatctctcgctaagaagtctatttttcctccctcctctcaattaatttcaaaatattaaaacttcgaatcgatttttatggcactaaatcaactcgtataaaccagcaagaaaatcaactggattaatcgataaacaatttagttgacattatgtccttacaaccttcatttggaagtatagctgtctgcacttgcaaggaagtacggttatgaagaacgaaaatttagtttattttagactgaagattcaagagagaccagagttcatagagtcgaatggagaatgatcaagagcttggccgagttaatcataacgagtttgatcttgattaattagtctggtccaaaaaatgggcgaattgcgttgagagcaaatcaggaacaacgccagctatgcataaaggtaaaatatgacacgtaccaaagaacatgaacaagctgacctcgaacaaaagtacagaaggacgactattaagtggggatttttgcaccattcaaaatcagaaactcaaattcaactttagggcaacaaatttcagccaatttaccaattaattaaaaaaatatccaacttttaaataggagtggcagtgtggcacctcgcaaatgaatacattttcaacttgattctttcgtagggatatttgtgtatgactgcacctgccagaattcaaactcagtatcctggttagtgtaaaggctgaaagttcgcgaaatgaaaatttttaggtgtcacatcggatgtttgaccggatatcggaaggggtttttagacacgaataagaaaaataatttcataactcgcctggaaaccacgagacgaatcttttaagcgtaattaatccatcattagcacatgtaggttattgtagcacttatggctactcatgaactaattaggctcaaaagattcgtctcacaatttcccctctaactgtgctattagtttttcttttaatctatatttaatgctccatacatgtgtctaaagattcgatgtgatgtttttgaaaaaacttttgggatctaaatggggccttatactatttcctgtgtccaagaagttactcaatagacatttttcagaactatagaatatgatatttgccaagcaaagaaaaatgacctctggtgttccaataaaacagaggttgcaaggcatcagtcacacatctatctataatctatcatctatttataactatctaattaggcactttctacgagctcccatgttaattagaaagatcttatcgttaattagatagatcattttatcaccaccgttagattgaatatattatattaaataaggcatacaattaaataaattatgggctcattagtttaatgtcaccaagttaatagtgttgttttataatctcacgtatttcactggtgcggctgatttgggcgccgatctcaggattcggccagaagaaaattaaaaaaaaaggaagtctaacatggatccgatctaatatatctactccgtctgttctgttcgctaatgatggaaaaaactgcgaccatggcgccaccacaccgtgatttttcacttttgtgggctgttttaaaagcctgtcaaatcttatgtccaagggcacacatcaataatctatcttagatctatcttggagagtattaaccaatcagccaggcaaataaaatatggggacacgaggccacaagtggaacgagattgatttttccgtcaatcaaagattgatttttgtctgagacgacacagatcagaattcatccag

SEQ ID NO: 5998 - DNA, 1464 bp, Oryza sativa
acgtcctttcttgttcattattattgccagaatgaaggtgcacacttcgcctctgatagcggggggttgatggatgagatcttgaggccagctctacctttctgtttaataaacaagatgttagcacgttttgaatagcaatgttggtattgaaatgagcttattcgccattagcaacaacctcagggtcaaaatctttcacctctcttagaagtgttgacatgctgtggcacacgtgaaaaccacattggtctccgatctgttgtgcgcatgcgaacttggtgtcatggtaaagttcgtccttgccctccttgtgcctaccacccttttccacatatgggccccaagccatatttaaggccttggtgatttcagtgaaatcataatctttggacttattggagttaaggtaggtaaccctactccacttaggtacaatgactaggagaatccaatgtcgcctgcgcagtggttatgtagcattagtactaagaaccttaacttcaaaaatagtatacacgaagggtattggcctcttactcttggttgtgtgcgcacatgatgtactccttgtcttgatgggcccataaacaccttagtgaagctctgttgtaaattaacctcgttcaccatggaaggatcaaagaacccaacctgattaccaaggcgacgactcttgatccaacacaaccttaaaacatttacgtattagaactaatttaattaggagatatagtccaatcatatcacaagtatagaaggtatgcacttacaaggtgtagcattttagaagaccagtgtccaactttcggatcctgaaaaggtcaaagaggtcatcaaagcctatagttatataggcaggcgacgataggaacggctggtggtcgtgatgtccaactatggatgactccctcattttccgcttgccattgcttagctccatgtattgcttatgtagctctcggcaagcaatacccatcatggctaacacattgtcctccaccaatggcatgcctagctcaaattgggctggcgccctcacggccttccccgctttgctcagcggcatcgacgttgcagccttgcccctttttggctccggcgccaactccccgaccttccccttgccgcgttcacgcttcttgcctttgacaagtggtggggagctatcggcctttcttgtggtctttattggagccaagctttgagctatatttgccaagtccatatcagctccaccaggagaatgaggtactgacaatgccggtccacggggagcctcaattgatagcttagacttgggaggtgtaagctccgtcggtcgacttggacgaggagtcatcttcacaactatgtcttctttgggccattgtatgaacgtcttgcgcgcatcgcccaaagtcatgatttcatcattggggggcacgggcagcggatagcctgaacaggtgtcctttactgtat

SEQ ID NO: 5999 - DNA, 1616 bp, Oryza sativa
ccataattattgtgagaggtgtgagactaatcacgaaaaacattgcttaacccgcccataaccgcgggcacggctattcgaatagttttactctggccagaggtgtaccactgtacccacaagacacagcctcaacatcttgtctaccatgcgtcgcgatactggaaagtacccgaatagaggctgtgacaataccctctgcacaacacaactcaccacagtgcaccattcctggatcataatcacccccttataaaacaaggcatggactccccagcgacccccgtgggcttatctccgccacttctcagtctggtgctccgcaatgaaccatgctatacaaaaggtaaaagccgtgcccacgctggcttgtggttggcacggttaatgtttcacaatagtagctcgcgaaccggtccttaattgtcatgagcacgactcttaaaaccattatcaagttttagttggcaagtaattaattaaccaatcacgattgaccatcgtgaactatctttaaaccatcattaagtaataatgagtcataagttatcccaataatgtgctaatgtttctaagcatggctaagcaatcatatctaatatctagctgaaccaatatataaagctcaactagtcaagttataataacccaaggtatcaaagaataaagtaatcaatgcaaacaggccataacaaaggaatagattcacaccacccagtgacattcgaaaataaatgcacagttgaaataaatagagaatttaaatataggatcaacatgctcaaaggattgtgtttaggatctgtgtgacttgccttgcaataatcggtcttcaattaatcttctgaacactcccgacgcactcacgaaccttcgcaacgacggaaacgacaagctaacacgcaaaacgaagaaaaaaacttattaaaaccaaattaacagttcatataaagtaaacaaacatgtagatcataattttagatgaattatgagacttgacgggcctcattctgacttcatatgaatttattatgaatttacaagattaaatctaattaaagcccacttaaaaagaattaaataaatttaattctatttatggataactttaatatgtagatctttattttataaaacttttgcaacttgaaccacattaaactgagttacaaagaattagttatgaattttcaaagattaaatcggattaaagcatttatatagattttaattgaattatgacgcaataatgaattatttttgaaaaggaaaaggaggattattgcgtcagcgggtcgggttcacggtggaccgggtgcacggctgcggtctatggatcgggcggccgagatctaccctatccacaaagaacggccgagatctaaacggtctacgatcggtctaaggcagacggcaacgatgacgtcagcgatgacgtcatcaccggcgatggcttgggcggcgtatgctcgccggcgaatgacggcgcgacgacgcaaacggaggacaccaatgggtagagggcgacgcggcgaactcaccgagctcttggacgacgacaaacgacgacggatgacgaccgcggcgaggttgaagcggcggcggtcttcgggtcg

SEQ ID NO: 6000 - DNA, 3009 bp, Oryza sativa
caaattattactaggtataacatccataattattgtgagaggtgtgagactaatcacgaaaaacattgcttaacccgcccataaccgcgggcacggctattcgaatagttttactctggccagaggtgtaccactgtacccacaagacacagcctcaacatcttgtctaccatgcgtcgcgatactggaaagtacccgaatagaggctgtgacaataccctctgcacaacacaactcaccacagtgcaccattcctggatcataatcacccccttataaaacaaggcatggactccccagcgacccccgtgggcttatctccgccacttctcagtctggtgctccgcaatgaaccatgctatacaaaaggtaaagccgttgcccacgctggcttgtggttggcacggttaatgtttcacaatagtagctcgcgaaccggtccttaattgtcatgagcacgactctcaaaaccatgtgctcacaacccaccattatcaagttttagttggcaagtaattaattaaccaatcacgattgaccatcgtgaactatctttaaaccatcattaagtaataatgagtcataagttatcccaataatgtgctaatgtttctaagcatggctaagcaatcatatctaatatctagctgaaccaatatataaagctcaactagtcaagttataataacacaaggtatcaaggaataaagtaatcaatgcaaacaggccataacaaaagaatagattcacaccacccagtgacattcgaaaataaatgcacagttgaaataaataaagaatttaaatataggatcaacatgctcaaaggattgtgtttaggatatgtgtgacttgccttgcaatattcggtcttcaattaatcttcttgaacacttctgacgcactcgcgaaccttcaaaacgatgggaacgacaagctaacacgcaaaacgaggaaaaaggataataaaaaccaaataaacaatacatataaagtaaacaaacatgtagatcataattttagatgaattatgagacttgaacggcctcattctgacttcatatgaatttattatgaattttacaagattaaatctaattaaagcccacttaaaaagaattaaataaatttaattctatttatggataactttaatatgtagatctttattttataaaacttttgcaacttgaaccacattaaactgagttacaaagaattagttatgaattttcaaagattaaatcggattaaagcatttatatagattttaattgaattatgacgcaataatgaattatttttgaaaaggaaaaggaggattattgcgtcagcgggtcgggttcacggtggaccgggtgcacggctgcggtctatggatcgggcggccgagatctaccctatccacaaagaacggccgagatctaaacggtctacgatcggtataaggcagacggcaacgatgacgtcagcgatgacgtcatcaccggcgacggcttgggcggcgcatgctcgccggcgaacgacggcgcgacgacgcaaacagaggacaccaacgggtagagggcgacgcggcgaactcaccgagctcttggacgacgacaaacgacgacggatgacgacggcggcgaggttgaagcggcggcggtcttcgggtcgacggtgacggcggtgctccggcgtgctacagcggcggcgaagcggtggagggggacggcgacgacctcgtgatcccgatggtggcgacggcgaccgacgacggcggctgcaacggcggcgcggcgcggctgaaccgacggcaacgacggcgacggctagggctacgcggaggcggcgctagacgcgacggtgggctaaggcaaaggtggcggcggatagaggagagctcgggggtgcttttatagtggctaggaggcggcgacggaggcccacggcgaccggcggcgagaaggaaagtctagggttagaggagagagatgaatccgaatccaactcaaatcctccggtttccaaagaaaattagccgatgtttccaaaagagaaaaggaagaggagatctcaaggatcatttgccctcaatcaatttgaccggaaatagagaggggcgacggaatttggaagggcagcggcggcggcgcggcttggctagggttcggccgggcggctcgaggaggacgacgaccccgacaggtgggtcccgcctgtcagcggctgagagagaggagggaggcacgcggcggactgggccgactgggccggggagggagagagaaatagagaggttttgggccggctttcggcccaaagccaaaagagacttttaaaaacctttttcgatttaaattattcaagaaatgcgattccatttattaaaaatactttcttggctcaaataaatcccagaaaaatctaggaactaaagattcaagagaagtatttaacaaaattttatctaccccaattttatattgagatttagcaaattaaaattagatcttctcttttaggcttttaagatcatttctaataattccttttaaacaacaatttaaggtttttaaacaagaaaagcttttaacaattataattagatcattaattgattaactaattactgaactgttttttgtatcatttaggaattgagctccgaaaaatccgagaatattccagagagtataattaaccatggagaatttaataaaaattaaatccatccatgctttatatttaggaaattttatttcccacatttaacttcacttgaaaattaaagaacatttaatataaattctaataataatttattaaataatttataaatcctgaaacaaaaatcaggatgtgacaatacccttatgaaacaatatgctcttgagttggttagttcactctctccataatatgtaatagtcttccgttcctgttttagtaactaactatatttgaataatgacaagatatcgatagtatacatgagagcaactaaaagaggtttgttcatcttgg

SEQ ID NO: 6001 - DNA, 1381 bp, Oryza sativa
atggttttgagagtcgtgctcatcacaattaaggaccggttctcgagctactattgtgaaacattaaccgtgccacccacaagccagcgtgggcaccggctttaccttttgtatagcatggttcattgcggagcaccagactgagaagtggcggagataagcccacgggggtcgctggggagtccatgccttgttttataagggggtgattatgatccaggaatggtgcactgtggtgagttgtgttgtgcagagggtattgtcacagcctctattcgggtactttccagtatcgcgacgcatggtagacatgatgttgaggctgtgtcttgtgggtacagtggtacacctctggccagagtaaaactattcgaatagccgtgcccacggttatgggcgggttgagcaatgtttttcgtgattagtctcacacctctcacaataattatggatgttatagctggtaataatttgcttagctcctggtttggagttagttctgtacagccgggtatggttgttcaggatggttgggcctgtgcagcatgggtgtgttgattaaaatttctgattaattactccactgttttacttctcttaaatgttttgctaaatgctgcttttgcaaacgagcctatattatgccatcctttggtatccttgtgcacttgcatatttgctgtgtggcttgttgagtatgtcatatgctcattcttgcaataatcaatcaacctcagttgaagaaaaaggatccagaaggagaagacgtttggcttataccccagttgagctgcctgtgggagtggagctgaagccatcgctagaccgttattccgctgctgttttcttttcttttgtaagtgtgtaacgttattattatgatggatttgtatattaaattgtcagtttgtgtacctcggctgattcctagacgaggattttatgcacaaattagttcggaaattattagtgaatttccgggcgtgacaggggagctgttcgactctaccccagtcttgttgtgactgggacttggggtaggagtgtagccgggggtgtcgacgcggtcttcgatcgcctcgtccgcggccttatcagccacggcctcctcctctttctcctctccttcctcctcgccgtcgcgttcttcggcgtcgtcctcgtcgttggcgtcggagtccgacgaagcaggaacccttcgcttcctaggagcaagcttcacttgtccacgcattcgctttcgcgaaggccctgcatcatcgtcagctttgtgggggtttggccgaggaggcaattcgccgtgtaaacccggttcgcccgcccagacctcttggcgtgttagcaactggctatactcgacgaccgacacgtcggcgatcat

SEQ ID NO: 6002 - DNA, 3362 bp, Oryza sativa
  unsure (1)..(3362): unsure at all n locations
ctgttttgtaccatcaacgattatccggcccttggcaacctttctggccaaactgtgaaagggaaatgggcgtgttcggagtgtatggaggaaacaagaagcaaatggttgaagcattcacacaagacggtctatatgggtcacaggagatttctcccaaggtatcacccgtataggaatatgagaaagaatttcaatggacacagagatacagccggacccccggcagagctaacagggatagaggtgcacaacttagtgatgggaataaccaacgagtttggaaaaaagaggaaagttggaaagacaaaagagaagagcacatcgaaggaaaaaacagaggagcatgtggaaaaaacaaaagacaaaagagaggagcatgtggaaaaagaagtcaatattttggagactaccatactagatggattttgaagttcgccactgcataggtttgatgcatgtcgagaagaatgtatgcgagagtttaatgggattactgcttaacccaggtactacaaaggatggtctcaatgcctgacgagatttggaagaaatgggtgttcgctcggcactacatcccataaccacggaatccggcagggtttaccttcctccagcctgctacactctctcgaaagaagagaagattgatttgctaacatgtttgagtggtataaaggttccatctggttactcattgagaatcagtaggctcgtttcactacaagatcttaagttggtaggaatgaagtcgcatgattgccacgttctctaatatgttcgcaatgatcaatagtatattgctgatgaaatagtcaaataaaaaaattaagtgaagcacccactagaagtgaaataaaataattaaattagtataaccattggaaataaaataaaaaattagtaaaataatgaagtgcaattactactgttagtgaaataaaataattaagtataacaaaaatatatagtgtatgtggaaatatgttaaggaaaataaaagaactaagtgaaataaaataaaataaaattgctgtaggcaaactcacctatgacgggctctaactgtggggccgtcacaggtgaactcacctgtgacggcccatagtttgggcccgtcacaggtgagtttgactagggttgacctagggttggacatcttctagatatcgatccagatccggcacccactctcactcactctctcaaccaccgcctcgcctctctctctctcaatccagatccgccgccctcctttccaccaccgcctcgacctattcaccggcaccctctccgccatctccggcgtcctccccaccgacaccataaactctccaccgccctcctcgacgtcgtcctcttaaccgatgcctcgacctctccaccgccgccgtccatctnccgacgcctctctgacttcatctccgccctctccaccgccgctgccctctctctacggccactgggacctcctctcagtcgccacaccaggaccgtcgtcgccgccaccgggatctcctctccgtctcctcctcagcgccgccgtgccaagaagcctgccgccgcgccaccgtgccgagaagccatgcgctgtgctcctccactgatcgtcgtctcctctccaggtaccgctctctctctgatgccgatgaatgaataaatgatgcaatggaatggatgaatgaatgatgaactttggatgaatgatgaactttggatgaacgatgaacgatgacttttggatgaatagattgttgcaactgttagttataacttgaatgtgtagctagtttgcaacttgaatgtggatttaagtgccattttgacatgtaaccattcatggagtgtgtactgctatatatgttgttttattcccttttgctagacctattaaattttgtggatcatgtttacatttagctgaaaaaggatggattgatagattggcaacagtgtttctagctaggtagggtagctagctagaaatagtttgtctagctagctagttagggctaatgtagttccgaggttatcaaaccatcacaaaatacaaaatgcatggggaattttggtggattggtcaatgtaatccatggaaggaaccgacctagacaccaaaattctccacgcattttgttttctgtcattctttgatgattaaggaactttgcagattatctaaacttgttgatttatatacccatttgttgaatgcattttgtagatgaataccctcatatacaaaatgcattttgtagttcctttgttgatttatgttcctctttttatcccttcatgcaaatgattgtaattgatgcatatttctgagcaaaactgaggccatatctttcatagtataccccgtattacattggatctaatgctatttagtataatggtaggaaatttataagctttttcgccaaaattagaccatgacaacgcccggcgcaaacccgcctccccaacacctgcgaggatccaggaagaagcaaacccagccacggagacagttgccgaaggtcatccctcgacaacggtggtcgaacaacccgaaattcatggtaatttataggacaaattttcaccacatgaccacataaattttagctagcaccccttagcaaatgttgccttctgtttgtgctgcagaattgccgcaggaacaacataaatcgatgttgggcgggacaagtgcaagtaggtcgagtagaaatccccggtcacaaaatatatggccgaccacagtgcaagttataagagaggttgacgctagtggtaggcccacggcgcccaagactgtcattggaagatggtctaactactgcgggctggcggcacgtgagaactttgggatcctccataaagatatcggcaaggtcacaaaagccgagaaagagcgagcttggacagcaacggagaaatggttcacatttccggctgaagcaaaggataggctcaagtggaaggcattccataagatgggtaaagcttggaagaattagaagtcgaagctcttcaccgagtttgtcaacccgcccggcaatcatatgtcgttcgatgaataccctcaaataaccgaggcggtgtgggaggaattttgctctctcaaaaacacccaagagtttagggaatcaagcgagacacatcgccaactgcaacaacgaaatgagcacccacatcggttgggcaccgcagggtacatcggcaaggaggcaatatgggcccaagaagatgcagccgctgcagcagcgaatgtccctgccccgttttcagacatccctgaacaaggagctcgcaactggtcgcgggcaaggggtaaggtcaacccggacggctctgtcacatttgagaacaaaagt

SEQ ID NO: 6003 - DNA, 3213 bp, Oryza sativa
tgattgccccaaggggttcgacttcaatccatcgagagaaatattccacagctacaattgcgaatttatacccgtttcgccccatcgggaagggcctaatgatgtccagtccccatctggcgaagggccatattggcgcaatgggctgcagatcatactggggcgcggcttggcttcggccatgacgctggcaactttcgcacttcttgatttgctcaacacagactttcaacacagtgggccaataaactccttgtctaaatactttggaggccactgttcttgcagcctggtgcgcgccacatagcccctggtgtgtctcctttgccatttcttcaccttcggaaaaagagatgcaacgaagtaagggttgaagtaccccggagcggtaaagctgacccgagaccatcttatacttcgtggctctgagttgcaaacgcttcgcttctgcttcgtctaccggaagccagccagtttgaaggtgtttcacaaatggggtttgccagtcatatgagtcttcgcccagtttctcctggtcgattaccatgacttccgagctgtccatgggcacacttggagcatgtaggacttcgaaaaagatgccaggcgaatgtgggccaccacaagcagcggatttcgccaaggcgtctgcttcctcgttctggtctctaggcaagtgttcgaccgttatgccggtgaagcatttttgcatggaccgaacaacctccagatacctcttcattccctcttcttttgcctcgaaggatttgtcaacatggcctgctaccaatttggagtcagtttgaattagcaggcgctggactccctgtgctttcgcctttcttaggcccaggagaacggcttcgtattctcctgcattgttggttgtgtcgaactgcagtcttgctgcgtaccgaatcggcacaccattcggcgaacataggactgccgcaatgcctgctcccctgtgcgaccacgagccgtcagagcacatcacccagaattgttcggtgggctcagggtcgggggcaagtaccggtgtccattcagctacgaagtcggctagcacttgagacttgatagcagagcgtgcaacaaaatgtaagtcgaacggggatagctctgtcgcccacttgctgagccggccagtgacttccttgcctcggagtatttcgctcaaggggtactgtgatgggactatgactttgtgggcctggaagtagtgcttaagcttgcgcgaagccatcactagggcgtaagcgagcttttccatttcaatgtaccttgtcttcgctccatgcagtgcttcggagacgaagtagaccggtttttgtccgaacccttttcgcctcccgccctgtttaccgcactttgctgcgggtacggtgtggcgaaggccaaaatcgcagcttgtgcgtgaggttgggccatggcattcgactgcccggctccaactggacgtacttgctgagccgccatggatgggtcaaaaattggctgcgaccacgtcgtggcagcttggattggtgcttggtttgttccgaagcttggagttcgttgccgaacggttggtgcctgagcagcattgacgaagtcaaactgcagtccttgattccatggcgaaactcccaggcccggctgaatcggtggcaaccaattaggcgcaccttgacttgtattcccctccgggtgggccgatggggttgtgcttgaaatgcagtggggttagttgagttgctgaaggaaagcttggagttgcgcctgcagagccgaagccccttccgccactgtttgtggcgcttggccaggtggttgatggtgtacttgggcagcgactggttgagcttgcagttgcatgtgacgggccggatgcactgctgcggccgattgctgcccggtgaagtacactggcacctgtgcggcttgtggcggaatgggctgggtcgtcacttgcggatggacttgaggtgtgacataacctgccgaatactgaaggattggagccgacgtggccttggtccgccttgccgcctcgtatgcttgttgttgttcttgcatttggcgaagcatgtcttggagccatgtcatgttctgtcgcatggcttccatgtcggcttcggcttgtgtttcggggtcagggctgacttgggcctgcacaacggcgagcgcagttggggctgctgccggctgcgatggagtggcttggggcaccaccagttggcttgtcgaaaggatctccgccctaatctggagtgcccttgccgccgcagccgccttcgccacgtcggccacgttcggcccctgcaccggacctcccttcgccgccttgcccgaggagaatgcaactagggccttcgccccttccaaatccttctgtcgaaggggggatgtcacatcctgatttttgtttcaggatttataaattatttaataaattattattagaatttatattaaatgttctttaattttcatgtgaagttaaatgtgggaaataaaatttcctaaatataaagcatggatggatttaatttttattaaattctccatggttaattatactctctggaatattctcggatttttcggagctcaattcctaaatgatacaaagaacagttcagtaattagttaatcaattaatgatctaattataattgttaagagcttttcttgtttaaaaatccttaaattgttgtttaaaaggaattattagaattgatcttaaaagcctaaaagagaagatctaattttaatttgctaaatctcaatataaaattgggctagacaaaattttgttaaatacttctcttgaatctttagttcctagatttttctgggatttatttgagccaagaaagtatttttaataaatggaattgcatttcatgaataatttaaattgaaaaaggtttttaaaagtctcttttggctttgggccgaaagccggcccaaaacctctctctttctctctccctccccggccgagtcggcccagtccgccgcgcccctccctcctctctctcagccgctgacaggcgggacccacctgtcggggtcgtcgtcctcctcgagccacccggccgaaccctagccaagccgcgccgccgccgctgcccttccaaattccgtcgcccctctctatttccggtcaaattgattgagggcaaatgatccttgagatctcctcttccttttctcttttggaaacat

SEQ ID NO: 6004 - DNA, 17695 bp, Oryza sativa
ccaaaaataccatcgccgtcaaggtttcgtccattttgcgccattaaaacacactgttcatcatatagaacttaacagcacggaatggacggaaacctaacggcgatggtatttttgagacaaagtcgtttgtacgatggcatttcttgaaactcacacttgtcgatggcatttctgggatttgaacgcttgtcaatgatatttcttggattatctctataatcaaagagtaaataattcaaccaaccaagtggatttaatgaaaaataatggcatatgtggtgcataatcctagttgataatacacaaaacaaatttaaaacgcttgaaaactacaaaaaaaaaaccataaacagcatgaagccaaaggtattgctcataagaaaagagcacacatatgtggctattataaaaacaatggcagccaactgcattataaaatatatgctaaacagttcttattctctactattataaaatttgaagatgtttttgccagtagtttggtacatcatccgtgtatgagtcagtttttaagtttgttcgcttttgaaaatacatatctatattagagttggattataagtttgttcgcttttggaaatactttttaagaaatctttttaaaaaaactcgcatgctaatttgacatgattttctagaaaaatatatattcaagcgaattctcacagtgaatttcacagtgagtaataataagattaaatagcattcacccgttgtaacacacgggcacttttttctagttaacttcaatatagaaaagttatagtataagctgtaaagttcactgtttgcctcctctttgaagtgcattataccaacctttataaaaaaaattgtgtaattactaaaaagaggatttgaaaggtattggacacgtatccactcacatagtgcaaaaactaatatgcttaaaccctaaaggacacgtagtaggccacacctgaaaaatgggttttaaattgccaatgggcctcaacccaaagatagccatttaacgatagccttaaaataatcgcagcgccgtccgtcgtcgtcctcgccagttcatcttctaaaatttcccctttcgtactcatattaaccgccgccgccgccgccatcctcaaatccagagcaagaaaagaaacctaatccaagttcccactcatttcacctttgacaaaggagagagaaatcactttcgatcatagggtagtttcatatgtcaatgagattaccttgaaggaagtggtgaaagaaggcgtgatcccggcaaaagaaatcatcggatggcgtccagcccatggtgaggagttcccgactccaaacaccatcgagattgtggtatttacccctttgttctctagtagcttctgtcttccgacatctaaattcttccgtggtcttgtttacttttatgggagtaagatatatcatcttaaccctaattttatcaatcactttgccatctttgttcgtctctgcgaagtatttcttggaatccatcctcatttcatcctcttccgtggaatgttttacctgaaagcccagtcgactaaagaaaacccttgcatcatcggcagctcttgttatcaactacgtggagctctccgcaaacgcaaagactatttttcccttcttcgaaaacttgcaagaaaggctggcattcctgtatggctaccttaaccaccgcggctttcgtctcgcacaattaacatgtgtccagagatgggcctagcgagcaactcaaaagctagctcgagctgcctcgttctgtctaacaagccaatcccatcgcacagcttgcgagcgattctaaacaagcctagccgaatgagctaacgagccagttatttttccagccccagcctcagccttactctccatggttcgatcgtgtcattgcttatcctgaaccataataatgttctgatagttttctgctcattcccaacgaattgggcgtgccaaagagcactgtattacagctttagcatttgcataatatgccaagatctgtggtgttgtagaggaggagaataacaatatctacgcgtgacacccatccactactatagaaaagaccattggttccggttgggaacaggccgtaataggcgtcagatttctcaactggcacccggtatacggtgctgatgacttcgtcaacaataccggttatagaacttccaaatgaaactaaacagcagtaaaggatgatgtcgacggggggctacagcattgccacgacgaaagcatccaaaagcctctattaacgatgtgcacatcgcttgacacactgactttaccttctcgggaacgacacaattcgaggttttctgatgagtcgtagattctgcttaggcatcaccggactcaaaaacatttgacatggagcactccatcaaatctgaggagcacaaattgcaatcctgtcgccaagagttaaacaggcggtctgcgttcaacccgaacggagtgctcaacattgttactgctacaagtaaatttagaagaagtccccacaatccagccaatttcaaacatggtcatatttggatggaaacaaacttctgcattgttacatccagccggaacataatagaggaattttttttaagagaagcataatagaggaatttgaggagatgacctgcaagtgtccccgacgactcatatctctgcatgcctggcctcaagcatcaatctagcatatcctgcaagaagcaagccttggaatctacaccgtaaaccaacgctagcactccaagtataccagcatattaagttgtgatccaaattcatttgtacataataaaggctagcttatgccggagcgaagcgtagggtttgtgcatttggggatgcccgggcccatcgttatcctttagggtttcaccttcatatataccttttgtaagccgttgttcagctgtaacctcatcctaatatagtgaagatattttgatggctggcacccgtggtgttttttcttctgctttggagggttttccatgttaaatctcgtgtcttctgtcattgatctattattatttatcgtttatttgcgtatcgttttctaacacctttgtgttgcaggaggagaagaacaatgaacacgtgacaccattcactgcataggattcaggccgtgttaattaaatttcaacttttttctacaaacttctaacttttccgtcacatcaaatgtttggacgcatgtatggagcatcaaatgtgaacgaaataaaccaattgcacagtacgactgtaaattgcgagacgaatcttttgagcctaattacgccatgattggacaatatgatgctacagtaaacatttactaattaggcttaaataaattcatctaacagtttatagacgaaatctataatttgttttattattagtctatatttaatacttcaaatgtttgtacatatattaacatacgatgtaaacacagaagaaaagggagtatactgcatggtggataggaggcgatacctgaccgaaatttgtcaactcgactgtcaaataaacagtatatctttgacgtttcttatacgcgtgagattctttatttcggccgccaggcgagccgatctgcttctctactagtactactggtgctacattcttactgaaggtgtgtttaggctgtgtttagtcccacgctaaaattagaagttcaactaaaattaaaaatttaaagaaaaaagttaaaagtttatatgtgtagaaaaattttgatgtgatagaaaagttgaaagtttgaagaaaaagttaggaactaaacaaggccttagttcacgtcaaaatggaagtttgattaaaattaaaacgatgtgacgaaaaagttggaagtttatgtgtgtagaaaagttttgatgtgatgaaaaatttgaaagtttgaagaaaaagttgggaactataccaggcctgagcgagtaatgctacattagtactattctctcgaatctatttatctattaaaatactttctcgtttctaaatatttaacaccattgactttttaagcacatatttgatcgttcgtcttattaaaaataataattacttaatttttttaataagacgaaccgtcagacatatttaaaaaagtcaacggcgttaaatatttagaaagggaggaagtattaagttaactgggagatgatattgattggatccagagaaattgatgctccaaacgttcattctcagtgttagtaaagtaatgaatttaatggatggcgtgatagtttcagctatatatggaccttatcaagattgatttgcacagtacaagattttggatatatataattatctcaataatagtatatgctataaggagcgagagagatattcacaagcattggttgatggtaacgtctaacagaatgctgccttgtattggcaaggtacattcttttcttttttaattaatcatccgtatgttcaatttgatttgcatatacgtatatgctttaattggagctcatcctaatatttctattccgggattgcctcggtatataagaatcaagtttcaacatcacaatatctatcaagtgcttattactctcttcatctatctcttcatctatttttgataggcatatttctaaatctgtaaaaaaaaaattgataggcatatttttaatccaaccacctgtcctcccaatgactttctcgaatttaatgcgtgactcttcattctttcacgtaagattggctacatggatatcgaaaaatgtaaatatcaatgaatcgcttatttacgaggaataactagtagcatgtttaaatggatgatatgtagaatttcttatccttgatcattgtattacgatgaaatatgactatgaaaaataaatgatcattgtattaagatggaatatgactatgaaaaataaatagagggagtactaattaacttgcttccataacccgaataaatgtcatcacataacaactgtgtcagagcatctttaatggcccacaacaaaaaccatataaatcacgccacataccccatcaaataaaaacttttaagttactcgggggacaacatccacttatttattatacatgctaaaatgaatataaaagaattgaaaagatatattatttgtacttcgtaatattccacttaaaaaatatgcaagtttttttaacttgagcttctaataaaaacaacatattgtaccatatataaatatttatatatacaagttatagtttaatttattttttaattgaaattaaatctcgtagtgatatatttcaagtaatatatatttttttagatttttaataaccacttagttataagatgccataaaaaagtggaccccacatccatttgtcgcaacagtcaaacctcagcgcaacgatcttatgatcagcatgcaacacgagaatgctttacgtccacactgcttacactgactgacacatcgacgttgccacgcacatgacgcatgccactactcatcgccaacgtccgatatttcgtcgtcgtcgtcgccgccattcgcagcgcctcgcggcgacggcgagcacaccctcgccgccgtgaacaccttccccggccggcagaagtagcccttctccggcgcgcagtgcgagtcgtcggagcacacgcagagcccctccatggcgcagccgtcgccgacgatgaccgggctcgccccgccgacgccgagcacctggtcgctccactcgctggagaagacgccgtcgggatcgaacctgtccttcaccctcatgaacttgccggcgttggggtacctggcgatggcgccgtcgaaggcgtagttgcggttcttgccccagtgcggcacgccgccgtgcttgcgcagcgccatctgctcgacctcgtcgaacacgtcggcgtgcgcgcgcggcgcgccgcgggcgtagctccggtagtaggtgacgtcgaagtccaccgagtcctccgccttgccgaggtacgccgacgacgccgcgacgtagcgcatcagcaggcccatcttggagtcgatctggcagaacgccgccgggttgaggtcgcggagccgcgcgacgtcggcgacgaacgccggcgcgcgcgacagcgcgatgctgaagccggagttgtagaagaggtgtccccggaggcggccgttccagaggcaggtggaggtggggatgtgcccgtcgtcctccatggcgcccgtgcacaagctcgacgcctggatgcggtgctggtagcccaccaccgggtaccccgtgaaggcctcgccgtcgttggtgagcccgtagttgaggtgctcgagcgtcgccggcatcacgcgcgacgccgcgcaccgggcggcgtcgctccctgatctctcctccagccactcctccgcgagcctgctggcgacgaggggtagcgtcggcgtcggccggaacgccgggtagtcgctgcggccgtcgccgggcgtcgcgacgtcgacgcggtcgtcctcgcggtacacggccacgcgccgccgcggcagccacgccacgtcgccgaactcgtggaggcggccccacgcggcgaccgtgtcggcgacgtccgagtcgttgcgggtcacgaacgccaccgaccgcttgaacagcggctgcagctcgagggtgacctgggagatggcgccgaggacgccgagggagaccttggccgcgtcgaggtccgggtcgccggcggcgagctccctcaccgccgcgaacccctcgctcgccggtgccggcgtcacgatcctcatccccaccacgtactcgtgcacggcgctccccttcccccacagcgagctcccgtgcgcgcccgtggcgagcacgccgccgatcgtgaggcccgaccagtacggcgagtgcggcagcgcgagccccgccgcggcggcctccctgatcaggtcacgcatcaccatgccgctctccaccgtcatcagccgccgcgccgcgtcgacgcgcaccgcgcggtccagccaccgcgtgctgatgacggtgccgtcctcgccgccggggcacgccagccgcgggaagctgttggagtacctggtggcgaccttcaccttccgccccgccgccaccgccgccgccacggccgcgacgagctcctcctcggtgcgcgggtacgtgacgttggcggcgcggcagatggcgcggtcggagaaggagccgtagatgttcgtcagcgtgcagccggacgtcccgttggcggcgcagaccaccggccccggcggcggacggtcgccggcgaggtgggagacgatccacagggcgagaatcacgaggaggccggtcagagcttggaggagaatgacaaggagacgtctcaccattgttgcttaacttggtggaagctctgagtttgacctggaaagtttgccgggtagctgcagcttaaatcagcaagcttcagcttgcccacttcatttctgtcggtggaagcatcagaattcagaagttcaccagatggagtactattaatattcagaagttcaccagatggagaggaacttatttccgtcttgaggccagaaccttctgcttgaaacatttaataaacggagaagcgttactttgtacgcaaatcgtacacacaaaatcgtacgaaaatcgtacacacaaaattgtgaataatcgggaggaatccctttttcaccggttctgggactgcccatttgctaggtggatttggcagaaattggaagagcatcgaggtgaggacattccacaaccgccagctgaatgcagaaacaataaaatcttatctgtttggctactggatcaactatcaatacagacacaagaaatctcttcagtgctgttagttacaatctacattatgtggtcagcacggaatgatgcacggaatcaacagatcccaggtaacccagacaggatggtggagagaattttgttcctcctggaagagtgggcaagtttgtttgaaaaatctgatcatactgttcctagtccgacaatgcactggaggttgccggaatcaggatggattaagctgaattcggatgggggatttgctgcagacgaacagatgggaagtgggggagtgatagcgagaaatgatcggggtgagtttatgggtgcgagcaggattttcttcagggaagtgttaagcgcaacgcatgctgaagcattggcttgcctcgaagcgacgcgggtgggtgcaagacttgcagcaaccagagtagtcttcgaaacagactcagctgaagttgtgagtttggtgatgaataaaagttttgatcggtctgaaatcgggcctgtaatccaagaactgaagaggagaattcagtcattccaggatttcaagctcatatggaccaggagatcggcaaataaagtggcgcaccgtttagctaaggaaagccttaacgcgcgtgcttcttctagctggatagtgtcagcaccggagtttttattttctctgttatcagaggactgtaatctggatgctgtaatttgagtttttctttgctttccactctcaaaaaaaaattgtgaataatgggaaacaaggttctgagaagataaatggctcggaaacgtggcttttaaagacaaatatccatctttatacgctattgtcagaaagaaaagttctactattgtcaatgttatcagatctattccactgaatgtttcctttagaagagttttagttggtcagattcttgcatattggcataaattgtgtgcgtctattgtacatattcagttgaatcaatcctccgattgttttagatggaattattatcagaatggtagattttctgttagatcaatgtatctagctctgattaataatggttatattgagagaaataagattatttgaaagcttaagatgtcgcttaagattaagatctttatgtggtacttgcttaaaggagttgtactaactaaggacaaattggcaagacgaaattggaatggcagtttaagatgttgtttttatatgaaaaagacaccattaaacatctttttatagactgccattatgcaaaatttgtttggagagctgtacagttctcttttggtttataccttcctattaccatatctaatatgtttgatagttagcttttgaggtagataagaagatgactaaactcatacttgtaggagcatctgccatatgttgggctctgtggttgagtaggaatgatatggttttcgacaaatcaccatctatatcatatatgcaggtaattttcagggcaacttattggctccggttttgggcacagctgcaaaagtgtgaagatgatggagagcttatgaaagttgcatgtcataggcttgagacgacggttatgcaactttttacaaactatggatggagatttacaaacagacttcaataaatgtgttctccttatctttgtttggtctttttattttattggatgtgtttaatttcgtttgaactacatcttttgttagagtgatactttgtaataattggctgtagctctgatgagcaaaggccgggatgtttattccattatctaaaaaaatgtatagcggtcctctcaatgctagacacttaattacactcgctcacttattatattgctggagtccaaaatactcgctgatgtatccctctgcatttagagtttgtttggttcttggccacgttttgccaaacctaagcttaggcatgcaacaagtgcttaggttggtgtttgcttttctactaaccataggcttgccttaacttgataggcatgtttctgcttgctcgctgtgtcttgttttgccaaatctgtggcgttctttttctctgccacaagtgcggcaactagcttaccttaggcgtggcaattttagtcccaaaccaaacaggcccttagtccgtccccctaggctcctagctatctctcctaatcctatatgtgcactttgtcatttctcgtgtttgcatgagcgattggtgttttgagttgatgttttatttatttctctatcaatgagataaggaaaatcttttatctatgtttggaaacagtagcatgtactacggaattgtctattcatcacttgagggaatatccattcatttttttaaggtctatgtgctacaccatatacgagttatatgactaggtctatgtttcgcaagaatattatattgcttaatgcctcaatggcgcatagtgcagtggtcctgtacctttcaccatctgttgaaaaacatgaaaattaatactaaaagaccagcttaagttggcctggtttcaaaaatatatacaaccaggcttgtctcaatgtaatatatatgtttacccactcagtatgggtgggcgttcagtctggaccggaattcttcattcccggttattcggtcattcagaactttggtctttcgaaacagaaaattgaggtaggcaacaaaaaatatggttgggagtgatagttcggttaaccggatagtctgtccggccttcggtttccaccgaactaactgaagcgatggtgatggcaatggcgcccacggcagcgatgacggatgggaggatgctagtggcagcggtgaccctaccctccctctctcatatccggtggtggaccgacaacggtagcatcagcagagggaacgaaagcaacgacccttcactcctctcccctcctagaaccaagcttcgggtgcatcgtctcgtcgacggcggctccttcctgcctcgaggtgctcttggcaacggcagccatgatggcatcgacgatggcgacggggggcggatctagtggcggtatggttggagaccaccggtagtggaaggagtagatggggcaccgcagtggcttccccactcccttccgcttgcctccctctcccaaatctggctgtagggggcgactagggtgtggcggcggcgatagcagccgaaggggttggtttcggcaatagctcgtccacggcagcttcagcaacctccaaggtcaccgatgatgacgacgaccagttttgatgtttatttgcatgatatttcatttgcatgtgttaatcttggatgtcaatttgaatctagatctctgaatgttgattgattttttttttccttagtgatgttgcctataaaaattaattttctcaggtgatcatcttaagtgtttgcaaacaaaaaatctattttcgtaagcggatcgcaacactgctagtcaaaatcatttattttcaatagcctttaggtaattagcggctaacaatgccgtcactaaaagccgctatcactaaaaatcagttttgaccgccgagaaaacactttatgaagtgtacaaccatttactctccccgtcctaaaatataggaaccttgtactgaatgtgatacatcttagtacaacgaatctggccagagaccctgtccagatttgttgtgctagggagtgtcccatttagtacagggttgctatattttgggacagagggagtagaaaaccagtcgcatgtttatctgaaccaagctccatacattgagggcggaatatatataatcgattgggagctttctattaagtcaattagatcaatcacaatcgcagggttgagtagattaatttatttgattattctatactatagaagacaaattataatcatttttgttgtcgaaatgataactgcatacgtcgaaagacgtggttactcaacagtggttggaaggaaacgaagtgtattgaatcttgaatttcttctttttttctggatccccccattacatggccctaggggactatttatagcccaattacaggttcttactactagggtttaggttgtacaggggaatttacatgattactcttacaaaagggacatttacaggggtacataatgttataggggctcatgggcccctgatgggccgtctggcgatcgccggccctatagcccctaggcttgatgggccggaaaggcttcttcggccctcgcgggggcgaacttgccatggcaaagtcgtcttccttcggcagatagtcttcgccttgcacctttcgcttgagacgcctctggtctggcaaggcactcgtacgactcttcgcctcacgccgttcttgctccatagccttcgccacgggtttcagcagatgtggtcgaagggtctcatgccatccgccaacaagcccctcatgggcaagggtgagattggagcttcggccgagaccgtgcaaaccatgtggtatggtatgcggcgccccctttcgaccgatgctcctgccgaaacctacattattcctgcgaatgaagtttgttacttgtgcggctattattattttgccgcgcttcgcctcctgcgattggtggttatatattttcttttcccgggccgaacggaacagtattgggctttcccttcgtgggctttttattgtgccgctcggtcggtgggaatttaccgtttcgcctacccttgcgacacgtggcgctttattactggtgggtaggcgaacggtcgcccaggtgagctatatattcccactgctctttccttttcttccacagcatctctcaacccctcaagcgtttcgcccattctctttcttcgccaccgcaaacgcaccgttcgccatggcccctcgcaagccaaaccctgcttcggcgaaagggccggatctcggccgaatcgatgacgacagcaccgcctttttgggggtctctcttgtggacgacgtcgagctggcgaagctggtcagctttggggcgttggtcgaggggcaggctttctccccagggaaagccgtggtgccgaaacctatcgacaatcggacggtggtattcgccgtcttttttgaggcagggctacggtttccctgcaacgtgttgttgccggagatccttcgcctcttccaggtggaacttccgcagctgagcccgttggcgcttgtttggatcgctatcttcgactaggcgtgccggatttccaggtttcagcctaacgccgagctcttcggcgccatatttttcgccaccgtgaactcgaagacggtgcgtcccagctggaacgaagaagacagtgttcgggagcgtgaactttaacgttcgtcccgagcggtccgatctctggccggtaaacgctgccatgtcgaagtgggactgccattggatggctaggtggttctatcacaccatccccttcgaggctggcactgactcggcgaatgcccaccgttgccgacgtagggcgatcgcgcctaaccggaaacccaagatcaccgtggacggcgctatggaggcgcggttcgttctgctgcggaaggtttgctcccgccttagctgccgtgacttattggaggaattctgtatgcttcgcatctttcccctctcccagtcatggcaagtcagagttgatcaaggcgaagaggttgacggtttgccgaacctggttcttcctgaggggacgaacagtaagactgttctcgtgctatacactgttgtgctttgttatcttgccttatctgactgttaacatagctacacactttacttttgcagcgttgaccctcgaccaggctgaaaacgaggcccgcaggatgatcggcgacgtgtcggtcatcgagtaaagccagttgctaacacgacaagcggctgggcgggcgaaccgggtttacaacggcgaattgcctcctcgggcaaacccccacaaagctgatgacgatgcagggccttcgcgaaagcgaatgcgcggacacgtgaagcttgcccctaggaagcgaagggttcctgcttcgtcggactccgacgctgacgacgaggacgacgccgaagaacgcgacggcgaggaggaaggagaggaggaagaggaggaggccgtggccgataaggccacgaacgacgcgatcgaagaccgcgtcgacacccccggctacactcctaccccaagtccctatcacaacgagaccggggtggagtcgaacagctccccccttcgacggaaggatttggaaggggcgaaggccctagttgcgttctcctcgggcaaggcggcgaagggaggtccggtgcggaaggtctctaaaaagaaaggactcgtcgacatcgcccgcgttttcagcgactacgaatcttctgacgggactccaacttcgcccgttggccgcagtttggacctttcgactgctcccctcgctctgctcggcgttgctggggcaggcggtaacgccgccgccggggcttcagcctccgccgaacggatcgtgtcggctgcggcgagggttttcgggagccctctgcgtgagctagctatttcgccgctagtcaaggcgaaggggaagtgtgcggccgccgaagcatctgcctcggagtattcccttgcggcgcccaacttcgcccctggtgatttcgagactcgggcggaccttattccctttgtggagggggtgagcaaccttgtcttgcccgccggcaccccgagcttgttcaccgaacttaatgagttcgacgaggggtgttccgccattaaaagcctggcggttcgggtatgccttttctttcgtcttcgttttcctcttcgtccccttttttttcgtctgacaattaaccttttgttcttttcgcccgctcctatctttcatctaggttcttgtggctcactgttcgacgaagcgaactgtacgggcccgctttgatggttttaagagccgtcttcgggccaaggatgacgaaataagctgcaagaacctggaggaggaggccctggccaacaccctcaaggaggcgaaaactgaagtccaacgccttcagtctgagctggatacggggaaagaggctagggccgaggttgatcgcctcaaggccgaactggagaaggagaaggcccattcggcggtgctgaatgactactacaaccttactgagccgaagatggaggctcttcgcctgaaggctagtagggctgaagcgagcgccgcggaggagttgcagcggttttcacaggagatggcgaagaccaccgaatctgcgagaacggcttgccaaacgctccgcctcgcccttaccgacatgggcgcgaaagtgcggggggtccctgctgaggatgcatcagccttcgacttctccgagtggacctagcaggctggcggatcggtttcggactgcgccagcatgtacggcgattgctgtgcgcgtgtatcggcggccttcaccttaggcccatttgcaacagttcggttgtgagcacgtcgccgaatccctacctatgtgaagggggactgggagattagggcgcaaaacatttcgcctgctcttcgcgcgtggcgaaaacagttctggcagaaagacggccggtccgctgccaaggtgcgccttctggagcaactagcgaaggcggaggcggcagatcggtgcgaagaagagggcgcagtgggcgaagaggttggaggcgatgcccgggatcacccagaggtgtgaggccctccgccctttctttagagttttgtagttttccaccctcttttgcgtttgcctggagaggcgaatgatgtacattcggcaggctaccaccaatccttaaaaaaggcttttttgtacatttggaatatatgacacaatcttaactactttttgatgatcaaagtctttggcatattattatttcgctcatctcacattatgccatacctcccccttcttccgcctattcttactatgtaagctgtgttttgctttttctgcactatccatcagggggttcgccgaaagtcgtgcatccggcccccttccgggagctggcgaagtcaaaacgagaaatttgtggcagtgaagggtctgccgaaggtgcgatgtccatttcggccggtttatcgcgaaatggagataaacggtcgcagctataaggttttcaagtttgccgactagctgcgggcgcaccccgagcgaaccttagaagattacgattttgttcattcaagacgtttggaggatatggctcgcttttggcgaaaccatcagaagactaaacgtcaggaaacgatctttcagcgtcgttacagtttagtctgtgtttcgccccctactcctcttaaggttgtgtatgatattagtagtgatgacgaacctagttcgcctgatcatgccttagggagggatagtgattatggggacgaagatgtaatttacttgtaaggtgaattgtatcgtgttgtgaaacttctattcttcgattattttttttgaagttaataaagacgtgttttatttccttttcgctattgtttgcatcgtcacattttgtgcttttgttaggtcagaacatgccggtccctttgcatatattagcgaaataggtgtactgacttttcagcttttcatcgttcgttttcgatctatagcgttctgtgtcgagagaaacgcttttgcttttatgctgatcggacgtaacgtcattcggctatttattttccgagacaagctgttgcggtttcaacgttcggcgagcgatgcttcggccgattcgtttagcctccctggcctttttcgctgatcaggcgtttgccttggggtttttccacaaattatcaatcacacgagaaataaaaagaaggcggaggacacagagattttatactggttcgggcctccatggtggataatagccctacatccagtttttttttctttttcctctctttcttctttttttttcttgccgaaaggctttcatagtgccgaagggcttacatagtgccgaagggcttacacgacagtatgcacatttttacaagttggcgatttgggtgccacccattctagtgggcttacgtagtgccgaagggcttacatgactgtatgtacatttttacaagttggcatttgggtgccacccattctaggcatagaagcgcttgagagaggcggcgttctaggaatggtcgaactcctcgccttcgagtgttgctaggcgaaaagatcctatcctggacttgtgtttgatgaggtatggtccttcccactttgattcaagcttaccaaccgctacgcggttcgccttcttccttaggacaagatggctagacatcagctctgtgggtcgaacttttttgttataagttgtcaaagtgcttgtggcgtacttgtgcatgtgctcgagcgcttcgaccctcttcgctcctagagaacataacccttggtgagttagcccctagctctgctggggtcattgcctcatcgccataaaaaagcataaacgggctaaacttggttggtcttgtgggggtcgtccgaagggcccagagaaccgatagcaattcctctggccatttgcctttcactgccccctcgagtcttttctttagtgcttctaggatcttgccatttgtacgttcgaccgccccatttgactgcgggtgcgtgactgacgcgaacctgatttacaggttaagcccttcgcacatttctctgaacttatcagagtcaaactgcttaccgttgtcagtaatgaactcttttggcactctgaaatagcaaacaatgtttttccatacaaacttctgtactgctgccgaagtgattgccccaaggggttcgacttcaatccatcgagagaaatattccacagctacaattgcgaatttatacccgtttcgccccatcgggaagggcctaatgatgtccagtccccatctggcgaagggccatattggcgcaatgggctgcagatcatactggggcgcgg

SEQ ID NO: 6005 - DNA, 15992 bp, Oryza sativa
tttaaaccctccccgagctccgtctttcgtttccgccgctcgccgctcactctcgccgtcggaatcgtgctcgcgccgtagcaccttctctccgccgtcgccgccgtgcttcggttagccgccgccgccgctccgctcctcctcccgactcggcgacacctccctcggcatcgccgcatcgccgtcgacctcgtccgcgcctccgtttcgctcgccgaccgtcggagcaccgtcgtcatcgtcatcccgagccgcgccgccgtctccctccgctccggccgccgttctcgtcgtcgtcgttgtcccggggtgagccgaggaccgccgttcgccttcccccttccctcctctctctcgggcgccgctccgccgcgccgatggtcgccggcggtgaccatcggggcgcgggcgcgtcgctcccgtcggccgcgccggcgaggccgccctcgggcgcgccctcgcggctgccaagtgggcccggccgtcagccgcccgcgcccgcgggtgcggctgacgcgcgggacccacggcgccgaccgccgccagccgcgtgcgcccggtccaccgtggaccgtggggctgacgcgtgggccccactccccgtggacccggtccgcgcgtcccctccctcggctgacgcaataatccgttttttttaattaaaatttaaatgaagaaattcgcaaatatccatttaaagagcatataaacttcaaatggccatatcttggccatttgaactcggaattggaccgttcaagtctctaatttttccttaagaagtaaagaacccatttttgtgctttgttcctgcttgttgtttggagtttattagagtaaaagtctttttctttttccgttggtcgtgtagacgccgcagcttcggaagatccgctcttcgtggaagttgaagccgtcgtttgggaaagcgagcaaggcaagacacatcatcttgatcatattgaatcccattttataaaattatgttgatttaaattattgcattatcgctttatttaaattcccgcgttgtcactgttttatttagccatgcctatttatctttgttacgaccatattattattgttattgttattgttattaccttgttcaccctagattaaacaaaacctcaactaggggacactctactcatggttccattagtatgaacttaggtagatgcttcactggttaattaggcaacattaggtggtttttacaactttagacttgggaaattctcatatcatttggacactgtggaattgttggattatgatggaattggacatacacctctattcctctttcaaaacccctaaaacctgttttcggtggggtttgggtgcatgccagttatgggaagtggcaccccggccactataaggactaaagctcgggcctctgttgcaaagcactaccgtaattccacatgtctaatcggtaaggcttagtttgtggctcagtctagtcataaacaaaagtacacggattggagatggatgaagtcgggcttcgatggacattctccagggcaaatgaaggctacacgagctgcggcccggtagtcgagatgtcatacggcgagggttggtgcccaatgctaggggctcagttctacctgcctgtcccgggtatcccggccgtaggtaggattgggtcggtactcttgtctaaggctaggatgggttggaaactatgtcacgtcttccgtccgtataccgtggtggtatgtggcacgtggcaacacgtgagggagaggtgtcttgtgggtaaagatgtacacctctgatcagagtaaatctattcgaatagccgagccctcggatatgggcaagcctagcaatgtacccaggtcagtgtttcaattcttaaaatttgctcaacaactaaaatatggaatggttggcctgggttggcttgggacgagctgggacccaggtcgggttgccagttcggtccaattcatcgtaggccttgggttaaggcaggttcgtgagggttcacggccttgtttaataacactgtgtagctctaggatcgtctttataaaatagctttgggcaactaagtgacttttaaatgctgtttactgcaaaactgaacccctatattattatctccttgtactcccttgcattaatcatgcattctccggtgtggcttgctgagtactgtggttgtactcattcttgctcaatcttttcccccttcagtaagagaagctttggaggagaggtcttaggtggagtcctggcttataccccagttgagcgcctgtgaagatggagccgtaggcccgctagtccgctgctgtttatttttgattgtcaggccttaagtgcctttgtaataatgtaaatattatcgatataataaagatgtgtcttttatatcatgtttgtatggtgtaccccggcttttcctgggacggggattaatacactagcgttcgggaaaaggcaattttcccggtcgcgacaagctggtatcagagccatctcgactgtaggaaaagccaagtggataaaacctaaggacatattttataaataaaaattatttgcgaaagttcctcttttctccttcccccaatgctttttgcaaaaggtttactccgttcttccttcttcggattttcaactagtactagatggtcaggtcagtgaagaagaggacatcgtcagttgtttgccgaagttccagaagactgcaggatctgcgagtgaagtggaggaagcagtgaagccggctgtgaagcaggagtgaagatcttggagaacccgtcgcagaacctaagccaccctctagtgtttcgtttgtcgtgtgtttccttgcttgtgtgtgtagcgcgtggtttgcatcggtgggtggtgatgtaaccatgctaggttgtttgcttaatcaacttgcagaataagcctaacatacatcataacagcaaaagacttagatctgttaaggtcctatccttagtttctaatctgtctctccccttcgttttccctctctccctctccaaacctttgcaacagatggctgacaatgagaaaggcaataaggtcaggagtcaggacattggtacctcaagctcccgagtgaatgaagcacaagacaccagttgtgcggcagtggtccaacacctgattaaccagaacaaattgcttatagagatactacagcagcatcggatgccaattttgaacccgagtcagatgcaacctcaggtgcagttggaggcagtccaagcactcacaccacaagtcagcgcaccgccaacatcccagaaggcccctcatgccatgccacatgttgacccaaaagaagcaagtatcatctgttttatgtgtgatgagcaagggcactacgcaaggaactgtcctcagcagaaaagaaaagcaccaatgcgaaccgaaggtgaagttcgtaagatgatcattaccagcacagaatggcctccaccaggaatgacaagacgtcagagaagaaacaccttccgaggtgcaccacagttgacagagcatcttttagctaatggaggtagagtgtctgatagtgaagattcagatcaagtctcctcagaagatgaagatgagaaatctccccaaggtttcaaccaggataaaatggaacgtaaggcatgctctcgttgtggagaaatcggacatgttgccagctcgtgtgcctctacatgcgttcattgtgaggaagaccatccacccgacaggtgtccaacgagcaggatcacttgtttcttttgtgaaggaactgatcatgtaccaaaagattgtcaattcagttttctgctgacgaagaagatggctaaccaacccgccggtttcaacggagagaagcatcaaggcaacaccaatcctcgccaagattacagtttcagcctaactccagtgccaggacagaggaatcaaaatgagaaaagaaaatgccgagtccgggaagatatctgttgcttcaattgtcaaggaatgggtcatttcgccgacaagtgcccaaaaccgagaaacatagctgccggcacgtcagtccacgcaactccctgcaatcagaagcttgctcctcaacgaatggtcatccatgcatcccgaagcagtcctatagcccgcgttgcaacagctccaattccaatgagtgcactaccacaaggtgtcaatgctcaatttcagccccagccaccagctgacaagacagatgccagtatctgcgttgtacctttagaagctccaatacagcagctgagaaatcaagtacaagatgaagaacccgagtgtaagaaagttattgtttgtcacaactgcagtggagaagggcattactccaaaaactgtccccgacctccacattttcgccaatttacacgaagcagacattccaatcgtattgtggtcactggagcaaacgccgtacccgtaaggcctcgtgttaatcagaacccatagcagaaacaatgcaccaatgctccacctgctgcacctgactcggcaataaatcttagcaaccattctctgcaacgacagcctcagcaaagaattgtcgtagatggaaggagttgtgtctctccccgacctactccaggccgagccaagggcaatcaacctccggagggcgataccaagcagaagaccgtcatccgctgcaaccaacaatcagaaggaagcttctcctgtgaatgatagcattatgcagtcctatcacatcatcacagaaccaatcaaggatgcagtcactagaacaatgccagctatatctctccagaatcaaaatgagcagccatgtttgtggttttcagtccgctacttatcatggtgtaatcgaaagtttgcagcaatcatgaaattcataaatataatcatgtctgtaaacagtgagcttgctatgtttagagatgattcatgttgaggatacaatgtaccgatgttaagcaccgtcccttttcgtttaaggcagtgcctcgtattcatgtaatgagggagaaatgtgtaatacagacaagttccatgaggattcgtttgaaagatgcggatatgtgatcatgtgtataattgtttactgacataggagacctagggtctcatttcagaggaactgtgttccaacctcgagttaataaccaacctgttgatggaaaagaaaaccaattaaactgtgttgggttaaaaagccaacgagacagtagttgaggataggagttcggatacgccttttacagatcaagataaggattgttggaggaaaccccgaagggtactcgtcatgcctctacgttgataagatcggatatacctgccaacagataaggagatccaggagacatcaatatttgagaacataatagtcgatggttggtaattagtttacctggtatcagaacaaggtcaaaggtgatgtggcagaagaacaatttggatgctccccatctcgaggaagcactaaagatgaccatcggcaattaaaccctagtggtatagatacagatagcaggcaatgtatttccctgaaggtagtcagtgcagctttttgacgaaccacatcaaggtttcaccgaaaggcagcaagccaaaggacctcatcgtccccagaagcgtccgcaatccacattaaagaataccacctgttagagataagccgaaagaagattgataaaagggattggcaaagatgctctctagcatgaaagaagtaggccgaaaggtgattgataaacagaagcatgctctgcatcgctcacggaagacccctgattgtaattgccccgcaacagtcaccttgtcattaagtaagcaagatgacctaggtaaaagtgtttctatgaaggcaaagagtgaaatcttccactcggtatcagatgctacacggagtgaaaaatgcaagcaccggttaccaggcaacgccacgtcctgggagatgatccaacgggaaagaactcatcaaggttaaaggtgtaaaggaatacgttgagtgctaactgatgacaacatgaagagaatagcggaaagtaaactgaacataaagaaagtgaatctgagttgcttgtttgtgggagctattcccagttatgaaccaagtgatatgttcgaagatagtctacagaggtcagattaagatcacctctaacaacgaagcttcagatctggcaggatcacgatcagacaataagaagtccagcagtaagactatttggggagacgtcaaagtatgtcaagtgggataaattggttctcttgggaagcataacttatagttagagtggttgaccctcgcatcgcatagcagaagtacctagcaccggagaccaggaaagctaatatgagacagttgatggcaagttagaagtgaatgacaagcatgatattcttatgatgacaaacatagtatcctagtaatgacaagctagtgttgacgcatgacgtgaagtggtaacttgtctgaggttgactccgaagatatgaatcatgagaagttctggaacggaagcatcactggactaccgcaacctagtctgagtcagccaaaaggtgcatcctggtccaagtcaggtgaagagaagattccatccgcaacaggaggtcaagccaagcagttccgagtggtaaagttttgctggaagttcgtcaagacgcaacggaagaagtcagacaagaagagaagaccgcccaacctatcttcttgctagcctcctcgaatctcggggacgagattcttgtaaggggggtggatttgtcacgtcctgataaattcatcccaaaataaaaatcatcttctaaaaggaataatagaattaattaaaattcgaaaagaaattggcaaaccttaaaatacgtacaagaaaaattcaaatgtgacccggagaatttttgttaaattctccttggtctaaaaggagccctcaaattttagtggaattttcagagcacaaataataattgaaaagaaataaacaaagtcgaaaaggtttataaaaagaaaaaccctaaaagaagtcttctttccccccccttcctctcttgggccggctcggcccaactctccctccctctctctcctctcctccgcggcccatcggctccccgcgcgcgcgcgcgccgctgacaggcgggcccgcccgccactctcgctgacaggtgggacccacctgtcatctccctcctctcgccgcgcccgccgccagcgcccgtgccctagcgccgccgccgccgcgaatcccgccgctcccgtccgccccgcgtgcaatcaagaggggggaattaatccccgcgttcccctcccccgtttccccctctttcccctctctctctccctcggattcgttcgaatcaagcccgtaatcgtcgccggcgcaatcaatggagccgaatcttccgcgcgcgattcctccctctccggccgctctttccttcccccggcgctatttaaaccctccccgagctccgctctttcgtttccgccgctcgccgctcactctcgccgtcggaatcgtgctcgcgccgtagcaccttctctccgccgtcgccgccgtgcttcggttagccgccgccgccgctccgctcctcctcccgactcggcgacacctccctcggcatcgccgcatcgccgtcgacctcgtccgcgcctccgtttcgctcgccgaccgtcggagcaccgtcgtcatcgtcatcccgagccgcgccgccgtctccctccgctccggccgccgttctcgtcgtcgtcgttgtcccggggtgagccgaggaccgccgttcgccttcccccttccctcctctctctcgggcgccgctccgccgcgccgatggtcgccggcggtgaccatcggggcgcgggcgcgtcgctcccgtcggccgcgccggcgaggccgccctcgggcgcgccctcgcggctgccaagtgggcccggccgtcagccgcccgcgcccgcgggtgcggctgacgcgcgggacccacggcgccgaccgccgccagccgcgtgcgcccggtccaccgtggaccgtggggctgacgcgtgggccccactccccgtggacccggtccgcgcgtcccctccctcggctgacgcaataatccgttttttttaattaaaatttaaatgaagaaattcgcaaatatccatttaaagagcatataaacttcaaatggccatatcttggccatttgaactcggaattggaccgttcaagtctctaatttttccttaagaagtaaagaacccatttttgtgctttgttcctgcttgttgtttggagtttattagagtaaaagtctttttctttttccgttggtcgtgtagacgccgcagcttcggaagatccgctcttcgtggaagttgaagccgtcgtttgggaaagcgagcaaggcaagacacatcatcttgatcatattgaatcccattttataaaattatgttgatttaaattattgcattatcgctttatttaaattcccgcgttgtcactgttttatttagccatgcctatttatctttgttacgaccatattattattgttattgttattgttattaccttgttcaccctagattaaacaaaacctcaactagtggacactctactcatggttccactagtatgaacttaggtagatgcttcgctggttaattaggcaacattaggtggtttttacaactttagacttgggaaattctcatatcatttggacactgtggaattgttggattatgatggaattggacatacacctctcttcctctttcaaaacccctaaaacctgttttcggtggggtttgggtgcatgccagttatgggaagtagcaccccggccactataaggactaaagctcgggcctctgttgcaaagcactaccgtacttccacatgtctaatgggtaaggcttagtttgtggctcagtctagtcataaacaaaagtacacggattggagatggatgaagtcgggcttcgatggacattctccagggcaaatgaaggctacacgagctgcggcccggtagtcgagatgtcatacggcggagggttggtgcccaatgctaggggctcagttctacctgcctgtcccgggtatcccggccgtaggtaggattgggtcggtactcttgtctaaggctaggatgggttggaaactatgtcacgtcttccgtccgtataccgtggtggtatgtggcacgtggcaacacgtgagggagaggtgtcttgtgggtaaagatgtacacctctgatcagagtaaatctattcgaatagccgagccctcggatatgggcaagcctagcaatgtacccaggtcagtgtttcaattcttaaaatttgctcaacaactaaaatatggaatggttggcctgggttggcttgggacgagctgggacccaggtcgggttgccagttcggtccaattcatcgtaggccttgggttaaggcaggttcgtgagggttcacggccttgtttaataacactgtgtagctctaggatcgtctttataaaatagctttgggcaactaagtgacttttaaatgctgtttactgcaaaactgaacccctatattattatctccttgtactcccttgcattaatcatgcattctccggtgtggcttgctgagtactgtggttgtactcattcttgctcaatcttttcccccttcagtaagagaagctttggaggagaggtcttaggtggagtcctggcttataccccagttgagcgcctgtgaagatggagccgtaggcccgctagtccgctgctgtttatttttgattgtcaggccttaagtgcctttgtaataatgtaaatattatcgatataataaagatgtgtcttttatatcatgtttgtatggtgtaccccggcttttcctgggacggggattaatacactagcgttcgggaaaaggcaattttcccggtcgcgacagcgtttgggtgggttcgcgtattctgctgcgagaacttctgcttgagccttccttttcccactcttgcgatttttcttcttgcttgactcaggtgcgtccgtggctggtttcttttctcccccggtcttcggcttgtcgttcttgcgtctcaacgcatcgtcaacgtgggcacatcgctcaacaatttcgaataatctccgagtagttcttatgcgtcttgtcgccaactcctgggtagtatagtgatctcggacaccggacttgaaggcgcgaattacagaagcatcggtgatttcggggattgtatttctgcactcgttaaagcgccaaacatattccctcaaggattcacccgagttctgtgtcaacgcatgtagatcgtcttcgatcgcgtggcgcttgtaagttccttagaaattggcgacgaactgctgccacaggtttgcccacgaagaaatcgagtagggcgggagatgcatcagccatgagcgtgcagagccttttaatgcagttggcaaataatttgccaacgcgttgtcgtccgctccggcagcgtagagtactgtggagtagacttgaaggaattcttctgggtcagtactcccatcgtacttctctattgctctgggtcggaatctctcaggccatcggacatcacgcagggaacgaccgaaagctctacacccagtgctgggggcagtgggttgtcagcgatcatgtgtccttcgtggatgtctgtctgacgatgaggatgaagaagaagatgacgatgacgatggatcgcttggttccggtgtgggattacgaggtcgtcggctgggttctcgagaatcctgtcgtcgccctccgttgttgtcccggcgccgatctctgtcgtcctcgtcgttatagcggcatcctcgaccagtatcgccttgcgtccgcctctcgcaatcatcatgatcgtggcgattgtggcgattagtacggtctcggtcttcattatcgcgatgtcgtgaagagacgcgatgtcgggagcgattcccatcgtctcgtgtgcgtcgtgcctctcggcgaccattgaggtggtcacagagatcgccggtgccgcgaggtggaggggtagctcgagggggtgactcccgctgttcgggatttttgccattgacgccgccagttggtggctgttcctggtgcgtagcagcagcggcctcttcaaacgcgtggctgaggttggttactgattcccgtagccgttcctgccaccgcgcgagatcatcgttcagaacgggatcgtaaggagtctccctcagtattgtgttaagggtcctgatgtgttgggccggtgtagtcacttgattttccgcttccgcattagcgtgtgctgacttgctggtcccgttgatagctaatagctcgcttgacgtactcattggtgatgagccgtagtcctcgagtagatgtagaactgatggtacgtgggaatcgatgtcgataacgccaacgaaccgatctgagaccagcgttccttgttccttgtcttcatctctaagggatatgcctgactgctggaccttaggagatgacgtctttgtggtgctgagaaagaccttgcagcttgagaggttgtgattctttgtcttgtgaataagacaatagacatgacgagttggagaaatacgctgaattccacgctctttgcaggcacgaatttcggcgcggacgttgagaaaaacccagcatgcttgcaaagtgtgtttcctggttttgtggatagggcactaggaccttgtcgcgtcggaagttattctcgtcggctcgtggttcttgtcggaaagacaaggttcggccgcattagaatccttctcgagctcggatgttgtcaacgttccgttctccgcttcggcgggaggatctttcgacacggagtcgtcctgggttgtagctactgtgttctcgtttccggtcattgatggaccagctgagatcggcatcgtggcgtaaaccgggaataagatttcaccgacttgaggttggtgctgacgctgttgtcgacgaagctggatgacatagtagtagaaccttgagcaccaagttctcctacctggcgcgccactgtcgacgggtgatacccgtagactggatatagagggtattggggtacgttggtacaaggatctacgtaatacgacatcaagcaaacaaaaagacgaggattatactggttcaggccccttgataggtaatagccctaatccagttgatatgggattataagatggaaaatcacagattaaagggaacgatggaactcgatgacaccggcgagattgtaatcgagttagttcgactagatctcccggcgatttggctcctgcaggctccgacttcgtaggctgtggtcgttgtgttggctatgacattcgatgccttaagtcctctcagggggtcccttttatatcgcaggtcaagcggtttccaaatagaactcggagacatcaaaccctacacgatacattgacgacccagtcttgtccgagtaggactcttattttctgcaaactccgtcaaggatttccttagtgtatgtagagaatgtccatatatgcgcgggcatgccatatcgatatgtaacgtatatcgaacggtaaagggtctacctaacccgtaaccctgacatacatatacatgtctagacgtatataaagtttgtatacgtgtataaaagtttatttaaaaattgaaaaaacagaaaaagaacctaaaaaaaaggaaaagaaactagaaaagaaaaaaaaaggaaaattgtgccatcctccatccgccccctctcctctctctccgcgcgcgccacgtgtcccgtcgcccgaattaggaaatttcatagaatgaggggatattgttacaacagacaatgcggccttccatcccacgacaatccatcgagccttttgaagaggaacagcacatccgtaggacaagcccaacaacagcccaacagcccaacaacgtctcctagcccagacccatctcgctgtctcttcttgtgcctttgctcgtcctttcctcctccccaaaatcgatcaccggcgcacgccgattctccaccgcttacaggttcttgagctccaccatagttgccaggtcgctgggggatgggaggctgaatctgcgcggggaaaactgaggaggcgtgatgatggatggggctgctggtgtgtcgtcttcgcctctcctctccagccccctcatcgagtctcatcctccccccacggagcattcggcaatggcgtcaggaaggatggtaggttgcgtctgtggcgatgaggaggaggaggaggaggaggggtcgactagtcgccggcggcaatggcggaaagtgcacgaggagagaagtgatttttttccctgactcgtctagttgcatcttttcagtttcattttaaccattcatctgagccgacgtgtatgaccatctccctctggctagtttgtcgttttctgaatccgatggccaatattcattgcatgatgtggcacattccaactttcacttagagagatactcccttcatctacttttgatctacttttgatattaatattttatcttttttacggatgttgtcgaaatgacaactgcatacgtcgaaagacgtggttactcaacagtggttggaaggaaacgaagtgtattgaatcttgaatttcttcctttttttctggattcccccattacatggccctaggggactatttatagccccattacaggttcttactactagggtttaggttgtacaggagaatttacatgattacacttacaaaagggacatttacaggggtacataatgttataagggctcatgggcccctgatgggccgtctggcgatcgccggccctatagcccctaggcttgatgggccggaaaggcttcttcggccctcgcgggggcgaacttgccatggcgaagtcgtcttccttcggcagatagtcttcgccttgcacccttcgcctgagacgcctctggcctggcaaggcactcgtacgactcttcgcctcacgccgttcttgctccatagctttcgccacgggtttcggcagatttggtcgaagggcctcatgccatccgccaacaagccccttacgggtaagggtgagattggagcttcggccgagaccgtgcaaagtatgtggtatggtatgcggcgccccctttcaaccgatgctcctcccgaaacctacattattcctgcgaatgaagtttgctacttgtgcgcctattattattttgccgcgcttcgcctcctgcgattggtggttatatattttcttttcccgggccgaacggaacagtattggactttcccttcgtggggtttttactgtgccgctcggttggtgggaatttaccgtttcgcctaccattgcgacacgtggcgctttattactggtgggtaggcgaacggtcgcccgggtgagctatatattcccactgctctttccttttcaccgccacacttgccattttaccgtgtgcgctcttttcctccgtttctttcttccacagcatctctcgacccctcaagcatttcgcccattccacgcaccattcgccatggcccctcgcaagccaaaccctgcttcggcgaaagggccggatcccagccgagtcgatgatgacagcaccgcctttttgggggtctctcttgtggacgacgtcgagctggcgaagctggtcagctctggggcgttggtcgaggggcaggctttcgccccagggaaagccgtggtgccgaaacctatcgacaatcggacggtggtattcgccgtcttttttgaggcagggctacggtttccctgcaacgtgttgttgccggagatccttcgcctcttccaggtggaacttccacagctgagcccgtcggcgcttgttcgaatcgctatcttcgactgggcgtgccggacttccaggtttgagcctaacgccgagctcttcggcgccatatttttcgccaccgtgaactcaaagacggtgattatctcggctggaacgaagaagatagtgttcgggagcttgaactttaacgttcgtcccgagcggtccgatctctggccggtgaacgctgccatatcgaagtgggaccgccattggatggctaggtggttctatcacaccatccccttcaaggttggcactgactcggcgaaagccctccgttgccggcgtagggcgatcgcgcctaaccgaaaacccaagatcaccgtggacggtgctatggaggcgcggttcgttctgctgcgcaaggtttgctcccgccttagctgctgtgacatggtggaggaattctgtatgcttcgcatctttccgctctcccagtcatggcaagtcagagttgatcaaggcgaagaggttgacggtttgccgaacctggttcttcctgaggggatgaacagtaagactgttctcgtgctatacactgctgtgctttgttatcttgccttgtctaactgttaacatagctacacactttacttttgcagcgttgaccctcgaccaggctgaaaacgaggcccgcaggatgatcggcgacgtgtcggtcgtcgagtatagccagttgctaacacgacaagaggctgggcgggcgaaccgggtttacaacggcgaattgcctcctcgggcaaacccccacaaagctgacgatgatgcagggccttcgcgaaagcgaatgcgtggacaagtgaagcttgctcctaggaagcgaagggttcctgcttcgtcggactccgacgccaacgacgaggacgacgccgaagaacgcgacggcgaggaggaaggagaggagaaagaggaggaggccgtggctgataaggccgcggacgaggcgatcgaagaccgcgtcgacacccccggctacactcctaccccaagtcccagtcacaacaagactggggtagagtcgaacagctcccctgtcacgcccggaaattcactaataatttccgaactaatttgtgcataaaatcctcgtctaggaatcagccgaggtacacaaactgacaatttaatatacaaatccatcataataata

SEQ ID NO: 6006 - DNA, 72338 bp, Oryza sativa
cccacgccaagattgaccgtcaacgccggaaaccaaaaaaccggagttcgggaaggttttaaaaagcgccgggggaaggaaataccgcccggagaggtagaaatcgcgcgcgaaaaattcggctccattgattgcgccggcgacgattacgggcttgattcgaacgaatccgagggagagagagaggggaaagagggggaaacgggggaggggaacgcggggattaattcccccctcttgattgcacgcggggcggacgggagcggcgggattcgcggcggcggcggcgctagggcacgggcgctggcggcgggcgcggcgagaggagggagatgacaggtgggtcccacctgtcagcgagagtggcgggcgggcccgcctgtcagcggcgcgcgcgcgcgcggggagccgatgggccgcggaggagaggagagagagggagggagagttgggccgagccggcccaagagaggaaggggggggaaagaagacttcttttagggtttttctttttataaaccttttcgactttgtttatttcttttcaattattatttgtgctctgaaaattccactaaaatttgagggctccttttagaccaaggagaatttaacaaaaattctccgggtcacatttgaatttttcttgtacgtattttaaggtttgccaatttcttttcgaattttaattaattctattattccttttagaagatgatttttattttgggatgaatttatcaggacgtgacaaacgcccagacccacaaggtacgacgcaaagaaagcatggtgccccatacacaagacggacagacattctttggaagattgccttgtttttaaaaagtcgttcgagaagcacatggcattggaaaaaggcaagcgagtacgcgtggtcgagaaagatgcggaggcgactgctccagaatcggattcagcatatccagactctgaccttcgtgtctcacacattttcggaagttctacaacgtaatcctcaaagcgagaatacaagaaagtggaacgagaagtctgttcgacatggcagggggctgcacccaagatgaagtggtctgaacagaagatagaattttcggaagaagaccatcccatgactgccgttatcccaggacgttatccgatcgtggtcgaacccactattcggaacatcaaggtcgcgcaggttctcatcgacggtggcagctcaatcaaccttctcttcgccagcaccttggacgtgatgggaatcccacgaagcgagttgacacccaccgatcaacccttccatggaatcactccccagtcctcgtccaaaccattgggcaaaattacgttgcatgtgactttcggccaagcaaacaacttccgaacggagcagatcacctttgatgtcgctgaattcgatacagcgtataacgccatcatcggttgaactgcacttgcgaagttcatggccgcatctcactatgcgtatcaagtgctcaagataccgggaccgaaaggaacaatcactattcaaaggaacgccaagctagcggtacaatgcgacaagcggagcctcgacatggtcgaacaaacgcccagcccaccagccacaactgagcctcccaagaaagtgagcaagacaaataagacgccgaaaccagacagcgcgatcatgatcgtttcgctctctagtgccaaccccaacaagaccgtcaagatcggggcatcactaagcgagaaataggaactcgcgctcatcatcttcctccgcgacgtgttcgcttggttgccgtccgacatgccgggggtccctagggagttgattgagcacaaactcatggtgcgacccgatgccaagccagtaaagtaaaaactgcggagatttgcaccagaccgaaaacaagccatatgagaagagctcgacaaacttctcaaagttggctttatcagagaagtatttcatccagagtggctagccaatccagtcatggtgcggaaggccaacgggaaatggaggatgtgcgtcgatttcaccgacctcaacaaggcgtgtcccaaggatcacttcctcttcctcgaatagaccaactggtggactcgacagccggctgtgagctgttgagtttcctcgacgcttactctggctgtcaccaaatcagcatggcgaaagaggacgaagagaagacagcattcatcatgccgttcgaggtattttgctatgttaagatgccattcggactgataaccgcaaggaatactttccagcgcacggtccagggcgcacttagtgaccagctcggcaacaatgtcgaggcatacgtcgacgacattgctgtcaaaaccaagacaagcaactcattgattgacgatctgcgggaaacatccgacaacctccgacgatatcgcctcattcttaatccagagaagtacacgttcggagtaccgtcgggcaagctgctcggtttcctcatctctggcagaggaatagaagcaaatcccgagaagatcaaggcaatcgagaatatgaagtcgcccacaagactcaaggaagtacaaaagctaaccagatgcatggcagcactaagcaggttcgtcgctaggatgggagaacgaggacaacccttcttcgctctgctgaagaagcaagacaaaattgtatggacacaggaagccgaagaggcattcgttgcactcaagcgctacctaacaaacccccctgtacttgttgctccccaacctaatgaagaattattcctctatattgccgccacgccatattccattagcaccgtcattgttgttgagagagagaaagtacaacgaccagtctactacgtcagcgaagctctccatgacgcaaagacaagatatccacagatccaaaagctactctacgcagtaataatgacatcaagaaagctacgccactactttcaagcccacagagtcacaattgtctcctccttccctctcggtgaagtcgtgagaaacaaagacgttgtcggccgcattgcgaaatgggtagtcgagctaagccagtttgatgtccactttgtaccacgaacagccatcaagtcccaggtactcgccgacttcgtagccgattggactatgcctaacaacaaatcagacaatcaaatcgacaacgaaacatggacaatggcgctcgatggtggactcaacagctaaggagcaggggcaagattcatcttgacatcctctccgaagatcaattcaagcacgcaatccacctcaacttcagggcgaccaataatacagccgagtacgaaggactactcgccgggataagagctgcagccacacttggggtcaaacgactgatcgtgaaaggggactccgaactagtcacgaaccaggtgcacaaagattataaatgctctaaccccgagctatccaagtacctcgcagaagtcaggaagctggagaaaaggttcgatcggatcgaggtccgacacgtctatcgcaaggacaacatcgagccagatgatctagcacgacgcgcgtctagacgagaaccacttgagcccggcacttttctagacgtcctgacaaagccatcagtaaaagaggtcagcggcgaagttaacccagacgcccccggcatcagctcggaggccacagaggcagaacgcgtcattgccgaaatcgaaaccacagacgactagcgcaccccactgatcaaattgatcaacagcgaagagttgcccgaggacgacacagaggccgagaaaataactcgtaaagcaaaaatctattgcatgatcagcaacgatctatacaagaaagcgccaaacggggtacttctcaaatgcgtctcgtccgacgaccgcagacacctcctccttgatatacatgaaggcatctgtgggtcacatgccgccagtcgcacattggtcgggaaagcttttcgacaagggtttttctggccaaccgccctcaaagatgcatgcgacatggtccagtggtgtgaagcctgtcaattccacagcaagcacacaaggctacctgcacaagcgctccagactatccctcttacttggccgttctcgtgctgggggctagatatactcgggccattcccacgaagacagggcggctaaaggttcctattcgtggcgattgacaaattcaccaaatggatcgaagtggtacccatgggggaaatcaaggccgacaacgccattaaattcatcagagggatattttgcagatacggattaccgcaccgcatcataaccgacaacggctcccaattcatcaacgccaatttccaggattactgtatcgggctgggagtcaagatatgcttcgcctcagtttctcatcctcaaagcaacggacaagtcgagagggcaaacggcatagtactacaagggatcaagacccgagtctacgacaggctcatgtcacatgacaagaaatgggtcgaagaactcccatcagtactatggaccgtacgcaccacaccgacgacgtctaacaaggagacacccttcttcctcgtgtacggctccgaggccatgctccccagcgagctacgacatcagagtacacgagcacaaaactattccgacgagtatcaggaggagcagtgaaacgacgatgtgaatctactcgaggaacatcgcgaatgagttgctgtccgagcagagggctaccaacaggccctctgccgttaccacgagaagcgcatccgagcatgcatactttcgatcggcgattacgtcctccaacgggttcaaagccaagcagggcgaaacaagctctcacccaaatcggaaggaccatacacgatcacacaagtcttgcggccaggcgcattcaaaattgcagacggtgacggtcgcgagttagcaaactcttggaacattgaccaactacgtaaattctatgtatgagtcaatagtatccatgcctgtaagacaccttacagcatcaataaagcctattttcaggcgcagattacaatcaaagtgttcctgcccgatgaccccttacccagatgacacctagcgttgaaacctatccttatgtccctttacgccgtcttgacaaggcctccgaagaacctaagagaacttcggctggggacgcccagagccgataaggccttgtcggatcctgtagagacgaaagaccatgtaagacctggtcgtgtaagagttctcgccgtgcgtattaaccaagccgcgtaatcggaaattaactttccaacttcacggctgggggctaggatcagtgcttgttcaaccgaggcaggtcataggtccaagagccttgtcccccgagaagaattcttcgacgaaaaggctggggctagggagagtgtacgactcaaacgactgaccaaagtcgtgaactgagaaaacactcttacacactatatccagagtaagaagaattcatcaggatagatttcttttctatttcgcaaaatacttcttacaactttacacaagtccaaaaccatattacattttttctaagatatctatcacagggtacaaagactaccaagaaggccaacgccagtccatagactggaaaaccttttccgccagcggcgccatcgacttcgccaggtggtctatctccgccggagtcctccgagaacgagcgaacccttcatggagaaactcgaggtgcaattgcggatgatgatctcatatgcaagccaacacatgccctccagcatatcggctcgatcgacggcattcctgcttcagggcttcgtcaatgcgcaggccgacgccttcgagctgagtacaggccgacgccgccactgtcctcgcctcggcaatatcgcgacttatcccgcgagcgccagcttcgaggaggtgccccatcccgacttggagctccccccagctgaggacatcggcaggcgggccgcgaacaggcccaagatcaccagataggccatggggcgtcgcctcccgacttcgtggggcaaccacgacgtcagtggaggcagctgtaggagacgcactggaggtctcaccagacccatcctgcgccgccttcgcccgcgcccacctacaaaagatcatcacatgcgattatcaagactagtcgccagatctccaaccaaaggaatgaactcaatcttcatctacttacttctcgcctagcgtaaccaacttctgtcgtcgtggaggtggcggagacacgtccgaggcctaagtaaaccaaggatgatttgaggaacgacttttctgattacaaggtcaatggctcaagaaacttaccgtgggggaggacgccttccagcgactgccgagtacggaggtgaacttccttcccctcctcggggggcggctcccgctagtcgcggcagcagcagcagcggccgcgttggatgcctcctgtgcgacaccctctttcagcgatgccaccgcctggtggtccacgagcggtccgatgacatcggtcagagggagaacctgcaccgcatgaagtcgttatctgatccaggagcaagaatagaggggtcgccgaatacactcacgttgattgcggcttcacgatcggccacctccttctcacaaagggggatggggatgtcacttgccgttgtggggccactgatcatcagttggccgacgcggcgctccaccgtttcgctgttcaagcctgcaagtcaaggaccggaattcggtaagccaggaggagcacacatataaggaggtcaaatcaaatgcaagaaaaataccccgaggagaaacccgggtcgtgtcctccggcccagaatagtcaaaggctggatgggctcgagcctggagcggctggattcgcctaccaacgaagtcggcagcgatttcatacccgacaaacttcgtgctcggaggtcgtcgatggcctcgacgaaggaccgaagggcaggggtcaaggtaggctttgtggtccaagatgaaatcttgtctggttgttcctcgggaacaacaaagacaggatccgaattctctatctaaagatagaaccacctcgcccgccatttgctacgagaagaagggcactggaagtggatatagcgcgacttcaggccatcccgaagtcagaatccgatgcatccagacacccggttggattccgtccaacgcaactcatagtaaaagcggaagagatcaagaaagggctctaccccaatgtaggcctcacaaagatgtgcaaaaatactgaggaaggcaatggaattagggttcaaatggagcaaagaaaggccatagaagttcaaaaccaagagaagaaattcagaaggcggagggagaaaactacaaagaatatagtcctcgatcgcaaccatgcgacccaggacaggctggggttcagtacctccaacttctctctccatgcctccacgaccgggaagggcgccatcttcctggagcttcttcagcgacgcgttggtggaggtggacttgccgagatccattgtcgactggagatcgccggagaaaggacggagagtaacgagctagggttttttgcgggagcggagaagacgagaggcatttggaggctggaaagtttctccacaataggcggacttcaaaatgaatccccaaaactcccttaaatagacgcacttccgatggtgcgaattccaaggaaatgagagagatggccgccggaaatttctgggtccgttacgcgcggcagtttttcagacttcagtttaaactcactcatgaccattgggcttcacacgatgttctcgactatgtcctgtctctacggttcccacaccaagaacggcatcagcctcgacatcagaagtcgcgattggttacacgagctcatttaagcagaagtcgggggctactgtcagggttacgggttaggtataccctttacccttcgatatacgttacatatcgatatggcatgcccgcgcatatatggacattctctgcatatactaaggaaatccttcacggagtttgcagaaaataagagtcctactcggacaagactgggtcgtcaatgtatcgtatagggtctgatgtctccgagttctacttggaaaccgcttgacctgcgatataaaagggaccccctgggaggacttaaggcatcgaatctcatagccaacacaacgaccacagcctacgaagtcgaagcctgcaggagccaaatcgccgggagatctagtcgaaccaactcgattacaatctcgccggtgtcatcgagttccatcgttccctttgtaacctatgattttccatcatataatcccatatcaactggattagggctattacctatcaaggggcctgaaccagtataatgctcgtctttttgtttgcttgatgtcgtattacgtagatccttgtaccaacgtaccccaatattctctatatccagtctacgggtatcacccgtcgataatgtacatatacaaagtttgtatatctttttatacgtgtatatatgttttatacagcaaaagtgtatgcgcatacatgtaaaaaattgatttacgtatatatacaaagtttacacacatattatattatatatatatatatatatacacacacaggtacaatgggcatcaaaataaccaggatattgttgtgaatttggctctggtcgcacgccccgtgtgggcaggcacggatcaatcaccctctactagggtatatggatgagatagtattgtatccggtttgttatggtagaataggattagtttccaaatctacctaacggcttgtttagtaactcgagggaaggggattgggagtttacacaagggaattgctgatgagattaagatgagaatttgatttttaatcccaatatcttgtttggtagatgtgatggaaattgatagagagtttagttggagattaggtcattaataaaaacagatggctgagatttgcttagacaaagtaaagaaggaattccctcccaattacctgcctctacccaggtattaaaaaggagagagttcctccctcaattccccattcctatcgcaccaaaattgtcatgtctcccaaccaaacaaaacacttaatagcctcatctctttaaactcccaatccctcctaaaaactccctccaaccaaacgggccgtaagatccaatccatgtattacaatatataccggtccctgatgcttaatacaatgtatcaatatttacagtatttctctctccctatactattcaacatagtatcagagcaggcgacctagagccgccgctgccccgggagagttccgatctcccgtgggtggacacctgttttttttcctatcttagtcgtcgtcttcgtgttctacttcttcatcgcgtggtggtcttcgcgtcgtcgcaaaaacagcaacagcaccagctacctccacgagtccacctcggtcaccgggggtcatctccttgctggctccatctcccacggtcgtcgtcgatctgatctgctcctccccgccggccgctaacttggtgttctgccgtcggcgcccacactggagctccttcccgccggcactgcagggcagccaccgccacgccgggtttccgcgaccgccactccaggggacccgttgatccacccaccaccgccgggagagcccctccacatccggtgcgccgctccggctgtcctcgccagtcgtcacggatctggcgcccaccaggctcgccactgcggccgctgcctctcggggtgttcgtcgtcatcccaggccgccggctggactcctactccctctgttttccacacgattggaaccgcctccgcaagcccgccgtacgcaccgaggtcgtcatcgaagcacgctccggttccagcacgccagggcacgcccggagcgaaagccgaggtcgtcgaccactgctccgctagccttgccatcgatctcctgctgcccatctctctctctctcttatctgtctacacgtgcgtggatggataggattttgagaacaggcaaaactggtatcttcccgattttgctgcttaccaaaattatgatctgttagcagtttcacatgtcctaaaacgcgatgtatctgttttccaattgttgtacgactaaaagctctttcaaaattcgcaaaatctaattagctaattagcttgtactagttgtgaagtcatgtaagggtggtttgtacgttggctgtgtttttgattctgcaacctagaccagaagctgcggctcggtacgtgactgtttcaacgagctgaggcctaagtcctgcaaagaggggagagcgggagattggacatcggctcggctctaatcatgagcttgattgcagtaggggattggacacgcgtcattagttcacgtggtgtcgcacgggcgggggtcgtgcggcactgccacagataattttttttccatgaaacagaggattggagttgacctatttgctggactgctactggtgttgctgctgctgttgtaccttttcttttttctcctgatcagagatcgggtttgcgttgctcatcacctcatcgacatttgcgcgtctctgacattagcatcgactctgcttcaattttatcatttcgcctcgcgcatctttggcttgatcacccgttcaagcacttggctacagttacttttgcaaccgatcatcatcgagcacgtgtctacgccatcaagctcgcgtcgtcccctcggaccggagtgcttctatccatggtccacctccactagttgttgcagtgctgagaggcgcccccctcaacatagcttcatcacaggtggactcttcgccactgcatcgacatggagctgcaactgtgttgttctctcggaccgcagctttgccactttcgtcgtctctatcgccacctacgcatcgacacccacgtcatccgcactgatcatcgtcagccacgcgggtcttcttcatctacttcgagcatcgccgccgcgtctccaagcctgtcactgttgccgctctaggtcgatggtccagctacctctacatagctaccaatgtcgccgtctaggccattggtcccgctacattgccttctacttcgtccagcattattcatcgccagcgtcgccgtatctttctcgactacacttcgctcttctccggcaattgcgtgctgctccggcaattctccctcttctctgttctcgtgccgcgactatctcgcaggccttctctgctagtctcctccgacattggcgtatgattcatggtggtcccctacctcgcccacgcggtattggcaacaccagcacgcgcgttcgtcccgagttgtcccggggtctggcaaaccctgtatgacgtctcgtccttcacgattcgactacatcggctcttcggcatcatctacctcaatgattgtcacgatcgtgtcaccgtcatcgtctccagcgcgtcctcacgcaccttggtccacgacgccctcccgtgcatccacgaccactctacggcgccccatgcgtgccctacggctcgactacctcgacatcatcggctcctcaattttggctacatcgaccacgtcaactttacgcacggcttcatctaccatggctccctcgcaccctttgctttggctacgtcaactactacacaaagggctatcatccgtattgagcattcttgctagtttcttctccagtccaagtgtccgcgctgctcacgtttggattgtgggggatgttagagtatatggataagatcgtattgtatccagtttgttatggtaggataggattagtttcgatctctatctatctgagtttacttaagatccaatccatgtattcctatatataccggccccaagactcaatacaatgtgtcaatatttacagcattcctctctccctatactacccaacaccctcattctatacatacatctttggtttctatagtaccctcaactagtctttgcaattagatccaacggctttaattcacatgcaaacattctcctacatatataaaagtgcacaatccgtgtgctctcctttgattggttgagattaaaaacataacaacagtaatatactatcaatgaattactcatgtaacggcgaaaaatacgagtgagccaaattcacaacaatatccaagttattttgaagcccatttctctatctctactattataaaaattgaagatgtttttgccggtatttggtatgccatccgtacatgagtcgatttttaagttcgttcgcatttgaaaatacatatctgtatttaagtaggtttttaagtttactcgcttttaaaaatacagaaggagtcgtataagaaatttctttaaaaaaaactcggatgctaacttgagacttctaaccgcagctcatgattttcttaaaaaaaatttatccaagcgaattcctacaataaatttcaccttaactaaactatataacaataataaaaattaaaatagcctttaagacgttgtgaattgctatgtagcagcctgctgaattttatggttgtgtcatccgaatttgaggtcgtcggatatcatcaagatcgagagcagtctcgtcggcgtcgacgtggccatgatgtggtcgacggcagcgaacggagactcgcaccgcacaaaaaaactacggcagcagctgacgagggtgcaatgtcttctggcgtgattgacgtggtacagtagaggcaaggcatggaggggtctccttggccgttgctttttatgtgactatggcacctatgttagtagatctggtgttgttttctattgcattcggctagatcaaagtttattttttctaatttgtcctatttgctgcgtggaatggagatgcaatctatcaagctatatacattcttgaggaatgtatgtgatctaaatctgtatgtaaatgaattcatcaaggattgtttttatcttttccacatgctaatttcttgacttaggctcagttagatctacatggtcatgcgatttcctatgctttgttagaaactaatagtatttaagcatatactttttttctccaaattcagtagatcttagttttgtttacactgaagttgactacttgtttttcattctatctgctatgtgaagaatactatattttctgagaaaagttttgggtataagtccttacattttcaattaattatatctatgttttatttagaatacaagagctataatttgtggcaagggctaagactcagtagaagatggagaagctaaatttcacatcacaatacatcaataaccggcagtcgattggcaatgtgagtataactattttgcaacctttttttgttagataaaaattagttttgtagattttcttagttttgtacgttttggttttgtaaattttgtagtttagttatctactaaacatgttttattagttttgttgttaatttcatagtttcattagctactaaacatgatttagtttggtacgttttggtttggttttcaacaaacattgtttaggaattttaaattttgtactttctcagtgtttgtcttatttgtctttatctttgttagtttttaaaattttgttcataatctcagtttcgtcaaaatttcagtttgcagtatttttgttcatggcaagaaacacttatgcggtactttttgtcacgaaaccctagcgatgcactcaggcacgagccacttgcccttaaggagatgcggttacaatttctattgtgaaagtttcttctcatgcccttgaggatatgcactcatgcacgggacatcttattacaccatcatggtcgatatatcatccgtgatgggatatgattgtgacccgttatgggtcatccgtgacatattacaactacgacccgagaaagataaccttgtatcgatgatgggtcatccctgatagtcatatcttaaaagggatttttttttgaaccattaaagatgagttatcccatacgagtcgcattagcccgacacggttggctcgtcaaggatgcccaatctgtactagtgacagatttcagatctggccttttttcacgttgctatgttgttgcctatgtttattgtcgttatggaggtataagagaacaagagagttagcatcatgagtgaaatgactaaaaaaaaccttttctgttgttaatgtgctctgatcggtgttttcgtcgcttgtgtgagtgaattatagttgtctctacgtgacataaaatgtttattatttgttacaagatttcttacttttaccaagggggtttaaactgtcggccacctgtaaaaactgtcggccatatacattcctgagtgtatacggtttgtcacctcccctcagccatatgtggtcggtaattgatcagattgccgacagtaccctcagcaacaatgtagccgtgggtttatgtacggcttttttttatcagagaccacgtatagttctttctcgccgacaacatttcccgagcatataccgtcggttattcattgagtgacagtataatataccatcggtcttattctcaccgagaggtttgttttctcgtcaaattgtgagaaccctcggctatttagtgaccgatggtctgcaagccttcggcaatggtatttgccataggtttttatagaccaccatccattcgtcaccctcacaaatagtattgtggagaggttatttaggttacttggaaaagtaatccaaccctcagtaattggagttttttcaaaaaaaaaataacatgcaaatttaaattttacccattttgaactaatcttgtaaatgtaacatactccatagtcacatcaacacaaaatccataaacagatccacaggaagttcaaccacagatatataatcaaattgttcaaaaatatttatcatccatcaccatagcaaaactacgtaattcatgacatgtcttgcatgaaagactttatttgaaagtttgaaacaagtctgtaacatttaaaataagatagattgagattaattctctaaactgcaagggtagtccatcttttacataagaaaaagtaagcttcatgaagttcatggtctccatgttcgcttttagataagccataaatcaatatcttcatagtcgctttcagacattccatactccccatcagcgtcatcactattgccctcttctttaggaatctcatttcctccctcttgataaaaatcattgccctcatctttaccaatctcatttcctccctcttgatcaaaagcactctgtggacaaggattgtatcttaaacattaggtactgcactttatgtagataatgttatgtactgcactagggctgagttctttcccccactttcccaactcacatatctctttttccacgcgtacgtttttcaaactgataaacggtgctttaaaaaaaattctatacgaaagttgctttaaaaaatcaaattaatccatttttgaaaaaaatactaatacttaattaatcacgcgctaatggaccgctccgttttccgtgtggaggagttgggttcccaacccaaaggagcgaacacagcctaaagcaaagttcgctatcacaaggatattttgaaataaacttatttccaacctggtcatgttgatattcagcctcttgatgatctggagcagacccaacatttgaagttgagggaccctacaattttgaagcaacatctatatattatgctacaagtatttagaaacacaagacaatgacatcataaaaatgaaacagaagccaagatgaacaaacctcttttagttgctctcatgtatactatcgatatcttgtcattattcaaatatagttagttactaaaacaggaacggaagactattacatattatggagagagtgaactaaccaactcaagagcatattgtttcataagggtattgtcacatcctgatttttgtttcaggatttataaattatttaataaattattattagaatttatattaaatgttctttaattttcaagtgaagttaaatgtgggaaataaaatttcctaaatataaagcatggatggatttaatttttattaaattctccatggttaattatactctctggaatattctcggatttttcggagctcaattcctaaatgatacaaaaaacagttcagtaattagttaatcaattaatgatctaattataattgttaaaagcttttcttgtttaaaaatccttaaattgttgtttaaaaggaattattagaaatgatcttaaaagcctaaaagagaagatctaattttaatttgctaaatctcaatataaaattggggtagataaaattttgttaaatacttctcttgaatctttagttcctagatttttctgggatttatttgagccaagaaagtatttttaataaatggaattgcatttcttgaataatttaaattgaaaaaggtttttaaaagtctcttttggctttgggccgaaagccggcccaaaacctctctatttctctctccctccccggcccagtcggcccagtccgccgcgtccctccctcctctctctcagccgctgacaggcgggacccacctgtcggggtcgtcgtcctcctcgagccgcccggccgaaccctagccaagccgcgccgccgccgctgcccttccaaattccgtcgcccctctctatttccggtcaaattgattgagggcaaatgatccttgagatctcctcttccttttctcttttggaaacatcggctaattttctttggaaaccggaggatttgagttggattcggattcatctctctcctctaaccctagactttccttctcgccgccggtcgccgtgggcctccgtcgccgcctcctagccactataaaagcacccccgagctctcctctatccgccgccacctttgccttagcccaccgtcgcgtctagcgccgcctccgcgtagccctagccgtcgccgtcgttgccgtcggttcagccgcgccgcgccgccgttgcagccgccgtcgtcggtcgccgtcgccaccatcgggatcacgaggtcgtcgccgtccccctccaccgcttcgccgccgctgtagcacgccggagcaccgccgtcaccgtcgacccgaagaccgccgccgcttcaacctcgccgccgtcgtcatccgtcgtcgtttgtcgtcgtccaagagctcggtgagttcgccgcgtcgccctctacccgttggtgtcctctgtttgcgtcgtcgcgccgtcgttcgccggcgagcatgcgccgcccaagccgtcgccggtgatgacgtcatcgctgacgtcatcgttgccgtctgccttataccgatcgtagaccgtttagatctcggccgatctttgtggatagggtagatctcggccgcctgatccgtagactgcagccgtgcacccggtccaccgtgaacccgacccgctgacgcaataatcctccttttccttttcaaaaataattcattattgcgtcataattcaattaaaatctatataaatgctttaatccgatttaatctttgaaaattcataactaattctttgtaacttagtttaatgtggttcaagttgcaaaagttttataaaataaagatctacatattaaaattatccataaatagaattaaatttatttaattctttttaaatgggctttaattagatttaatcttgtaaaattcataataaattcatatgaagtcagaatgaggccgttcaagtctcataattcatctaaaattatgatctacatgtttgtttactttatatgtactgtttatttggtttttattagtttttttcttcgttttgcgtgttagcttgtcgtttccgtcgttgcgaaggttcgtgagtgcgtcgggagtgttcagaagattaattgaagaccgattattgcaaggcaagtcacacagatcctaaacacaatcctttgagcatgttgatcctatatttaaattctctatttatttcaactgtgcatttattttcgaatgtcactgggtggtgtgaatctattcctttgttatggcctgtttgcattgattactttattctttgataccttgggttattataacttgactagttgagctttatatattggttcagctagatattagatatgattgcttagccatgcttagaaacattagcacattattgggataacttatgactcattattacttaatgatggtttaaagatagttcacgatggtcaatcgtgattggttaattaattacttgccaactaaaacttgataatggttttgagagtcgtgctcatgacaattaaggaccggttcgcgagctactattgtgaaacattaaccgtgccaaccacaagccagcgtgggcaacggctttaccttttgtatagcatggttcattgcggagcaccagactgagaagtggcggagataagcccacgggggtcgctggggagtccatgccttgttttataagggggtgattatgatccaggaatggtgcactgtggtgagttgtgttgtgcagagggtattgtcacagcctctattcgggtactttccagtatcgcgacgcatggtagacaagatgttgaggctgtgtcttgtgggtacagtggtacacctctggccagagtaaaactattcgaatagccgtgcccgcggttatgggcgggttaagcaatgtttttcgtgattagtctcacacctctcacaataattatggatgttatacctagtaataatttgcttagctcctggtttggagttagttctgtacagccgggtatggttgttcaggatggttgggcctgtgcagcatgggtgtgttgttcagtgttgattaaaatttctgattaattactccactgttttacttctcttaaatgttttgctaaatgctgcttttgcaaacgagcctatattatgccatcctttggtatccttgtgcacttgcatatttgctgtgtggcttgttgagtatgtcatatgctcattcttgcaataatcaatcaacctcagttgaagaaaaaggatacagaaggagaagacgtttggcttataccccagttgagctgcctgtgggagtggagctgaagccatcgctagaccgttattccgctgctgttttcttttcttttgtaagtgtgtaacgttattattatgatggattgtatattaaattgtcagtttgtgtacctcggctgattcctggacgaggattttatgcacaaataagttcggaaattactagtgaatttccgggcgtgacaggtatcatagcccagtccactttttgcagccaatgcccacaaagttacaaaatcaagggcaaatagcagctatgtctaagtccaaacttaagctatcaaattatgattagaggttcaacattacagaggacttggttctcataattaagcagcagtctttaaaaagtgaattgacagagcttaggcaagcttcttctgctctctggttgcatagctgttcattttttccttgtttcatcctgtgtatgtgctgccaagcagcagcaagtccttgttgcctaccttttttatgttgctacattacaaataaattagtatatgcaacgattttatataggaacaagccctatgaattgctacaaattaacaagcaccaggtacagtttcgtagcaaccaagcctcgcgacccgccgcattggtatactgtatcacctccagctaacctgtttctccccccatttaaagatttcttcctaaattcaggtttactccagtgctcacaaagtagacgccaaccctcttgagtaattgaaaaatcctttggtttagcagaaatcaaagcttgcacagtaggccaatggttaccatgcatcctcatcaacatcctctattggtacattgccttttttatataacatattggtagctattttcttctgttcgaacagcacctgtggcacttccttcttgataatatacctttttaaatttcagattgcattgcatcatgcttacaaagaggaaaatattaataaaatatggcaacattttgaactaagatgtttgtgctgctgaatttttttttgcacaattttaatactattgaataatgttctcttcattttgaagtatatgcatgccatttcataaacttatccggtcaaagttataaactcttttaatgcaaacatacatgagcatagttttatcatgtgaaaaatactcccacaccattacatttataaagaaatgagataataattaatttataagattgggacacaaccaaaatggtgccatgaagcggtacatacagcggtggggggccgagaagaacgaaataaaaaaggaaaaaaatggctatgagaatgactcgcacggagaggatatatgagaaagtggagaaacatactgtctttgatgcgaagcacaagatgtcctatagatgaaaacattaaaaataaagatgacaactatgtgcttaatatggtagagagtagagagtccattaatttattgcgcccatgtgtccgtgatcatatctactttaatttgatctaaaataaagattaaagaaaacaagttactataaggacgtttgttttttagttatagcctatgcagtacagagtattttaccttttttttcatgcaaatatagttctctttgtcacatattattgccgaaggtaccattgtgaaccatcggtaaagttgtgtcctctcagtattttttccatgtagccgtgtcactctatcttggccttcggaaacatataaccattttcgagaggtatattaaaccactctgttactaatatatcccgtcggtcactaataattgtttccgagaattatattaaacccctcggttactaatataccccgtcggccactaataatcatttccgagagttatattaaacctctcggttactaatatactccatcgggccactaataatcatttccgagagtcattttaaacgtctcggttactaatatgccccgtcggcgacttataaccatttctgagtggtttcttatataactctcactcacttaaatatcccgtcagccacatgccaaatagtcaagtgttctcttaataacccttaataaccctcactaaaatttcaaatggtcggccacataaatctttctgaccgtttgtagaatttttttcttagacgcttggcaaatctttggattctagtagtggttggtagcttcatggtataagcagctgtcaatttgagcaataaattatggaatatcactggtacaaaacatttgtgcttgtttcttccaaaaaatcgcccgacttgtgacatgacgtgcgacatgccatcgtcatggatgcctttcttcctataaaaaacgaatctaggaccgaatgtaatatgttctagtactatgaatctggacataaggacatgccacatttgatagttggttttttgtgggacggaaggaataaattagattacgatttgttttcatgcttttttgacgtctaaggattcaaaaagttggaaactcatttatataggtggttgtgctaggacgaatgcttgtctctacggaaagttggcaatgggatcctatcgatgggccaagatccatggataggggcagttgtgccggggtcgagacgtcgcctcttctctatccttgtcatagaagtcgtcgtcggagaaaccggttcgtcgctccatgatgggttgattcctgactatatttatagttgatgtgtagggcaacctggttttgtacgtatgaaacaatacaatacatacaattaaatgaagacacgaggtttatacaggtaaaagtttaactcctgtttatatggattgatttgagatgttggagaatacggtggaaacttagtaggctaatctggcgacaatgggatctcgacgggagacgattatctgggggctcgaggtggatatattattagctctggcatctggcgatataaggttgtgtcttccattgatctgcgtttaaccccaaggccgctgcttatgtatacgtgaaaccatgtcatactcaatacggacttgggcaggttcaggagttcaaaaaattaattccctggatatatgagtatgtcgtctaccatcaatccccatatccacataataattaatgcatgtaccggaaaattttctttgtctgacaggtcggtatcccctatttatttccttgatatatatgttcaagtcttttactttgaatgcccaaacaagtctttgtagaaatttgtatataattttacaattagttgctttgctgttttgtagttttggtctacgtaccttttccattatcagataatatatctgatgtttttttctcttcctgccatttgttttagtatgatactatttgatattactatccccctctaatcacttcagttttccttggcttgttgcaaatttcaatctcttttctactagcaatcttccttccagacatctaactgaagctaaaggtactcaatttccaagtcattgtttgagtaaattctctgtgtacccctgaaaactcactcaatcccttttatacccctaaaattaatccgatcccttctatacccctgaaatttcaacttgatcctttccatacccctaccattatattttacttcatttcactagctactacatttggttgcaaatgtcttttttgcccttgatgttttaagttttaataataggtaaattggaaccatgccattgtacttttgcaaagtttgagatatgccatcggtatctcaatgacatgtaggacccacatgagtcaatggcatgtgggtcaggatgccatatctcaaattttgtaaaattataatggcatggttccaatttttccaataatataagcttgaaaaagattgaaaattttgtttgagtgcatagtatgtacatttttatgaaactaatgagactaaataaaacaaatgtactaaattaaaatatttatttgaaattttaataagacaatggatttttttatcgggagcattcataaaaaaaattattgtgagcattggtagtcctatctttatataaatgctcctcatcttttatgacttcttttaaataataaatacatattttttatttcattatctaaaaataaattttgtgataaataatgcatcacacaacaaactcataataataatagactcatgcgacaaacttttacatttttaataatgtaattcataaattctattttcatccaaagggtaaaatggtcattttcatagaaattagacggtcaactatggtcaactgaaggaaggagtatgaaaaggatcaaaatcaaattttaggggtatacaaggaactaagcaaaatttagaagcatagaagggattagctaaaatttctggatatataagagattttctcttataaaatgtctcaagtttctctttctcatacaacaaatttttgtacactataaatttatatgtttgcataccatagggcaaaaatagactttttcataagagtttaacaacgaactaacgcaaacggtgcagaagagatgcaaactaaaatttggaagtataaagggaatgagcatactgaagagcatagggattagacaaagttttaggcgtacacagggaattttctctttctcgaaagtgtatggagtaaccaactctatcatccaaaccttatttactttcctcaaatcggctttctatgaatatgaaacttcatttgttataacctactcctgctttatttgtctctctatctttaatttatgatatatccccatatatacaatgacgataaattctgccataacaatctttttgtaggctctaattttcacctgcacttatgcaagttgtcaatgatattcctctatggacagttatgtctccaagaacaaaactatgtaaaaaagaatcacctagcaccaccgtgcacacataagccagtaggaatttaggcatgtgcaatatataaatgctccacagtaatctgttatcctaactgacagctgcttataccaaactaccaacaaataataaatttttggtgtcacagaatgacaattacatgttccccaccagtgacaacacactgatcagacctgttaacaacggaaaaaggatgagtctgagttaatggcaagataatatcagacacgtacatcctttttatatctcaggatggagactcaattaacggctaattaaaacgacaaaagcattatccccgatggtttcacaactactgtagtatataaatattcataccgcatgtcaatcttcttactctagcattcctcgtcctgccctctaaaaacaaaagaaagaaagaagagaaaaatgagtaataagttacacaatagtagtagacattcatttctactggcttggcattcctccaacctcgcgattttacacgaagcaatcagaataatcccgagatatatcgtcgccattgtcgtggaaattctgcgaggcctcctcgtgatcctcctcctgggcttcgtcctccacctcgccggcggcgaccgccacccgccgccggggccgatcgcctgcgcgcgcggcggaacatccggcggctgcacggtcacgaacatctacggctccttccccgaccgcgccgcctgccgcgcggccggcgtcgcgtacccgcgcaccgaggaggagctcgtggcggccgtggcggcggcggcggcggcggggcggaaggcgaaggccgccaccaggtactccaacagcttcccgcggctggcgtgccccggcggcgtcgagggcgagggcggcgtcgccatcagcacgcggtggctgaaccgcacggtgcgcgtcgacgcggcgaggcggctgatgacggtggagggcggcatggtgctgcgtgacctgattagggaggccgccgcggcggggctcgcgctgccgcactcgccgtactggtcgggcgtcacggtcggcggcgcgctggcgacgggcgcgcacgggagctcgctgtgggggaaggggagcgccgtgcacgagtacgtggtcgggatgaggatcgtgacgccggcggcggcgagcgaggggttcgctgtggtgagggagctcgccgccgacgaccctgacctcgacgcggccaaggtctccctcggcgtcctcggcattatctctcaggtacacgtgttgccatgtactatatgcacgtgcttcagaaatgtccacgtcaacatgctcaggccaaactgcgtgcatgcatgcatggcagatgtggattttcattcctggatgggatatcccctcgttatttgcatgtcatataaatagttatttgcatgttatctaaatagttattaaaaagattaaaatatatatatatatattaatacgaaatatatcacttcacaaatatgcaagatcaaattcaacttctataagttacaacaaaaataacaaattaaactgaaaaaagttatcgcacattagtaactatatttgttatttttgctacaacttgtaaaaattgaatttaaacttacatgttagtgtgtgatatgtttcatattaatctatgttgccaatttttttatatattttttgatgactatttaagtgacatgtacgaaacaagagtatatcccctcaaagcatgaattcactttcccatgcatggcccctactctggtgttcttttgttttcagagagaagaaacattatgctttcgatatttttttttcttagctaggtgctgggaataattgtattttatgattttttttaaatgtcctaacgtattatatattttttaattacatggcaaacgtgcacacacaccactacgcacgcaataccacactcattccccatgaatgtgacgtccaacacatgctttaagaaaaccaatggtatattctatcacactaaaagtctttttcaaataccaactatatatgtgtaatattcatatatacaagtattaaatcctggtgggtggatatgatcgataacatcatcacaccactcgtgcttcctgggaagaagctataatttgggtgggcgctaatagtaaccatcattatatcacggtcatgcatgggagcacacttagagcaaggttaatagtatagccaaccaaatcatctatagctaatctaatagctcatttatacaatagttaaatataaaaatatactacaccattaatatccggtcccacctattatacacacataacgtcttggagtccgtgttgcagccggttacaaatctatagtccgttttcttctctcttttaccttttcttctcgatacgtggttatagttggcttgtagtttgctattgtacccgctcttagagcaagtataatagtgagctataagtctactataaacttatgtggagaaaagagataaccaaaaatcaagagtgttggctctcatgtaagagctaacttaacacaagctctaaaacaaatacagtaaatatatagatagagaggagtagaaaattacagccaaccttatagctaatctattataaatgttggatttaacataggctaacagtaggaagatagctctaccattatcttgctcttatggcaaagatgtctcaattaatttggggagcactctagcgatattcgccaatagtgtcctgatttcgatatgacaaatctacagcaggtagccgtgtgtggttgcgtaaagaataagacactatctccatgaaaaaaataaaataaaggcgtacaagtttttcgcacgtggtcttcaatatagaacactgattattaattcatttcacactatataccgccaacaactacgtatttaacatggtataaaaatattttcaaacataaagttgatatatactatatcataacagtaagtatatttatttaattcaaattattaattagttgacagccaaaagtagttttgtcgtgcacacacatgtccacgctttcctgcaggtaaccctggccttggagccacagttcaagcggtcggtaaaattcgtgaagcgcgacgacgcagacatcgctgagaaggtagcggtttggggccgcctccatgaattcggtgatatggtatggttgccggggcagcggcaggtgatctaccgtgaggacaaccgtgtcaatatttcgacgcctggagatggtctcaacgactacttcggcttccgggcgcaaccgacgctaagcatggtcggcgcaagggtcataggtgattgaattctttatcatatctcaaaattttctgagatgagtagccagggtagaaacctctttttttttttttcaaaattttccgtgcccctttcatttcatattataagttgctatgtggtcggtagagaaatttactaacatctataactccaataatgttattacatgtaacattaaaaatatttcgataatatatttgttttcggtagaaaatattgctccaattttctataaatttagtcaaatgtaaaaaaagtttgatcaaaaaaaataaaaacaagttataatatgaaacagagggagtaactattttttttatttattttttttagagaagggtattttttatccggtctgggctctacatccaaccgaatatatgcagcctttttaaaattagaaacttagcctatcaaacaagatatacgtaactcttaaaataatctataatttaaaattcgctcctatgaagtaactatttgaacattatattggcgcagatgagtgtctagaagagaatccaatgtacactgacactgcccgatgcctagcatcccgtgctgtcaccaagatgttcgacctcctggcgtacggcttcaccaacgacggcgccaccttcaccgggtacccggtggtgggctaccagcaccgcatccagtcctccggctcgtgcatgggcagcctggaggagaaggacgacggcctcctcctcaccaccacctgcccatgggaccgccgcacgcggggcgtcttcgcctacaacgtcgccttcaccgtcccgctctcccgcgcgccggcgttcgtggccgacgtgtccaggctccgcgacctcgacccggcggcgttctgccagatcgacgccaagatgggcgtgctcgtgcgctacgtcgcggcgtcgtcggcgtacctcggcaaggcggaggactcggtggacttcgacgtcacctactaccggagccgagcccgcggcgcgccgcgcgcgcacgctgacgtgttcgacgaggtggagcagatggcgctgcgcgggcacggcggcgtcccgcactgggggaagaaccggaacgccgcgttcgacggcgccatcgccaggtacccgaacgccggcgagttcttgagggtgaaggacaggttcgaccccgagggcgtcttctccagcgagtggagcgaccgggtgctcggcgtcggcggggcgagcccggccatcgtcggcgacggctgcgccatggaggggctctgcgtgtgctccgacgactcgcactgcgcgccggagctgggctacttctgccggccggggaaggtgttcaccgaggcgagggtctgctcgttgttgcgagacgctgccgatggctaccttcgcgatcgtcatggcaatgtcagggttaatgcaactagtacagggaagcattcactattgcacgaatgattttcctaaaaaaacaataggttggacacggattataactggtcgtgtctgtaaaaattgactcgcaccatatatgaaaatcttttatagatgtatcttaagaagctatatgtaaaaatagggcttttttccagaaaagcctcttaggcggccacagggaaatatatatttttgcaaatgggcctcttaaagttttacccaaatatctgagttaccttctcttttccgttttagcactctaattttttttcaattcatccttatctactctcttctactttctctcctactcctctctttctcatatccgtctctctctctctctcaaactgctctctcctctctctctctagcgggtacgtggcggtgggcaccctacgcatcaaaagcggtgaggggtgacggctgcaacggcagtcctccctgcttggatcccatgaatctgctagcggtggcaggaggaggagcacggcggctgcggcagcggccctccctcgcccagatccggtggtgggaggagcttggcggtggcggccggctgcagcggccgatgactggcaggtgttttgcgatttttcctcagatttttgtattcgcgtacagacgatgtaagtacccatataaaaaaatagcaatttttgtatacccttcggagtagatgaatcagagatccacacgtgaaagtcacttttgccgtcctagaaaaatcgtttttatccggtgattgtaatctttaggacttggcgatgtgcgacggctgtctttgaggcatggaattgtcgtgcgctgagttggcttatttatggaccatttatatattcgccttatggtcgatgtacggcattgtttttatttggctaccgaagcaaattaatcggtacaacatcgaaaaagacagtcaaacataacaatataagtgcgacaaggtaaagttgaaatgacaggaacattatttttttcttagtagcaaaatattttgaaatatgacagcagcgtgtaagatcgaacatctcaagatcacaattacataacactgagccatattatttgttaacgaggcacaactttaaaaatgtgaaaaagaacaagttcatacattctatatctataagcctacaagttcatacagatttttgctaactaaggatgaaaattcacaaatagactttaataattgttttcttctaatttgttggttttattaattgttctagttattattgttgcttgactattgactctctttgtgagagttttataataagttataaccatctttgaagcaaaggcctgatttatatttcattattgaaaaaaggctgaatcctagacatccagacactacggacacagcatcatcgctaagatattctaggaatagatatgccagttaacctctctattaatttaagccaaattctaccctgcacctaaatctatttttcatacagagtaaaagttaattcatttatttataccttgatttggtaacctcaaatagtgatcacaaattcattcagctatgcaactgttcagagaaaaaaaaacaataataaagtcattcggataatatgctggctgatgtgatccctgccatctatttcatcataaatggaaaagattggtatatataacatgtgtaaaaaccgctacaatgacactgagccatacacaacattagcaactgctatattctcaaccgtacaagcagttataatacttgaaatgaaataaattgatattaatgttgagatatcgaccgtaccacacaatattctgccagctcagtttccctttgatgctctcaacctactgacaattctgaacttttactccaagaaaacgtgtgtcatgtccatttttgctatttatggaggaccaaatatttatgacaaagttaattaaggtttatgttaacacaacttaccaaaccttgtggtttaagataaatatttacactggaggtatgggtcgccaaataaagggctattgtttttattgttataaaagcaaaaaatataataatacgctaaacatgttggttatttttcgaattatacctgcttggactaaaaagaagagtgactcaacttgctaatacttgattccgaattttgaaatttttaaaacactaaaaagagtccatgatatttttcgatcgcttgttttctttaatgcaaactcccaacatgttttcggtgatgataatccacgtcatcagtggatataatccctccgtttgcatattacaggacgtcgatcggtttgttctaagtgaaagttcttcatgctagaccaaatttgaaaaagaactagtaacatctgtatttataacggtccatattccacaaggcaatttccaaatttttggtccacctgcaatttttggtaaataatttactgttttgaattagcaattttgtttctttagaacatcaattttgttcaaaattacccgatatgtgttcaactattaagtgttccgtctcaaatgttgggcccatccatcctcctgaaatgtttgcaattttgaaatataaaactctggcatgaatgagaacggggttaagattaggcatatttactatcactgccacagacctcctcatcaccaacggttcaaagttgccatttgtaataggcaaattttattgtaggccattgagattttgtggttttacctcctacacatgacaacactacaagaaacctgttaatccatgacggattcttgttgacggattctaagactgtcactggtaggcgcgatctgtgatggttatcttattttcgtcatagatgtgcactagtggatattctcggccctctaactcgtgacggttttatttggaccgtcacagtttatgactataaattcgtcatactctagttggcccaaaacaataggccctctatcatatatttagtgcaaagaaaaataaaaaaatgtgattgcaaaatgaatcaaacccaaaagacaatttgtttttgaactaaattattttgttacttcgttacttgtatgcgtatggtacaactgaaaatattctgtatatatatagtgtgcgaacaaaaaaatatttggagcttgtaggtattgaacctagcaaacgtcataaggggcaaaaagcaaacgtcacagatttatataatgaatttctataaaaatatattaaaagttaaagcaatttaatcaagtgaattaatgaggaaactaaaattttcctttgaaaatcatggctagaaatatttttttaatattctaagtggtccaaattattctctaaaattttccgtgaattttcggagttcaataactagttttaataccacaaagttcatttaacttattaaaataaataaaaaacaaattaaaatccctctctatgtccttgggcctttttcagcccaagtgttactcactccctcccatagtccgtatcccctctctctccttgggccggcttccccttcccctccaccttcttcgggccaccggcccagcccatttgctcatctctcgctaagaagtctatttttcctccctcctctcaattaatttcaaaatattaaaacttcgaatcgatttttatggcactaaatcaactcgtataaaccagcaagaaaatcaactggattaatcgataaacaatttagttgacattatgtccttacaaccttcatttggaagtatagctgtctgcacttgcaaggaagtacggttatgaagaacgaaaatttagtttattttagactgaagattcaagagagaccagagttcatagagtcgaatggagaatgatcaagagcttggccgagttaatcataacgagtttgatcttgattaattagtctggtccaaaaaatgggcgaattgcgttgagagcaaatcaggaacaacgccagctatgcataaaggtaaaatatgacacgtaccaaagaacatgaacaagctgacctcgaacaaaagtacagaaggacgactattaagtggggatttttgcaccattcaaaatcagaaactcaaattcaactttagggcaacaaatttcagccaatttaccaattaattaaaaaaatatccaacttttaaattaggagtggcagtgtggcacctcgcaaatgaatacattttcaacttgattctttcgtagggatatttgtgtatgactgcacctgccagaattcaaactcagtatcctggttagtgtaaaggctgaaagttcgcgaaatgaaaatttttaggtgtcacatcggatgtttgaccggatatcggaaggggtttttagacacgaataaaaaaaataatttcataactcgcctggaaaccacgagacgaatcttttaagcgtaattaatccatcattagcacatgtaggttattgtagcacttatggctactcatgaactaattaggctcaaaagattcgtctcacaatttcccctctaactgtgctattagtttttcttttaatctatatttaatgctccatacatgtgtctaaagattcgatgtgatgtttttgaaaaaacttttgggatctaaatggggccttatactatttcctgtgtccaagaagttactcaatagaaatttttcagaactatagaatatgatatttgccaagcaaagaaaaatgacctctggtgttccaataaaacagaggttgcaaggcatcagtcacacatctatctataatctatctatctatttataactatactaattaggcactttctacgagctcccatgttaattagaaagatcttatcgttaattagatagatcattttatcaccaccgttagattgaatatattatattaaataaggcatacaattaaataaattatgggctcattagtttaatgtcaccaagttaatagtgttgttttataatctcacgtatttcactggtgcggctgatttgggcgccgatctcaggattcggccagaagaaaattaaaaaaaaaggaagtctaacatggatccgatctaatatatctactccgtctgttctgttcgctaatgatggaaaaaactgcgaccatggcgccaccacaccgtgatttttcacttttgtgggctgttttaaaagcctgtcaaatcttatgtccaagggcacacatcaataatctatcttagatctatcttggagagtattaaccaatcagccaggcaaataaaatatggggacacgaggccacaagtggaacgagattgatttttccgtcaatcaaagattgatttttgtctgagacgacacagatcagaattcatccaggctcgctcatatacaccaacatctatcatggcatataatttttttgaggggttgacaattgataagaaaggttcactcttagtacatatttaatttatcatctttttatcgtctcatctgtaatatatacaggtaggtagctttcttattgatgctgatctcatgttgtataaagtactgctgattttatcgacataacgatctgttcttttttcccttttttttagcatggatagttcaacgttatcaattatctaaaaaaaagttcaacgttatcaaccaatgtacctgcatctcccctgtgtgtgttttagctgaagcgttgcatgcgtgtagcataagctgtctacatgaagcagcttaacagaattcaatgacaaggtgattatggattcatggaagggtcaatgcattaagatgaacttacaagaaaaccaggtttgaacccatttttatccggttatattttaatctatttttatttgattaagtacatgcatttacgtttttaaaagaattttaatgagataaggaatttaccgctggctcgcgagcgtgagaaagagttgtgtgcgtctgtgcatttttctatgtgatgaaaaaaatatacagagattgatatgaacaatatattaatagcgcgtgcaaatacgtgcagaaagccatcagtaagaaattttatcgtcaaccaaattttaataatttgagacaccacgccaattaccaagcacaactcactattcatttgttaccgattacaaaaatatcaatcaaatagggaaaaaaatataactgagactctcttcatacttaataactcataatttctcaattaaattaaaaaaaccaaaaaaactatattgagaccttgttgtgaattaagagattagaatacaaataaaactgtaatatttataatattaataataatagcccgtgcaatgcacgggttggcggctagtaaaactaattttatataaacttagttcacctttggacaattccaaaatatattataacatgaaacagagtattatgagcactgcatcacagcacaacttaatcaaagaagcagcgagtattactcacgatgagtttgcagccttctccagcagttgccacagctcaacgacagcagccagaattaatggtcctccgggttataatagttgttgttttgaacaagagtatggtctctgaaaaaaataacttagacattattttgtattataatatgcacagaagtgttaacaaatatatgattttattaatgtactttataaaactaatctatgcatatagtcaccatatttttaaaactaatctttgcatgtagccatcatatatgaaaggcaaatattttagaaatgatttataatcaaagattctaaagtttaatctcacccttatctaaaacgacatgtattatcagtccggatagagtaattatcttattcctgagaaatatgggcaggctcgacgccacatcacagttcctaagatttggagttaagaggaatacactgtcatggccgctcaaaattggcttagacaccagccaccggtgaatctgcgggccgagtctgatcaaagtggtggctccccacgtgaaactgcacaaccacccctcgctgacattgttttcacctgtagagggcttttacagtgcttgagaggtatggaaggtaccttcctccatacttcaaatccaccattgatttataaaagggtaaattcggaatatggagaacaacgaaaacaaaggcagtttagtaattcttttagccagttcagtaattatcattcgttaactttctcttattgccgatttgatttcctcatggagtaattaagatggtaattggctgctttctcatcgctatgtgtcggcggcacttgggtacaatttcctacaaataaattgagagtagtattgtttttttcatcgcaaaagcattacttacaattggaccattcataaattctcttcgtataataatacataaagacaaaaggcatatacatgtcgattctcccctttcaaaatatttcaacaataaatactgtcaaagttgattacttggttctttgatcaaagttttgatcaagcttagttagatgagtatgtttatacttccaaataagtcttacgcaagattacaaagttcgatgtctttaattaatcgtactgctaattgttccctagttacctaatttcaagcacagttaccgagtttatctcagtagttcgttggaaacaacagttgctttctaatttgatcacaggtacaaaattacctatatgaccatctaactttttacttaatacctggcccatatttttagtaccttcatgtaactatcttttgttatatatcgttggattaccagctatcaacggctataatgtctcccaagcatcttagaaagcctctcacctgtagttcaaccatcggcccatttgggtgtccaaacagaatatctaaaactcccaaagtctctcattccaattaggcgtgatcatctccccaactgaagcaaacaatttcaccttgatctcctcacccattgtcaatcctgggatgttacaacataacatatggctcgttagtactctctcgtttgtatgaatttccttgagagaagttatattctatttatgctatggctactcatgcagcccataaatactgcaccaaccacaaacacactttgttttgttagcaatatagaaacaaaatgtatggttgtggtagggtatattcatgtgtcatatgacatgtgtaagaaaggatgagcagaaaaaataatataatgtatttaatgatcatgcaaattaaccaattgcaattttctcctgttcagcgaagcaaaatctcctgttcgaggtgaagcaattttcttcaatgtcctcactaattgtcagtactagaacttcaatgtcttgaactcggtcacacgtacttcaatgcacctttcaccaagctgttttttgagatattactgttacattgcagtagtatcttgaagtacgttacggcacggtgagttgatgacaacttgagaccacatgcagagtctgagaggacatggactgaccggacgacggctgaatctaaacatttttgaatttatctaaactttcgtatctgcatcattccaaaatgattcttccttcggcaatctatccatcaatcggatatgtgaggaaaacttgaggttcccgctgaagttacatccccaaacaaagagtcaaacctcgaccagcagaaattcctactgtctcctattcctacgagccacacatttggctgaggctatgaaaagacgaagaaatattaaatagtgctagaatttcacgataaaacatatcttgtgccttttttccatctttatctgcctcgaacagaaacatgtctctgcaatttatgaagatacctagaaggctagaagctagggaagtccacgaataaatagagcaccaccagtcacacccactttccatggccagagttaagtgcaatatcaatttcttatctgacaaggtacacaaattgaaaccaaatcttgcaaacaaaaactaacgacacaacaatttgggatgaatacattgttttttttattcataacaattaggcaaattttgttgtaggaccctgcgactttgtggttttagctctagaacacgttaaaagtcgatcattagggaaagacactgtcaaaatgtgattatttcctgatagacaccgcaagcattaaattctcggactttactcttcgagctcatatcacttttaggataggtggagaaaatagtattttcatgcctctatttctaatttctccgtgacctaagatcacgacaccgaggattgtttatttccataatataataggttcagccaaacatgactgatctgcaacactgaaataaggagaatgtaagtaaacaagtcctcactgacgtcgtctgtcttgaagctgttagctcgagcaggaaccccatgtgtccctcctcagggtcaggatcaccactaattggcgattgcttttcctcgaagaacaaggagaagaacatcatgaccgatctcatagaaccagccccaataacatatcaataatcgaactcgaaagaaacgccatagaaggtctaatactgaatataacaccaaggcacgttattatctgttaacgaggttcagccgaaacctacatccccaaggcactaattacggacactactctcttatacagcatattacagtgtatctaggtatccaccctcctagaactacttgctatagtagaatggctagaggatagttatacatgtctgcaagagctatctgtcaggctaaaggctactcatttagtagtactacagtagtgaatatagtgactgtaatgggactcttcaacctatctctaatgaccagtaaacttgtggtgctgcagtagtgaatatatgtgtttctcaatcgaaactcaaacaacttttgagaagaaagcgaacagttgaatttgttattctttgacattttcttgacaggagtgtatagcattttttggaacagtgagcattgaacacgtatgtataaccgatagcctcgcgcggcaggtgaaatcgaagatggcatcacacatcacgattcttccaaatccatggccataccgggtgtttggtagtggcacacggtatttttgggacgttaccgtgttcctgttcgtacacccgtaagctacctagtgttttgttaaactctcggtaacatttgggagcatacgggagctttccttgccctggtagtgttcgcagccagggaatcctgggactgcagagtgccaattcaatctatccaagactgcaatataattttctgccagtaataccaacaggattttgatctgtgttctgttgtatgtgacgatatgttgcaacagtatgttcgattctttgtttttgtcttcaaagttttcgaatgaattcaatctttttaatacacaaagagaggttccaattttctggctatgcaataaaccgctcaggaggagccagaattcagcgatgggagtacactatttactgtggctaattacctaattccccacttgtctccatcacttgaatcatcactgatgcatgcaggactggtaattcctggtttgccggccaatcaattttgcaagactggtatcgagtcctcaccgacggcggtgattgccgatgaccacacgcctgaatcctctaggattccggcgtttaccaataaagtacttgtttatctgggccaaattaacagaagattaaaaggtgttgtggtcacggccaatgccaagcaaatcaagcaagttgaacaaactgtgaaatgtgtagtattacctgtgcggcagcagaataagaaccaaatttcctgatgcctcctattccacacatcatatgcactgctaaaataatttctttttgatgtcatatgaaaacttgaatatcgtggagtgtgtagtgctctttccgtcgtaagatgagcctgcactatttacgcaatggaaaggtaaccacaaccataatggacaatggttgtgcaccaacagcccagcaaccttcctattaaatcacagtacatggtagtactatctttcagttactgcgtactctctcaattgcacattataaaacaatttttcatgtcatctctcgtcgagattcacacatgtaattcacatacatagatccatgcattaattaatctattaaaaaaccaaaatgtcttataatgtaatcatagatagtagctaaaaagtacacattacatatattcaagccaattctctcaataaaacgaccaagaattaatataattcgcagaaactcttgatggctttcttttcacattgtcgcacaatttacactattagccgttaacccttgcattacataatcaatcataaaaatgttacaaatgagattttgcaattattaaataatgaaagagatcttctatggtgcttggaaggcatgacagccattgattacatacaatctgacatataacaaaaggtacgtagagaaaggtactaaatatgtgggctaggtattaacttaatacattaagtaaaaggttatatcagtaattttggatgcataatcatctgatgccgttgtgagagccgatacagatacagatcgagagaacatacatgagcgatctgcagcttggatggctcaatgggaagataattatctgtcatggaggctgttgatcaggatgttcagtaaatttgattgaaggcaaggattgctccttgatcaactgtcgtacataatgaatggttacaacaaattgtggaaagaggacgggaaggtcactgcttcctgtgtctatggattaatcgaagataatagtatgatcttttcaataatcccattttagatgagaatcagtaaaggaaagaaggatatggaacaaattatagggacggacggaaaactcagtagagttctagaggtcacagctaataataattactatactacccatgtttacgtttttctattcctaaactaccctttaaggaatgaacggtagatagtttatacgagaggaggtacttggaatacctttcaagaaccgtgaaaggcctcataatgaaaatagtatacttgggatactgaactgaggacagtacggtatttattaatttcgatattcaggtactcatcaggtacaactcaatactactcctattaatttattgatgtaatgtttttgaacaaaatattgacatatttagaccacgctaaattatgcacccctaccaaaaaaattattatgaacatttgaaccggattaaaaaaaatcaaagagacataagatataccgtgttcttataatcagtgatggctttcgctagtgcaaactcatgttatatatttatgttccagatgtagatggagccgatgtttaggactgcgaaacttacctgcatccaaaagaataaatacttgtttgtcagtaaaataagttgacccattttctcgcattgatgtcgatcaacatgtcaatgaaatatgaagggttaactaaaggatcatgtgaattggtatattaatccatgatcagattgaatacaacaattagttcaatttatggtaaaatctggactaaaaaaggtatttttgagtgccaaaaaataccttacccttcatattgctagtacacgataatcataattgtacagcctgattaagtatattgtgacatgctatatatctgtatgtttacatatttctttttttctaagtgagaagtgcaaattccatatgcagcttacttttttttatgtaagtggttgttgctacactcaggttactagaaactttcatgatacaaatgctattaatggtttccttttacattctctatcttgaggaaaacaactgtacgaacgaaaattgccatatggaaataaaaccaacaagatgttgaagaatctgaaggaactttggtacgcgatgttgatcattctttaaccaaagcccttaataagaggacatgcaagcggctggacttctcgctataccctctccatttcttgttatatgtcactttaacttttttttctagttagatattttcaagtttgattaaatttataggaaaaatagcaatactttaaacacaaaacaaacatattatcaaaatataattaatatgaagataatttggtgttacagatgttgctagatttttctataatcttgatcaaactaaaaaaacaacctataaaatgaaacggattggagttagtatttgatatttctggttggactagcatggtatatctgccaacctaaaggtcactagcccaacagtagcactgtatgggcttgtgatatagacaatgagcacagcatcgaattactctgaatctgtctcgctctaaaatcaatacataatgaatcactgtcagtatgaatcatggaaagagtaccactgaaattcctagtgtctcccatcccaacgagctgcgatgtgttggccttgtttttggtttatagccaaataaattagcactgtcaaaaaaaatgacacctgtttggtttggaaccaatatatttggcatagaaacaaacatgcccaatttatatgctcaatctcacccattttcatttgtcaatcatggaatgttacaagaaaacttatgttatatatgcggtctcttctcatgagtttcccttaattagaataggtgtacgctatttatggatgctctggctatgtatctcatatatagagaatgcaccagccgcccataaattaaactacttgcagttacagtgccatatttaaaatatcaaagccatctctgcaaaatcataggaaccaatgaaacagctcattttccataatctttccctttcacattcataatatagagctatagtagcatgaaaaggctgtaacacattgtcaggatttgctccttcgttcatattataggttgttctagatttgtttcaagtcaaacttatctatgtttgaacgcgtttataaaaacattcagcatcctttcgatacaaaaccaaaatatattcagtgaaagacttaataaactattttgttttgtagatattgacaagttttctataaacttagttgccttaatacagtttaacttggccaaatccaaaatgtattataatatgaaacagcgagagtattatgagcaccgcatcacagcacaacgtaatcaaagcagcagcctagaatgaaagatcttactcatgatgagtttgcaaccttctcgagcagttgccacagctcaacgacagcagagccagaattaatggaccttcgggttgataatacttgtcgtttggacaagagcacggtcttaaaaagcaactttgaccattatttctctattataatatgtttgaaagtattaccaaatatatgattttattaaaatactttttaagactaatctatacttgtagtcatcatatttgaaatattttaaaaatgaatcataatcaaagattttaaattttgactccacccttatctaaaacaataagtattatcagcccggagggagcaattatcttattcctgaaaaatatggccaggctcgacaccacaacacagttcctaagttttggagttatgaggaatacactgccatggctgcttaaatttggcttagacaccagccaccggtgaatctgtaggtagagtatgatcaaactagtggctccccaggtgaaactgcatgaccacccctcgttgacattgttttcacctgtagaacaaccatcggcccatttgggtgtccaaatagaataactaaaactcccgaagtctctcattccaattaaggcgtgatcgtctccccaactgaaccaaacaatttctccttgatctcctcacccactgtcaatcctgggatgttgcaacagaacatgactctctttggtatgaatttccttgagagaagtatattttatttatgcaatggctactcatggagcccataaatagtgcaccaaccaccaacacattttgtttcttagcaatacagaaggaataaggttgttttttcgtacaaacaaaatgtatggttgtggtagggttcatgtgtcatatgccatgtgtaaaaaaggatgagcggaaaaaaatacccttattataattaacataatgtattaaatgatcatacaaattaaccagtagatttagatccaccaaataatatcaccagtggtaagatttgcacaacatatttttgatagttttctttgagcgaaagaatttttcttaatttaacatgaactagtcgaattttacacattgcacacataccaatgaggataattccccttccatcacatcttcaaatgttatgtcctagtgtttgatgagagcacttgatgcatccaaaacagcgtgcaagctcgaatggaaatgtcgattgggacatggatgcattcttcaatgtatcccctacttcgcaaaatgaaaaatagcaaaaagcagtgtaaactatcgtttatgggttcagttgagcagaggcttaactaggaaaaatccattagaattatttgctaggctatgttatggactgtatctcttgatgccgaggccgcaagtcctaaaatagatacattgggaaaatagtcacacaacatgtttatgttcggcatggttgtctgcattatgaagaatattttcataatattcgccatagttacgctcacaaaaatgcgtttaaacacatttattttccgtttaggtatcaaagtacctaatcctacccagaagtgccgtagagcttcgaaaaatggccatcttggccttttttctcgatgacatatccccgtacacgtgagctccgacaaaacaacacccaagcttttcctaacaacacgtatcaccttgctttcccttactgcgagaagtcctactatacccaaggtagttgttcgctcacttgctctaaaacactaagcacattctttcctttccgaaaagcggtccctacaaaaaataatatttgattttcaataatcatagtggaacatgtgagaatagtcagactcatatattgtttgttttgctacctttatttcataagcaaaagacctcttagctagccggggcaggcgtgtaacctgatgtgcccatctcatttattcactgtcgactattactctttttcatagtacagtattttaagtttcctcactccgattaattgtagaacaagaatgctcggacaaaagttcctcactgaggcgagggttgcctattagactagatgaccaatggaaagcggatccaactctctatctgcaaggctaaatcaataattcaagtcgcacactcccgtaatccgccttattttctttccatcccaaagcaggtcgagcccacttctgaaccacagccgatgggtcctccgatcctgagctggaatctacagagatttaatgagctcatcaaccaattcatatttcttgttcacagaacagatttatggtcaaagagaacaaccgcgtcagaatttagtctgttcataaatggcgacacatgcacattgcaaacaaatcagttgctcgcatgatgtgcaattgaacatttctaacggtcagaaaatttcaatctgtagtgtttagattgcagggagcatagactatcttgtttctgcacaaaagccccagcttttactgaaagcataaatgtgtactatagaccatctagtttctgtaacactaataaatcttgttgaaatggattaagctatgcgacgcacaatcctaacatcatggcgaacctcatgaattcggtaatcttacgagtgtaagccaagcttaaatgggtaaataaggctgagtacatgcaattggtatcccctctgtatcacatttcagcgcacaaatctcctgctcaggtgaagcaattttcttcaatgtcctcactcattgtcagtacaagaacttcaatgtcctcaactcggtcacacgtacttcactgcacctttcacccagcagttttacgagatattactgttacagtacagtactatcttgatgtacactacggcacggtgagttgatgataacctgagcccccaagcagagcctgagaggacatggactgaccagacgacggctgaatctaaaccattttgaatttagctcatgtttcatatctgcatcattccataacgattcttccttcggcaatctatccatcaaatggatatgtgaagaagacttaaggttcccgctgatgttagatccccaaatgaagaatcgaacatggaacagcagaaattcctaccgtctcctattcctacgtgccacacatttggctgaggctgtgaaaagacgaagaaatattagatagtactagaatttcatgataaaatatatatatcttgtgcctcttttccgtctttatctacctcgaacagaaacatgtatgtgcaatttatgtagatagctagaagctaggcaactcacgtataaatagagcaccaccagtcacccactttccatggccagagtttagtacattatcaattttttgtctaacagggtacacaaattgaaaccaaatcttggaaacaaacactaccgacacaacaatttgggatggccacattgtttttttattcataacagttaggtaaattttattgtaggacatcgtgactttgtgttttagctctagacaatgtcaaaagttgatatttggaaaaatacactcccaaaaggtggttatttgctgatggataccacaaatattaaaatattgttttctggttgtatacgagagaaaaagcgtgaaatgtcaaaaatgcccccgcgggcccacttatcgttttcttcccccacatctcagtccctctcacactttggccacagcaccatttccgcttgccgccggcgaccaccccggccctccctcttagcctcctctatggcagcgtggcttgacttccctcgtcgcgtttgggcggcagtgtggcctagctcccctcggcgcacacgtgtagtgatgcggtccgtcttccctcggcgcgcgctggcagcgacgcggccccgctccccggcgcggggctgaggcatcgagcggtgtcaaccctaagctgccttcaagtgaagaaggtggaaggggattatggcactggtgctaggggtagggagagcgaccaagagagagcggcgccggtctgacgtaggaggagggagtgtggcaccaactgacggctgagaagaggaaggagctggctgaggggattgaaaaagagagattcgaaggtgcaatttgttcacaatgcgttgaaaagtgggcctgctctcgccaagttagcactaaaacactaaataaataggtgcagtgttcgctaacaaataataaagtatcttcccctataagtgactttgtgcggtgttcctctgctagagaaagtaccgtgaaaagaggtatatatgacggtatatgagctggtataaaagcacaaaatgttattccaagtctagcctatgcaataataaacaataacattcatcattttagttgtcgttgaatagataataagatatataaagccaaaggaagaaagaaacattaagagtactgcccatgccaacttgccaacctatctggagatcttcatatttgaagccacagctttcgtacctgcagaatatgatgaattaaacaagcaacggaactggccgtcaaaacatttaccgacaccggaacttaattatatttttgatggatcagccgtacaactgtagaatggttttgtacagggacgacgccagcacaaagttgcaatacactgttcaaaatcgccaggacaatggttcaacaactcaaactccaattcttgtgatatgcatcacaaacatgccggatgagcccaatcacaatattgaagcttccgatgataacacacatcgtgttagctttcattaattgtatccgcacattgtcctcacaaacaatgatagactagcatgctcaacacgaacgtcttggatctttcgagtttttcgaccccatgtgttcacagtggcaaatttcaatgcaagctatcatgttctagctttgtgtaaccctactgccataagtaaagttcatcggccacttttcctactgcaaatgaaattcctaatgccccccatattacaacaagctcatgcagcgtgatgtacgctcaaagatgctatagggtgccaacccaagtacgcctttaagctcgtaaatttgtcattgatatcgaatgcatctcaaccaccagccaacgttttgttgtggtcgacctaacatggcatacatataccactttatttatatattcattttgatgttgttagtatggtagcactgcacaacgcgtgttggcacgtacctaaggacatctatagtttttggtttgaccagtccgatcaacaagccaaacaaaatttcagttctgtagatgcagaattaaaatctatttgtgggatccacgcaaaggaatcacccaatcaccagtccgttctccatgcatgcatgcatgacaaataatttcctattcattcgttggattacaatttagagttcgatagctgcagctggtagaataggtggtgaataacaagttctatttgattacatttggacttggagtcgtaatagctggtagctggtggagttaaagttggactctgtaatccgataactctctttaatagagaggggggcaacacaatgtaaccatagcgactacaatatagcatagacacgcagggagatgatagcggcgagaccatggactcgtagcggcttagagatatattggttggggaggaacgcccataatcagagccccggagatataggcttcggatgaacttcgttaacaaatatcgtgtgttactgtgtcttcatctgacgtgtcttgggtggtcaatggctgaagcaatttagaaggttagtcattgttccgctataacgactaaattttgtaacagcagcatggttcgattcttctggtaaaaaatcgattttgccttcaccaagtagatgctccagggattctctctacgacgtcaagtacaagtgttgtactgtttcatattggtcgagtgttgtagcaggaggcatacaacattctcctattcaaccgaaatactctcattcacttaccaaagaggcttttactcacagcaaatacttctcggcctaatgtgacaggaaaatactaaaagactgacgcacgcggtaagaagaccagtctagaaaggagtattttagactaccacaagagaaaaataccattcaactaggtagatgaagcctgaagttaaggtcgttgagagagtaatattccccaagaatatatagtggggagcattccaaccacccccaaagctagcacaaggtgtttcgagggaccacacacatgtgcaaccatacccctttggatttctaactttacatgggtattgtagtatcttcctgtgtatccttggggtaggattgtaatatcacatgttccttggaaggctatataagctggtctcaatataatcagacacgagatgagagatatcagaataccataagacacatgagactccatgtcgacaaatattggaccccatgtcgacaaacctgcaagcctcgtccatccgcacactactcggcccagcctgctgctcggcaggatgtgtaagcatggcgtctagagtggcgtggctaattcgcgtgcacgcgccagcaacgttgctggcgcgcgtgccaggtggcaggattgccccctccccgcctcgtgatttttttcgctttctcacgatttttttcgttcccttttacgattttttctgattatttttttaaatctccagtacacgtgttttcaaatattttgtgttgaaagtttttaaatcttaacttaaaaattttcaaatctggacttcaaagttttcgaatctcgagttgaaagttttcaaatctgagttgaaagattttaaatctcgagttgaaagtttttcaaatctcgagatggatgttttcaaatcgagttgaaagttttcaaaatttgtcttgcaaatttatattttgagttgaaaattaagttttcaaagtttgagttcaaaattttaaaaattgacttcaaagtttaaatcttaagtcgaaagttatcaaatataatttaaaagtttccaatctgttagtaaaaaaatttcgaaaaaaaagaaaatctttttcttaattactgtcattatcttaactaaatgggttagttacagtaacacccgcggaaagctccgttagcggcgcgcacacgccagctagctttcgcgcagcccgcatggcatggatgagtgccgctgaatgtacaagtcagggcagtaattaatggactgcccagtccagtgtggctttcccgtgtgtctcgtgaggtcatgagttcacgtcttcccgaggcaacatggctaattttacaaacagggaaactttattaggtgaaccaggaaaaaactgttttttgtaaataatttttacgatatgtagctgatgattagtccactgtggcatgaacatcggcttaatttgagccagggtgggcagctgctgttcatagtaggtccatagtttttttttctagttgttatcatagattctgaagatataatcaacacttaattattttaatgactattttttggacggcaaaatttgctacaggacatctaaaaaacgggtaattagctgggagacatcgcaagatcgcgtatttgctaaagggcaccacaaaaaaaggtaattagctgctggacacccgtgcgattattttattattttcggaggaatagtagagagaaacaatcattaaagacaagtttgccctttgctcaaatgaatccaacgtgggtcccacatgtaaatccctctctctttttgtagatggggtggcggagcggcgacacaccggagccgacgaagggtggcaggcggtggtgttgctgatcccatccgtttctccacccagacgcatcgcccaccctgactctccactccaacaccatccaaaccgaggagaggacccctgctgctctctcccatctcaaattcgccgctagctgtgaggaacacgaaggccgccattgcggacaagccatcgccatcgccaactctttcctattctatattcccctcaccatgctgagaatatttctttttgacgccactctatttcatccattgcaatgacaggaacgctgtcgtgtcatcgccgactctagagcgagcaccgagtgccaccgccgcatctctgtcattgcgccggccaccgtggacaaaccaagccaagccaccgcgccagcatattctcctcggcatcctcttcagaagcccccaagaatccccgagaaccgagcgtcgagcagggagaacggacgttttcttcccaagcaccgaccaccgtctccatctcagattccgtcgcctccgatgagccaagtttcaattcctcgcatgaatagcttcttagggacctctctaaccctttggggagatttaaccgtcgctgttttccagagatgaagcgccgccgccaagctactacacgtgctgctgctggatagggatttcaggtatggggtgaacaacgagtgccctgccaggctgccaccaccaccgtcgttgcttcccagcgccgcttggccgccgctgcaaccagccgaagccgtcgtcgttgccagaagaaggcaagaggaaaggaaggagtagagaatgatagagaaaactgaaaaaaaaatcatacttactcatgtgttcgaagggtagaatcgtacttacatatgtgtttctctctctaattccttcggatataataaaataatcccacgagtgtccagtagctaattaccagctttttacggtgccctatagcagatacgcgttcctgcgatgtctcctagctaattacgtgtttttttgaatgtcctatagcaaattttgccttttttgacaaccctgaatgatggttaaaaatggtctgtggctttctattcctgcagcgctgttaattttttattagaaacacagtacaaacacatgcgcacacgatgcgcgattgcactaattctgaaatgttagttttatttcataaacagctgtactactacttatttgacatatattgccaatatcacttcactataaaaatatttatacaccggaccatatgatttactgcctccgtgtctatatatttgatgccgttgacttttttaaacatgtttaactattcgtcttattcaaaaacttctgtgaaatatgtaaaactatatgtatacataaaagtatatttaacaatgaatcaaatgaaaagaaaagaattaataattacttaaactagccgtcaacccgtgcgttgcacgggctattgttattaatattaacacatatcaaaatatattaattatatgttgagtacattagttattaaatttaattgaaagttatatgtaaactttttgttgaagtatccgttgtaatttttcataacacaataattctaaaattcagaatgaataaatagaacaaagtagaatttgtatggagcagaaattaataaatatataagagtcatacttagagtggatttatggatgaaatattttttttcgtcataaaataattcaaaaatccagagttgacaaataaaagcaccctacatggcaatacaatttaaatttctcatgatttgatatttcgagacacataattcataaacatgtcaaattgtaataaaaatctctaaattctgaattttaacatttcctctaatttctaaattttaatatccattatttaataacatggaaatttaaatttagaattagctaatcgttgttcttttctaagctgagtttataatttgctgtcgcctagatagatgaagtatttaaattaaaaatgttattttttggcatttagtcgaaaatggaaatttagctcactataagaaagtactatatctctttcaaagctctgctgctccaggaatatcagatgaatataataaggactgtacacataatcttttcaatcaattataatgcatactggttataaaatccaattataaattttatgatttcataattatgaaaataatgaataatacattggagttgtacttggtttggagttcacataatttacaacttgctaagtatgcatttaaaacattgcaattaaattaacaaatttatatcccatgctacttttcatgtcatattttaatttacatgaatcataatagatcgaagatcatagtaatgcgatccacctaatcaacggtggtaagtaagatctttttgtctaatgtgcgagcatcctcgaagtgtccaattaatattggttttcatacaaattcttgattgatcaaagggcattggtaatacgatcgacctaataaactaccagatctttagatagttatcgttatagtaaacatgagagctctctcggaatgcctataaatatgaacattatttgtgaggggaatatttataccgacctcttttgttaataattatcatgtcggttacgatttatgccataacaaagtctgattatcctgaccttgactttggacgcttccttcgcatcatcaacagcttgaacaatgtcatatgctactgtagttttggtagaagaaaaggtaagctgcagactacatgcagtgcatacgaacgtacataccgacaggaaatatggaaaattaaatattatttgctagtttatatttagagaaaaaacatagataagggttctgtgatctgtcgactgacctggttaccggattattagcacggctcatcaataggttaagatcaacagctgtgtcattatttcagtcaaaatcagtaatcgataattagttcttaaacagattgcaacatgtatattcaacgaataccgtacagctcgctgggaaacgatgctcagtaattcattactcaaaagtccaaacaaatcaaaaatcaattaatttgactgtatacttagcaaggtttgattatttgtttaacatgcaagtttgactgtaccagcgtgaattggggagcggtgcagatgtgctcgatttttcgatcggcatctggacttctcaaatttattgggttggatgatgatgtttcagatgagtctgaatcaaaatcaataaaaaaccaatctgtcaaagattgaggtaaaatagtagctgagttagagaggttttgagattcaaaattgtcacaaatcgtgcggagtatctcgtggtcgctggagtcctctctcccacatctctgtcgttaattgctatcggagagatgagatcgatatgtatctccctagattactgccgatcagtgagtggtagagaaaaaatagatgggctgaaagagcccatgaagatagaaggcaaattatagcccaccacgttagatttgtacgtacggccatgatattaaaattaatttaatcaacggtgatttctccagttaacgtggaagcttgtagaaagtgcctaattagtagaggtatagatttttttgaataagacgaatgatcaaacatgtttaaaaaaattaacagcgtcaaatatttagggacggagggagtataatctagcaacaagattggactacaattaactccaaagcgtccaaggccaccatgtgaacacttctttttcgctggactggtggatggacgctggtcaatttttgttgagcataaaagagggcaaccaagcagttttacaccaacggggttattagggagcaccgcagcacagcacttgagcaacgttggaggcttggagcacccaaggaacagctactgcaacagctggaaacactgcaaacagcgaactacagatacatcttggttatcaactcctgaagaaaaggcaatgtgtaaagccacagcagaaattccaagtgcctcacattcctgacaagaatttctcatggttaactgatacgatttcctctcctctcctctcccattcttacactacttaaaaagccattctttgtgacaccactcttttattttctagcggttttattaaacacacgcttgtaaaaatatattgggggtattttggtcacgaatcactagtgaaaatcgacatcacttcataggcccgcttgtaaagatagggttacttttacaagcgggtggcttaaatgacagccagcaaaaatcttatttgtgctgacggctgattaagagcaccgcttgaaaaaaaatattatggtattaaaagagagactccgaggcgcatctcttttttttttgtcctgtcaccactcccccttttacctctcattcctccctctctctttctactccctccagtgggccacgaccacggcagccgccgagtgctctcagcgatggccaagacggcgacgaccacgcagtgtgcgggcagcagcaaggttggtgggtggtgcacaggcaatgccgaggctggtcagtggcagatccggtggtgggaggcacatgggcagtgggtccagcgataaagaggattgcgggcagcggatctggcggcgggaagggccgaggctggtgaacagcggatccgtctgtgggaggagagtggtgtgggcggtggcgaggttggtgggtagcagatctggctgcaggaggcgcatgggcagcagatcttgtgacgaagaggcttgtgggtggcgggaaggcttgaaggcgtggattcggcagcccagtggagcacggataatggccaagaggccaaaacagggttacgggcacggtggggtgtcctagagggggttcaggtccaccgccagccagccacggcctccctcgccgaatctatccttcctcatccctccctcgatgacggcaaattggctccattcctcaccgacagcaacttggtgatagcataggccaccaacgacgcgtgcgaggactgtaattggggatttggaacaatgatttgcgatttgggaatttgtgattttctgtcggctgttttggacctggatttttatttttcttctccaaaaagtattttttgtggcgggtctcttaacattgccgccaactaaaatcgattttcgttggtagacatcctagcttggccacaagtgaaaattgatttttgccggcagccgactgcccatcactatagggttgaaactggtacatatagtttcggtctatccggactatttttcggattcggataggttcggttggaattatccagaaattctcgggttcggaaatgaatttggatttttcttggaaacaaaaacgaatatagtaagggtactatccgtctgaatcagaaaatggtcggatttcgcatacatggattaaattttagacacaacacgtatatacacattactttttcatacaaagtcagatgaagtcaaactttatattaaaattgtagtgctcgatgagatctacaacattcttgttgactatgttattatttgagatcatttaagggtctaaataccatatatgtttttacaaagtctcagatatacaattcaaatgacatttgatggagatgtgttccatatcaaagttgtagagctaaatgggatcttccgctttgtagtttataatatttgtatttgaaaatatttaaagtataaaacaaactctacaagtttcgaagatgtgaaataaaataaataatatatccaatttatacagcaagaacttgataagtgatatgataagtaagctatacatgtagtaaaagattttgggattattcatatttacatgtcggtctcttggaggaacgtgcatgaaaatcgattttcacatatggttgtgggaccacctacaatatcgaggatataaatattggagacgttgatcaaaaaaaataagcgatatctcttccttgattaaggaaactcaatttgaggggatttttatataccaataaatattcgttgccgtagtcgttccgtatctatattcgataatattcgattcgattttatttctgtatccgggttttagattccaattttgatcccagaaaaatgaaaacaaatatgataaagctagtttccacctgtttccaatctattttcatccctgcccaccagcacaaatgtattattttcattggccttatgtcgctggaggactgccagcgaaaatctattttgtccttcagcgaaaattattttgtaagtactgacagtcgttttatagtgttttaaacggtccatactattgattcatatgaagtatcttattaatgctgatcttatatcaccaaccatcccattgttcctttccgtattgtaaacatcttcaaccaattaattagcataagtgaattattttttgtggtttaccctgaaaggggttaataagcctcagtcagtttacctaaaaaaattgctggataccatggatgagcctggtacaaatgatattaagaagaaattaatatgaccatgatctagagtcgagcacgggcagagtggtaacaacagcccatgattcatctgcgctatcatagttttattatcagccaatttacatcgatttgaagtcttttttataataaactacaacacttctacatggtcagattgaagtaattatcgacaagaatgagatttgctccggtctttaaaaaaaaaatacctcaaggttacggtacctcacggtaccaaattatttccgatcgattggaactaaaatacccatacccatcctggaacggagcaaatcttgacaagaatatttgaacggcatgatttgatttgatttatgttcgaggcattgcctcgatcgggagcacatacttggatgggtgacgtttctggtctttccccttgaaggactgcgtcctcatctcgctttgaagtgaagacattagccagagcagagaatggaagacaggtcaacatcactaacacctaacaaatcatgtcagttaaccttcaattgtaaacaatggctaacttgctgttagcgtcatggaacaattgatattcctgctgtctctcactccgatggacaacaataatgtcctctgcaaccgaagcaagttctcttccctgtcctcacccatttacattcaaacaggctgatttgctgtgcagctcaagttcaatttggcgtgctgacacgcgcgttacttatatacgcaatatgtacggaactcagttataaacagtaccatccacccatggagtgattctccaagggaattcatatcaagcaatgcacacatttcgggagatagctctttcatgtcagtattaagaaatcactcccataatctgtcctgataataatgacatttttcgactcccataacttcttgcaatatgttcaaagacatagtacatctcaacattttttttttttacgaaagagccaaaatctgttgatacaacttaaagagatgaacccaaactgcattcttacacatagacgtagactcaacaatcaatccaacaacaggaatagcacaaatcaaatctaaacaaaacaataatttcactacaacgcaaagaatctattatatactaaaagtccattaagcttcctcaaaacgctctcaagccgctacgtggcgctctaataaattagagaaaattctaaaaaatatgagaaaaaagtaaaacatctatcactcgattttcactgaaatcggtgggtccaatgttataaaccgttagattaggtttatctcaagactactcctctgttccgttctatatataggtacgtattgccggcctccatccttgtgttgatccgatccatatagttacggtactgcttgcatgcgttccgttaaaggagtgtacgtacataaactttcttttttttttccaggtacgtacgttactattctttctttttttttcaggcatataattgagataataataataataataataataataataataataattattagtgataataaattttgaataaaaatactttataaatatagaatatacagcatataaatctcttcaagtagacataaataaattagctctacaatgtttgaaaacaaagttccacaattatgttatattatgtacccattattttaggttattttgtaacaaaaacatttgtccatcgatattcacttaaatcggtcctaagttgccacgtggcaccactacaaacaaaactaagctaccacgtggcgctctcataaataataaaaaaatttaaaaaagcaaaatatcggaccttaaaatattcacttaaattagtgtgcctgataattttaggtaagtccgtacttatgaacgtacgaaaccgctcaccctgatcacgtccgtatttctcttctttcccttttataatttctgaggataattgaaataacattaattattagaataaaacaattataactttgcaaacgtagactgcatcgtcataaacgtctataatgtttgaagaaagtttactgtattatattctttacacatctatctatatattatatactgaaaatccattaaacatctgttatatactaaaagttcatttaactccctataaatgctctcaaactgtcacgtgacattttacaaatattcttaagatgccacgtgacgatctaataaattagaaaaaaaatcctaaaagttttgataaaaaagaaaaaaatataaccattgatattcctttaaataggtggacccactaattttaaccattagatctctaaaaagatacagtatccccaactccaccgtataggggcacacacgtaagtacgtagtccctcaaccctccaactctcctcggagatcccactctcctctcctattttcgagccaacatttcctattttctaactaacacataatatatatatagatgataataatcagatagttaaatgatcatgactctcaaagttacatgcacttttctcaatttatttgcattttatcatgctatttatagttaaatacataattcaaaatccatttacccatatttcctatataaaatttagataatgtagttctttctgactacaaatatttgagtctaaattccagattcaatcagcaccaaagagcttggaaccatgatgcataccctggggcctgaacttaatggaggcggagttgcaagatattattaggttgtattcattagatgggtttgggagctaatctctcttacacacataaaacaaagcggctcattacattagagtattattaattaaggattagttattttttataaaatggattaatatattttttaaagcaatttttctatagcaaacttttagaaaaaacaccgtttagttgtttggaaagtgtgcgcacgaaaaacgagggagctaagtttggaaaggagggggaagaatacaaccttagcgaggtggacaccgatggaaacaccaacatcgactttccatgacttccagaagctcatagcacgctagatgattatatcaaggacaaagaactgagatgaggtggctagatgattatatcaaggacaaagaactgagatgaggtgcagagggagatgttccgcatcttcgacaaggactagaaaacaacttcatatctatcgctgaggagttcataattaaattcagaaaaaaaacaatttgattaaaatgcacattcaaaaatttagaaaacccattaaaactatacaaaatgtataataaaataactattaaaagatgagtccctatacaacacgatacgagattaagtacaatttaaaatccttaaaaagaaaatctagaataaaacaataatttgatttgaaaacaaattcgaaattagattcactcaatcactaaattcaaaatataacaaatattttttaaagaacttatcactattgattcagatggataaagaattgcgtatatatgaatcaattagaggattgacagggtggtaaaaaaacatttattgcccatagaagtttatcgagatttctcaaaaaagagatacaatgaacacccagttaaatatagaaaacacattactttaatttcagtttattttattataactatttttagaataaactaacatgcatgcccgcgtgaatgcgcgggctgtcatcctagtttaccaaatatgttagatgggtccatcacgcattgttttacgggccggtgtgccgcatatcaatcaaaacatggaagacgcagcagtcagctatacaacgttacaatggctgtgttctctccgaatagatcatacgagtctatctgcttgagctgtaccattaccagctccatgcagggtagttgatgccttgaaccagtccttacaaaataacaatattaactgacagcccggcagctttcatctaaaatattttaaatttcgctaaagctgtctgtcagcatggttaaaaaagaactgtagtttttaccccgactccaaaaatcctattgctgaggaaaacaaaacgttcccacagtacagcgatagaacagaacagaggtaattcctagtgcttcccatttccaagatccacaactatttgagaccagctgtgcagttacagacggggcatttgtaattccaagaatttcacaataaaactaccatctggtctttctcctggatgaatatttctcgaaaaggaaccgatgcctgctatttatgcaaatagctcggtcataaaccacacaccaacctgccataaacttagaccttgctgaatatttcaaagagattaaacacacaaaaatttgggaggatcacgtttgattgttttatttatatatttattatagtttttgaaacaatacacgcaagatagtgcgacgtttcgtattagtagagcagaaaaaaaatacaagattatagctctgaaagacaatagctaggaaaaaagactacaccacgtgtctacaaccagagacgcgctacgaaagagacatgaacatgacatctcgaagaaaaagaatcttctaaataacgccttcaggaagggaacaacaccgagggtgccaccgctgccggtcctggaattcaggacgtggttttcacctagtggaatccatcacggcacatgagagatcactcaacaatgcccaagtggaaatcggcgcacataggaatcaacgtttctggcttatgcccgtaatcttcctgtactcctgtgtctaggtctcctacttgatatagaagccaccatcagctgcattccttcgattcgcagccaccataccggcgccttaccgctctccccgccgtccttctatcgccgtcaggcttaccaagctctgcatcacactggcctctgccgaccacgacttccttccatcgtctaccacatctgtcagcctctcgttggccatcccgtagcatggacacgtcgactccctactcgatccatgcaccgtcgtcatagctgactgctcactgcaatcgctgcctcagctaccaccaccctcccgtccacttctgccaccccgccgctatgactgccagaaccgtcctatttccgtcgatgctgctagcaccgtcgtcctatagccatcactcccaactcccgcagcaggtatcgacctcctaatgccgacggcgtcacccgccgtgtgccaaccgtcggacgtcgtccgcggggcacaaccgctcctgcgacgtctcgcgtcgcccgccacgacggagtcacctcctcccactgccgccgcgccaggtactcgaccccagccaaatccgggtgaggatgccagctctggctcaagggaactagatccagtcggagtggcaccagatccgccgccaccatgttggagctcgctggtgaattcccaagctccacgtcgcccccgcccttgtgctggagacagacggtcatcggtttttggccctaggttgccgcccagttttccaggaagcaagctccagcggtagcaaggcggggatgagggtgggggtggtggtggcgggcgtctagggtttctccccgagccacccgagcatgggcgacgtggagcaggtctatttttattatagttggaccatattgtttccaccaataataattaaaatgaactagaaagatagcccgcgcacatgcgcgggcacattatataatgcgactgaaattttattatgaatatttatgtgtggctgactatatattaaaatattttttcctatattctaaaccaaaattaagcttatttagtgtgctttgaatgttcgttattttcttacaattacacttgcaacatataaattctaaaataaaattacttgagatcatgcagtgttgaaattatcagaaaacattatgtcaaaataatggaggtggttactatgagaaaatttagggtattttgactccccagaaggatacctcacaacccaaaataaatctaacaatatcattttttgtttgattttattttaagttttatatattttcattctatctgtcctcataaaatgtttattttttctatttagaatgggttttaaatccagcaatatcttttcagttttcaatttatttcatgtcctatttttttttggagatttccattctatgaatcatccttaaaacgctttgatctttgcaatctagggtgaaaatataaatgcatttattgcatgggtaaaggcatatgttctaaattttaatggtcatagtattttttgtgaattatcactaaattgaagtgtcttataacaaatacacgtttctagattacacgtttctagattgttctacatcaggactcaggatttaaaatgttagcatgttttaccaaaaaaataaaaaaatggacattgtctttaattcctatatggaattgacttgatatatatctaaggccacctcaaggttgtatcattgctaagattcctaggtgcaatcgacatgcttatcagtatgatctttaaccgaccacacctttattttcaacttgttgtttataatgctagatgagtacagttatgattaaaaaattgtgtcacttaaatttttttctctaatttattagtgcctttgtagatcatatgtgtaatttggatgctatgatcatcattattaagaacatttatttatctccaaaaaagattgttttaaaagtatcaaggtcaatttgtataagtacatagcccaatatgtatgttaagaaaaattaattaagtcagtagaaagtcgttatatgtctaacgggatataagtaatagatggatccatctatgtttttttttgcccatatagataattaaatttgaattgttaaggagataaacaaaacaaagagaaagaatggtgcatgccatacatgggcaaggagagagggaggcttgtgatgtttttctaaatgattaatctaaccacctaaaatgatgcattggatgtttaagtcaaaaatcaatggtcggatgttttgttttcttgtcaaattttttaggattttatctgctctacgagagcgacgtaacatcttaaaagggtttataggtagacttttaacaccgcatgccgcaacggagtaggagggatgcaaggaggtttgtggtattttaaaaaaaatagatctaatgacccaaaataatgtgtcaatcgattgaaaataatgtttccatagatttaaatcacaaccaatggttggattattttttttcaaaaattctaagaactctctgatttaagaatatcatatagtatcttagaagcatttataagatgtttaatggatttgattgccgcataggggtggggagaggatagaggtttgtgtttttctatttaataatactaacaatccaaaataatgtatccgtcaattaagtagaaattgatagtcggacacttcgttttttttaagattttatagtattttgtctaattcaatagcaccacgtagcggtttaaaagtgtttctagaatatttaaagttactgagggagagttaatagacctagtaggtgaaggtctatttgtgcgtttttttctgtaaaaatgattttggttttaattaatttctcatgaagaaaaaaaaaccgtatagaggaaggaacgggagagggaagtacgtacgtacattacataggtacgttctttgtttgtaaaaaggggaggttccggatgtggtttttattaccaaatagatctaatgatataaaataatgggtccatcaatttaaatgtaaatcaatggtcggatttctcttatttattagaatgccacttggcgactcgagagtgtttataggataccacttgacaacttgagagcgtttataggaagtttaatggacttttagtatataatagatagattaccaacatatatttttctcaatatgactttgacatctccacgatgacacatattgtacaaagttgcaaggcacaacgctatgacaactcaagcttgaattttcttaaatgcatgagaagcgtccacgatgaacctaaatatgtacaactaatgtggtgattgaatctcatgaagataaagattaagtatattatgcaaatcgaggtagtaataacgtgtgattaattgagtttatattattacaaacttaaaaaatggattaatctgatattttagaacaattttcatatagaaatttttcgtacgaaagacaccgtgttcccagtaatagcaaaagtttatccaacttttgttggagattcgaaaagggcctaagttcccggcaatagcatatcacggttatcttcgttgtgtgagttgtgtcagcacattcttctcacaacacatggaccagcgtcttcattatgaatggctcagagcttgcaactcaagctttcgcgcgccccttgcacagttgcatattcacagtggcaaatctcaattcaagctatcatgttctgaaattcctaatgcccccattcgaacaagttcccagtgtcatctgcacatcagaagcaatttgtcattgggagctcctcagatatttcactccaagctagtcttacaagacaacatgtgactgatttcaactgcaccgctgcacacactgttcatacacaatgcttacttttctgaagggtaccaagccaagcagatattataagctatctagtaagtttatcatttttattgaacacatctcgaccaccagcgtgtgttttgctgttgatgacctaccatggcatacatataccagttaatttatatattcattttaatgttttttttaacattcattttaatgttggtgatacggtagcactgtactgcgtaatagcacctgatcaggttatcttactacggtgacaacaagtgttgtactttttaatattgaccaacgccggattagttcaaacacagaaacaatcaggaaagccagcagccacacatcttcaacatgacattccctgtggcatggcccactagtgcagatctggtcatctgtgttaggggaaccttcatttgtgtcggcgaacggtttggtcatggattattggtcaatgatatgaaaactcatatgtgttaggccgggagccaccaccgattgcggtcatctttgtcaggcccaaataaaagaccatcgctaatgactctcatctgtgacgggtggtagttatgatccatcacggataagagtcatccgtgacggtttgtaattacaaacattcatggatgagaatttactttttttgaattttaaatgcatcaaaaaaccttaaaaatattcaaaatattattatgatattccaagtttccaaccatgctcacacatcactagctagaaattcatgaactttcaagtgatatgtgtatgcatatgatacgtgcgattcaaacctaaaacctttgaacacatgcaaatcaatcttactatctcacatatagatcacaggacaatcggtcatcagatattattcttttaacttttcctctccaaatataaaacacaaatttgaaactccagatttttcatatgagaacgtaactacaaagttgcagatctcatcgatttctacaactttagtgtagggtatatctctatgcagggttgtttgagaaattcagaaatattttagaattagatcacatcacatataacacatattcgggtatttcaaatttttgattttttttctcatccgtgacggttcgtaactaccacccttcacggataacgttatccgtgaagggtggtaattaagacccgtcacggcttagtgctatcatctttgacgggtcatctcattacatccgtcacaagtgatttgttagctttgacggggtattgttgtgaccctttatagtttatctgtgacgtgttagaactacgacccgataaagatgaacttatatcggtaatgggtcattcccggtagttatattttaaaagggaaacttattgagccattagagatgagtcatccgagcgagtttgctacatctcagagcaagatgtgggagtctgggtgcagccggcttgccccgccagcccgctgtgcttgcccctgaaccccgggtggatcatgagctcacgtggcgacttggcaaactggttgcaagttcataaaaacatgggaatctaggagaactaggaaaaatattatgacatgtgtctgatcaggaatctactgtaacttcaacaccgacttcaagtaggtggcagcggttgttcatggttagggcctcggtttttttctgatgggtattgtatatatgtatggcgaagatataattaatcaatgtttaattattgactgtttcgggaacaatcctgtgtgatggttaagaatggtaattcctccgtttcatattataagactttctagcattgtccatattcatattgatgttaataaatctagccacatatatatgtctagattaattaacatacatatgaatgtgggcaatgctagaaagtcttataatatgaaacagatggagtatgtaggtttctttttcggtggcaacgttaattttgatagcactattctaaaattttagtcctctttgaatcgataagcaatgagaaaaaataaacatgaatagtgtaacagtgcccccctgccaacttgcgcaagttgaaagagggagattttatatttgaaagcacatgctaattaccaacatgatgaatcaaatcagcaacggaacttggctgtcactatgtttattattcaaatcggaacatgcatttcttcatggacaagccaaaaaaaaaaatcttactatcagcctgcaactaattaatcctcttcgtatagtcgaacaacttgggtcttaggtccagcggctcaaagctttcgcgtctttaaaccgcttgcattcatagcgccaaaaacgattcaaatcctgccattagaatttctaatgcccctcattccaacaagctgccagcatcatcatctgcgcagcacacccaattgctcactggtatcccccttcaatctttattcctagctactgttacaagaaaaaagatttgactgactccaaaagcactagctagccgctgcacacacgcgatggccgacgcacactggggtttgtttttttacttatacatagtaccaagcaagcagacacttaataactctcattgttcttgaacacatctcaaccaccagacagctgtttttgctacggagggcctaccatggtataacaattagcatagtagcaccatacatactgcgtgaagattgtgttacatatctcaatataaaaaacaagtgtaactaactaatgtgaaacatgagaacaacttctcacagccacagtgtaatcagagaaccggcccaaacaagctgtgtaggatcgaaacacaagaactaagccatcaagagagaggtaaatggttggtatagctaaaaacccaaactttcagcggaaataaaagttaccctcaaattcgatggatcgcggtctgaccgaaagtgtcgcgtcggtctgaccgtctggaagccgtcgttctgaccggaattgatcgctcggtccaaccacctaaagatcgcctctgcctcctgtcatcctcgtaggtctgaccgcaggtctgccactggtctgaccgccgcctagccgccggtctgaccatcggtgagttgccggttagaccgccgaacccgacgaaacacaaatcgaagaactctcaaagtagatgataactttattacttctctctatgtttacaaagtataacaacatcactccctataaaaatctcgactaaactagaaaccataactaaactatcaactcaatttctcttaaaagcgataccgcgaagcctcacgctccctctctatttatatatgaggtaggcagcctaaagccacgaaccaaactcatactagaagtcctaatccacctaggaaaccttcccgtacaagaaacaaactttacaaactccgatcataccaaatttggactccttccaaattcgaatccgcatcccatacgcacataatacctccatcgtataccatatggaatcttcaccaaccacgtgcactgaactctacccttagtatcccgcatgatatctgaccgtcacggacatcgtcttatctccaagctgactcccgatccatcaccggcagtactctcccgaggcatgaagtcacctacacatgaatcaaacaaataaactatattccgagaccaagctatctccaacttgactcattagtagcaaacaacagtattacatacacatagtatccatctagaagctataaatataaaacaatcatagatatccaaacaaacaacccgaaaccgaaactgacacagaatcggccggtcagacctcgggctgggccggtttgactgcgcgatacacgccggtctgaccggcagcacatgcccggtctgactggaccaaatcaacagcagtagttcctattcacctgcaaattccaatcatctctaaaaccacttcgtaaataaattccaaatatcaaaaccaataatcttatatgccaattgttcatcacagaataataatccaaaacacctttggttttacaacaagctgaggcatgaacatgtagctgagtacttagctggtttcaacaccggccacttgtccatggtggatgtgtcaatgagggcgactttatatgaatttcttaattcttcagtgatggtctcatgtaaaaataaataaatttctacataattgatttttggaatattttttgacgaaaagaaataagcataattagattgtgcaaaatttttatatttcgtttctatgagaatgtatttagctagtgattgatgaaattcttcatcctttgaataaaaatgtgaaaattagggaacatctaagtacaatcccagaagaagtctatgaaaccacccaaccagacctaaaactgcaatcacagaacgattggacttattttttttaactagttatgatgttttgactatgcatcattttcagacggtgtatgtatgaatagatttcaagttaaaaggggctaagagcataatgttttcttctaagagactaagaacccatttcaagaccactgtttccatcgttccagagttgatggtgccaacccaacaaccccataaaaatagagggtgaatggactcctatccaaggcctaggtttgctagtacattgataaacgtgaagacatatttctgtcatttgaaataagagaacctcgttgtgaaatcaaagtgtgttttgattattatttatgataaataattggtatttgagataactgcttttgttatttgaagattattggcgatgtgctttttggatcggtcagactggcaaatattgtgaatagtttctgacgatgaactgggattttgtctggtggttgcagtcagaatattttagaataccatgaaaatccgtatcatgaatatttctgaccactgattgtatatgcttcaagtatgtctgtacgagcaaatataaaagcagaaatgttgttgttactcatgtgattcagccttttagtcctcttggaatcaataaaagcaaatagaaaaataaagatgaatagtgtgacagtgcccctgccaacttgccaagctgacgagtgacggagggagattttgtatttgaaaccacaggctgaatacaaccatgatgaatcaaaacaagcaactgaacttggctgtcaatatgtttattcaaatcggaatgtgcatttcttcatagacgagctgtaaaaaataaggcatcttattttcagcctgcaaataatcttgctcgtatggtcggagaacttgggtcttaggtccagcggctcaaaggtttcacgtctttagaacccttgcattcatggcgccaagtctaagcgcaatgtatcaaggtctatctttgagtaaccaaactaaagcttcaggtgctgcaattagaattcctaatgcccctcattccaacaagatgccaacatcatcatctgcgcaacacaagcaattgctcactggtatctcccttcaatctttattcctagcaacttctacaagaaaaacatgtgactgactccaagagcactagctagctgctgcacacactgtccatgcacaatggggtttcttttttgactcgtacatagtaccaagcaagcagacacttaataactctctcattgttcttgaacacatctcaaccaccagacagctgttttgctacggagggcctaccatggtgtacatttttttagagaatagtatttttttatccggcctctacatacaaccagatatatacagtcctttaaaatttagcccctcaaataacccaatttgaaattcgctcctatggagatttgaactcacacacaagttgtgctctatatagtcattttgccgttggtataacaattagcacagtagcaccacactacatcatggcacctgagattatgttagatttctcaatatcaaaaacaagtgcaacatgagcacaacttctcacagccacagtgtaatcagagcacaggcccaaacaagctgaggcatgaacatgtagcagagtacctagctgctttcaacaccggccacttgtccatgatggttgtgtcaatgagggcgattttatatgaatttattaggtcttcagtgatggtctcatataaaaataaataaatttgtacatagtacattgtacgaatattttcatcgacgaaaagaaatataattagattatgcaatatttttatatttcgtttcaaagagcatgtatttagctagtgattgacgaaaattcttcatccttttgaaaataatgtgcaaactagggatagggaacacctaagtacaatccctgatgaagtctatgaaaccacccaagcaattcttctaacagactaagaatcggtttcaagactattttatcaatcgttacataagaagttgatggtgccaagataacaaccccataaaaatggatggtgtaatggactcatgtccaagtcctacgtttgctagtactttgattaacgtgatgacaccttttcgtcagttgaaacaagagatcgcatgtgtatgatcagttgaaacgtagagaaccttgttttttttttcttttagaggcatgcaagtagcatcaaatgtgttgaacgaattatggcaacagttcagaagttcatacggtttcccattcggatgagccacggtcatcttgcatctgctctacaaaatgctcaccattgtcaatactaaagttctacaagaaaacacatggttgtgagatttttttaataaaaagatgccattgcatggctagcgaaatccacacggctaaatctatctccatgatagtttattgctacaaatagggctcatgtcacttgtgaatgggtagtgtcaagattgcaatgagcacattgcataatgtttctatacatgcattaataaagagaaacccgtgacat

SEQ ID NO: 6007 - DNA, 7406 bp, Oryza sativa
caaccatgtagatcatgattttagatgaattatgagacttaaacggcctcattccgatttcgtatgagttaattacgaattttacaagatttaattccaattaaagcctattaaagaaaagactattccaaattaattaaacaatttacaaatgatttataactgagataaaagattaaatcaacctccggaaatagattggatcatatttgatagatgacatatgttaaaaagaaataatatgccactgaaaaaaaagaatgggtttatatggctgagactaatcttgaccgagtcgaccaagatcggatggcttggattgacctggcaagcgagcctcacgacataccgattgaactacgtgacacgggatcacccaaatgatcaaccgaaaccggcgaacggaaccggcgctatgaacggttctaaactaaaggacgactcaatacggacgaacgaacgaaacacggggaaacacctcgttcaaacaaacgagcgaacaactcaacaacggttgtggctaaaccggtgagctagacacgattcacggtaaagccccggtacggcaaacgataggccggtaggaacctagggatgcacctacggctttacaactcggctaccgggctacggctaaagcggtacacggctgcgacacgacacagcagcgacggcaaacggtggctacggtagcgggacggcaacgacttggcacgcacgagcagcagcagcacggctgtagcagggagcggcacagcgacggctaggcagctagcgcagcggcgacgctagggcagcagctagcggcacagcaatacgacaagcggtgcgcacggcagcggcacaagagcggttacggtggcacatatacagcagctgcgcaatggcaacgtacagcggctaaacagcgacgcggcggcaacaaggcgccggcggcagcggcggtgcatacggcagtcggcaagcgacgcggtagcggctgctctagggttagagcaatagcggcggcgacatgaccgagggattgaaacctaacccgagggaacacggatagaagtttcaccgaaccaaagcgattggagagggagagatgacgacggcgacccggcggcaacacacggagacgacgacaacgctagacaaacaacgaattagattagattggattaataccctaggaaaaaatctacaccggtgaacgacataggagcggcggttgccggcgaaccacggcacaataatgcaaacggtgggcaccgggaggaagaggagattgagaggattccattcccgcaactaatttggaaagaggagcaatggggtggccggatttgaaaggaggaggcggcggcaacaggacacgggcacagcagctcggctctggctggaggttgaagatgcactgtagcgaggggatgcaaaacagacttttggctgggcttctattgcacagcctgatagatggagggatgcaaactagaattcggggggataaggccggccgaatagaaggaagaacgggccgaggactaaaggtgaacttttcctatttcggcccgaaaaggaaaagcggattttaattatgtcacatcctgatttttgtttcaggatttataaattatttaataaattattattagaatttatattaaatgttcattaatttacaagtgaagttaaatgtgggaaataaaatttcctaaatataaagcatggatggatttaatttttattaaattctccatggttaattatactctctggaattttctcggatttttcggagctcaattattaattttaatcatacaaagagaagttcagcaattatttaaatattaaattaatcattaaatggtctgattataattttgttaagtactttgagtgtccaagtattttcaggatttttcttgaaattatttgagtattggaagtatttttaacaattcaaagatcatttcagtgattattttaattggaaaaagtttttaaatccttccctaagtcgttgggccgatttcggcccaactctttctctctccgcgcggccgaaccggcccaatcggcccagcagccgccccctcctctctctctgtcaaagtctgttttgcctccctccttcaatcgggccgaggaaatgaagcccagccggaaaagtctacttttcctccctctgctactgttcatcttccagctctggacagagcccgagctgccaccttacgccgccttccgcctccaaatccgctccaatccgaccccgtttcttccggatttttgaggggttttgatcctctcatcctcctctatcttttcccccaagaatcggagcaaatcgttgggtattttatccgaatcaaactcgttttcgagtttatctccaaaaccgagttttgattttcccggagcgatttcttgcgggaggagtccgatctcttcaatccaaggctataaataggaccccctagtcctcctctttcgtttgccccctctcccgtcctctcccgtgacccgtggagccgtcgccaccgtgcaagccgccgccgccgtcgcttcttcgtcgccggccgtcatccgtcgtcgttcggcacttcggtgagcaccatcgggttcgtctcgtcgtcctctacgtgtacatgccctccaaatccgcagccagccgctctatctccggcgaggtcgccatcttggttcggccatgggtgatgtcagcatgacgtcatcggtttttctttttctcgtttttctaatagattaaatcttcggaaaatcataactaaataaccgtagatccgtttcaggtggttcaagttgctaaatttttctaaaatcaagatctacatgttaaaaatatccacatgtactgtttatgcttgtttttgtactgttttgttgattttagtctttttgctttagtttccgacgttccggaggagagcgttttcgttgagcaaggttcggaagtgtttgcggaagcccaaggcaagtcacacagatcccaaataaccctttgaacatgttgaacccgtttaaagctattattttatttcaactatgcattatttttgaatgtcatcgggtggtgaacctttccccgttaattaatggccgaagatgatcttattttcctatgggttataatttgattagcatgaaccttatataatggattggttcagctaaatgctatatgtaagtttgcttagctatagaaacattagataactaaaggggttaattataaactatattatattattcttattaattatggttatatttaatggtagctcacgatggttaatcgtgtgatgttaattaattgataattaaaacctggttaaggtgggttgtgagcatatggttttgatggttgtgctcatggcaattaaggaccggttcgcgagctactgttgtgagacattaaccgtaccaaccacaagccagcgtgggcaacggctttattttgtatagcatgattcatatagtgcgccagactgtgaagtggcgagaagtccatgggggtcgctggggagtccatgccttgtttataagggggtgactatgatccaggaacggtgcactgttttgagttgtgttgtgcaaagggtattgtcacgatttccccctttgcaatgccgtggtggtatttcggggcatagcaacatgtgtggaatcgtgtcttgtgggtacagtggtacacctctggccagagtaaaactattcgaatagccgtgcccgcggttatgggcgggttgagcaatgtttttcgtgattagtctcacacctctcacagtaaatatggatgttaatacttggtaataatttgtttagctcctggtttggagttagatctgtacagccgggtatggttgttcaggatggttgggcctgtgcagcatgggtgtgctgttcagtgttgattaaaatttctgattaattacttcactgttttacttctcttaaatgttttgctaaatgctgcttttgcaaatgagcctatattatgccatcctttggaatccttgtgcacttgcatatttgctgtgtggcttgttgagtatgtcatatgctcattcttgcaataatcatcaaacctcagttgaagataaagggtccagaaggagaagacgtttggcttataccccagttgagctgcctgtgggagtggagctgaagccatcgctagaccgttaattccgctgttgttttcttttctttgtaagtatgtaacgttattattatgatggatttgtatattaatttgtcagtttgtgtacctcggctgattcctggacgaggatttatgcacaaattagttcggaaattattagtgaatttccgggcgtgacaaattacttttcccaattaaattaatcactgaaatgatctttccattattaaaaatactttcaatgctcaaataattcaaagaaacttcttgaacatacttggacactctaagtatttaacaaaattgaaaccagctcatgcaatgattaatttaatatgtgaataattactgaaatattctttatattattaaaattaggaattgagcttcgaaaaatccgagaaaattccagagagtataattaataatggagaatttaataaaaattaaatccaaccatgctttatatttaggaaattttatttcccacatttaacttcacttgtaaattaatgaacatttaatataaattctattaataatttattaaataatttataaatcctgaaacggaaattcaggctataacagtgtcccacgtcgccgccgcctcctgattccacgcgcctgccggctctgtgtcccaggtcgggctccgccaccgcgctccgccgaccgcccgcgcccgccccctcgtctcgcgccgccgcctcgtctctcgccgctgcccaccgccttgccccgcacgccgccgtccacctgtccgccgctccctcgtctcacgccgccgccatccaccgatgcctccgccgtctagcgcccgcccactcgtctcacaccgccgcctgcccaccgcccggccccgcgcgccgccgtcatccaccgggaggcccccgaggtcgacgtggtcgcggcacgcagccccccggcggctgccgcctcgcctcacctcgctgctgcccgcgctcgctgcctccgccgcgtctgaactctgaaggagaagagagagaaagagtgagggatagaagagagagagagagagaaaaaactgacatgtggggcccacctgttttttaataaataagttgctgactggactaccacgcgtacgccacgtagaccaaaaccaccgcggattgggtcgagggggtaattcgtccggtttgcatagttggggggtgaagaatatccagttttgtggtttaggagagtaattcggacgaccgcgatagttcgggtgtacaaatacaaaccttatatacacaaatacaaactttgtatacgtgtatacaaattttgtatatgcgtatgcaaactttgtatatgcgtatacaaactttttatacgtgtattttttaggttttatacgtacgtatactaactttgtatacaccttttcagttttctctttctgttttagtttttttccagtttctcttttttctccttatttttaagatgtgcgtatgcaaagtttgtatacgtgatttttttctagtattgtttttgtttttttaatacgacatatacaaactttgtatacgacgtatacaaacttttgtatatatcatatatatatatatatatatatatatatatatatatatatatatataaacttggtatacgcgtatgtatatatatttttatacatataaaaatatattttttttatagtagtaccagcagtatactaatagtaggtactagtagtaatagtagtagtagatactagtagtagtaatagtatagtagtactactagtagtaattagcagcagcagcaggtgcggaccgcgcgaccagtctggtcgcgcattagctgcccccgactgataagagtacggcgttcttgccacgcccgctcgcatgacagcccggccctgtttcgcaaccgtatgatctcgccggtgtaggttgacatcatgggccgaaaccgaatcaaccccaacggtacggtgaacgaacgaacattaattactttacgagacaatcgtgccggcgagcacgtaagccgcgccgatggcgccctagcttctctagctagttctttaccatatatggattcatgcatggacacggcaagtaattaagttcctgaacaattaaacttgaggtcatcgttgtattcgtgtccttcgtcgatcggcctatatatatatgcaggcgtggcggtgaccacgcgggtggccaccacgggagaagatatatacttctatatacccctgcagcggcatgatcaccgtggcgtacgtgcaggccagtcgccatggcccaaaccagacgagaacgtaaagcaacgtcgtcgatctgtgtgcacccagccggcggccatcaccgacgttcaactgtgttctttcccaattttcctaacacctcctctcgaacatagccttaggctcagagatgctcgccgcaccctgcacgtgccaacggtcataagaaatcctcgagttttaaactcccaaccctttcccacgtgtgcaatacctcatttgatatttgattaatttcgttattacgtaatggaaaaattacaaaaaccaccccataaatcacttgaagtttaacatttcaccccataaatcatcttgttgcaaatacccacccctacttaatttgttgcaaaaaccatcctaatgtgcacacgtacttaatcaaatcaatttgttatcggtgctgtatggttatcacaagctaaactagccaagtaaatattgtccaagcgtttgcattagacttatttttcatatttgattgaacttttttttttcatatagcaaaactcagtgcgacaatgtttaagctctattttgcaattttatttgtggaatctcaccgaaaaatatgaagaacactctagaagtatttaattttggtaaagaccatattaacggctcacactttatgaaatcatattgatttggttaaacatgtgtttattgggatggtttttgcaacaaaactgagtatgtgggtggatatttgcaataaaataacttatagggtggaatgtcaaacttcaagtgacttatggggtggcttttgcaattttcccttacataattaatgcaattaatttaaacaaaacaagccaagcaaaagaagtcgagatcaactacatatatatgcacgcatggttagggaacaataatctccaacagaagtactatatatatatgccggtgtcaccgtgtcacgcgtacgtgttccggtgttcgttcgatgag

SEQ ID NO: 6008 - DNA, 2710 bp, Oryza sativa
tcctgcagcccaatgtcacgctgcatcagcatcagtaccatatccatgtcacatacatggggccgtcttggcgtgacaggccgggttcgaaccaaatggcacggcctaccttgggagtttctcataaggataattctaccgtcttaagaagatatcagaggtattatatttttatataaaatttaatacctttaaatactaaacttttttaagtataaaaaatttttagtgtaaaatctcgatacctttagatattttctcaagtacataaaatttcttttgtcaaaagggttgggagttttcttctccaaaaccccctttccccctcatgcatgcgcctctccggagcaccgccgcatgctttcagcccctcatctacggcggctgtaaccaaacgaacaccctaccacgaggccacctcctctctacttctctagcacacgagaagaggaagcacctgtttggcatggtgaccccagccgtcggcgactgataacgaaatcgctagttagtgactagtcgcgcgcccttcttcccgcgcggatggacgcgtggcgcgcgtaggaggggagggggcgcggcggccgcgcttagtgggggtccacattggtttttttcgccgttttttggggggtttcatacgggtccttttttatgttttttcttttttttccgtactttcagttttcagttttctttttttttctgtttttcctttctatgtttttttagtttttttaaggaaaaagtacgaattaccccccccccccccggaactattccggtagtacgatttacctcctaaactacaataccggacatttgacaccccaaacacttaaaaccggataaattacaaccctaactcgattcgaaacggttttcagcctacgtggcacacacgtggcggtacagtcagcaaaaaaaaacaaataaaacaggtggggcccacctgtcagcatttctttttcactcctctctccccctctctctcggtgaacacagcaggcggcgggcgggcgaggagccgaccgccgacgccgacgggcggtcggcggcggggatggcggcggccggcgggcgagcgaggatccgacgccgacgggcggccaacggcggggatgactgcgggcggcaggcgagcaaggagccgacgccgacgggcggtcggcggcatggatggctgcgggcgggcgaggagccgacgccgacgtgcggccggcagcggggatgggccggatggctgcgggtggcgggctagcgaggagccgacgatgacgggcggccggcggtggggatggctgcgggcggcgggcgggcgaggagccgacgccgacgtgcggccggcggctgcgggcggcggacgaggagacgaggccggaggcgggcgggcgcggagggggctgtgagcagcggtagatgaggttggcgctcgatgaggttgcggcggtagagctcgaggatgctggccatggcggcctcccgctcctcggtctcctcgtcgttcgtgtcgagctccttcaccgcgaacgttgtcctgtgcatgttcctccccatcacgatctccctcctcgtcggcgacccctcccctccctcctcccccgtctgcccaagcgagccgtcgtcctcgcccctgtccgccgtcgtcgccgcatgccacgccccgctggctctgtgtctgtcacgcccagaaattcacaaataatttccgaacttatttgtgcatgaaatcatcgtccaggaatcagccgaggtacacaaactgacaatttaatatacaaatctatcataataataacgttacatacttacaaaagaaaagaaaaacagcagcggaataacggtctagcgatggcttcagctccgctcccacaggcggctcaactggggtataagccaaacgtcttctccttctggatcctttttcttcaactgaggtttgattgattattgcaaggtgagcatataacatactcaacaagccacacagcaaatatgcaagtgcacaaggataccaaaaaatggcataatatagggctcatttgcaaaaacagcatttagcaaacatttgagaattgtaaaacagtagagtaattaatcatcaattttaatcaacaccgaacaacacacccatgctgctcaggcccaaccatcctgaacaaccatacccggctgtacagatctatctccaaaccaggaatgtaccattccaaaccaggagctaatcaaattagcagttatagcattatttattatggtgagaagtgtgggactaatcacaaaagacattgttagacccgcccataaccgcgggcacggctattcgaatagttttactctggccagaggtgtaccactgtatccacaagacacagccccacaacatgtcaccatgcgcctcaataccaccacggtacctcagaaaggagctgtgacagtacccctcgcacaacacaatccaccacagcgcaccattcctggatcataatcacccccttataaacaaggcatggactccccagcgacccccgtgggcttatctccgccacttctcagtctggtgccccgcaatgaaccatgctatacaaaagataaagccgttgcccatgctggcttgtggttggcacgattaatgttttacaaccgaaactcgtgaaccggtccttaattttcacaagcatgaccatcaaaaccatgtgctcacaaccca

SEQ ID NO: 6009 - DNA, 2320 bp, Oryza sativa
atgccatacatcaattgatttatatggataatcaatacatccaaaatagtttacatcgtgtacacaataattacggcatgtactttctcctcactattgttccctccttgtgatcgctgcgtgagtaaggggtgtcttcatttgataggaggatgctagggtcaatcgtcaccgtgaaagggggttgcccatccaactgatcgtaatcctcgtcagtcttgtcctcaactccgacgatttttcttttgcctgggagaaccacttgacgcttaggctcatcaggccctctgcccttctttcctttgctagacatgtccttcacgaaaaagacttgcgttacatcattggcaaggacaaaaggttcgtctgagtatccaaccttgttaaggtcaacagttgtcatcccactgtcatcaatcattacgcctccaccagtcaacctaacccattggcaccggaacagaggaaccttgagaggaccatagtcaagttcccatatgtcctcgatggcaccgtaatacgtggcagttgttccatcgtgtcccatggcatcgacacgaacagcgctgttttggttcgtgctcttcatgtcttgggctctcgtgtagaatgtgtacccattgatctcatatccctggaatgtcgcgatcgacccaaacggtcccctcgccaggaaggcaagttgttggttgatcgactcgttacccatgagatgttgtcgtagccacgcggggaaagtatcaatgtgatgccatgtaatccatgcatcggacttaccgatgttcctggcgcgaactagagccaagtgctcctcgatgtaaggagctaccaatgaagagtgttgcagaatagtgaaatgggctttacggaataaattgttgtctatcgtcgttattgctttccttccgagagttccctttccccgtagtctcccttcatggcgtgattcaggtaccccgattgggcgaaggtcttcgataaattctacgcaaaattcgatgacctcctctgttccataacccttggcgatgcttgcctctgaacgagcacggttacgaacatacttcttcagaacgcccatgtacctctcgaaagaaaacatgttgtgtaggtacataggcccgagaatacggatctctttcccaaggtgacaaagcagatgcgtcattatattgaaaaatgaaggtggaaatatcaactcaaaactgacgagacattgcaccacttcattctgaagggcttctaatctatccggatcgatgaccttctgcgaaattgcgttcatgaatgcacatagctttgttattgttgcccggacattgtctggaaggataccccttattacaactggtagcagttgtgtcatcaacacgtgacagtcatgagactttaggtttgtgaacttcttctccttcgtgcttattattcgcttgatattcgtggagtatccagacggtacctttatgctctccaagcattcaaacatactttccttctctgccttgctaagagtgtagctggctggactcaagtaatggcttcctttctcctttggttccgggtgaaggtcgccgcgttgttccatatgcttcagatcattacgtgcttccagtgtatctttcgactttccgtatacacctaggaagccaagaaggtttacgcaaaggttcttagtgaggtgcatcacgtcgattgcgtggcgtacgtccaagaattcccaatatggtaactcccaaaatatagagttctttttccacatcgccgcgtgaccatcttcgctctttatatgctggcttccaggcccctttccgaacactactttaagatctttaaccatagcaaacactgttttcccgctgcgatgtttaggcttcgtacagtggtcggccttatgttcgaagtgcttgcctttcttccgtaccgggtggtttgttgcaaggaatcgacgatgacccatgtatacaaccttcctacagtgcttaagatacgtactttctgtttcatccatacagtgagtgcaagccttgtaccccttgttggactgtccggataggttgctaagtgcaggccaatcgttgatggttacgaacagcagcgctcgtaggttaaactcctcctgtttgtcctcgtcccacacggggacaccttccttcttccacaactgtttaagatcttcgaccagtggtcttaggtacacgtcgatgtcattaccaggttgcttggggccttgaataataatcggcatcattatgtacttcctcttcatgcatagccagggggggaggttgtagatacacatcgtaacgggccaagtgctatg

SEQ ID NO: 6010 - DNA, 2437 bp, Oryza sativa
catctcaaattgggctgagaaatgggcccacgtaaaacttaattgtaggtcggcccatactacctcaattctggcccatatagaggcacgtcaaccacgaccccgtttcggaccagcaatttgtctccactagaagaagtctagaacagcaaaatccctcgacgacgacgaggccgaggtggcgccggcggcggagcagtcgagcagatagtgcaaacagtctcgcgcccgccacgccacgccacgcccggccatggctcgcggtcgcctcgagcgctcttgaaaatgagaaggagcgaaaggtttgactcgccgatatactggtatgattggtcttgagctccaagtgttcgatgaaaggacgcacaaaggaagccatgtgtccgttactgtcaagtatattcttggaactctgtagtctgtacctattatcaggtttttgagaaacatttccaggaaaatacttcagttgcaactatccattgaatacattctgagtcatatgaaccccgctttaatccaacaggatactgagattcttagttttaagagcagggagaaggtgtggggaaaatacgaataaatagcagttgcagggtctttatattttgttgattttctttttgtgctaatgggagcaaaaccagttaaaattcgtgcgtcctcaactatttcttacaccaatcttcatatcttcctcatactcacacaggtgaacaagaagagattgggagccaggcacctagcttaacaattgaattcacagcacaagctgagagcaaggatccgggggttgttggttcagcacagctgcacaagtggacattagaaatcagcaaaaaagatagtaagattctgttcgttgatcacaccaaattggtatgtttaattgtgtatgctcacaaaagagaagagactcaacagcgttaattattacatgatgagaaatacattgcccagttcacataagatgtctcgggaaggctatgctacccatcataacgggcgagctcgagcgccttctcgagattggtcacgaataccgaaatgggtggccgctcctcccaccgcagccgcacgcaatgcactgccgtctgcgccaccagttccaccgcctccagctgcctcggcgttggctccgctgccggccgcctgtccagcatcttccacacttcccccgcctcgatcagtggcagcgcgatggacaccaagctgcgatcagacctctcgtcccacttataccactcatgccattcttctgttgtcttctcctcttcttgtcgttcactctcctccttgtcatcttgtgtgttctccccctcctcttccgcacattcttctcgcttctcgtcttcctcaaattcttctgtcttctccctctccttccattcttccctattcctctccaccgattcttcgtcaaataaatatgatttcttcccggtcaatactaccatcatcacaacgccaaaactgtacacatcggtcatcaaattcagagtgcgttccatatggtactccggggccaggtatccatgcgtgccaatgacagtgtcagtctctgccttttcctcggtgagcgcaaacccgagcccgaagtccttcaagcgcggcgtccagttgccatcgagaaggatgttggatggcttgatgtcacggtggatgatcggctgctgaccgcagaactgcaggtactcgatggcccgcgacacacctagcagtatctcctctccatgcgtgtcttccaggatgccaccactggcgacgacgacgacgacgttgggccgtgcaggtggtgatccagcgagccgttctccatgtactcaaagacgagcagatgctctttctcctccttttccttccgggacggccgcaggaggtggcgcttctgcttctcctcgaccaacacatagtagctatatagtggaacgatgtgcttgtagcggatggcagagaggattgcgatctctgccttgaacggctccataccctgaggtgagttcagaccacgatgcttaatggcgaccacccgcccatcgggaagacatcccatgtacaccgagccgaagccaccttcaccgatctttctatcaggggcaaagttgttgcttgcctttgcgagctccttaaaattaagaggaattttatggtccagcaggagaggaggtaccaaaatcatgtacgtccattggaacccatccgacggctaacgaacgtcggtaccgccaggtaccgtaatgccgatgggcggtacctcccctccatccgcgttgtgctgattaagtggaagggcaaatctggaatttcgcatcgtacatctgtttctggaattttttttatttataattttttttattaaaagttttacaaaaataattttccaatttgaaaattgacggaaatagtcgcctaccgccctctgggagggcgattttta

SEQ ID NO: 6011 - DNA, 9321 bp, Oryza sativa
gtatacggaaaatcgcgtgcgcgagggcgttgcaggcccaatcgcggcggcgcgcaaaggcgcgtgtggaaaacagactcgggcacgggcctgattgttgcctgcggcaaggagcgcgtgaaaaggtgcgggcccaattaattcatgcacgtctcggataagagggacactctaacataagaaaaaattaaggaaatgatttgatagaaacataaaactaaaatcgattcaaatacggatgacgtatcataattctagcggaaacaactttaatttctataatactccattccaaattgatctacatatagtttttttgaggttattcctaaatgatctacatatttgtgttcatttattagagtctattcgttatttgtgcattggagtaaatggacattgatgcatgcatccatgcacacaagtatttataacccacatgcaatatcttgatttgctattggctaggaaatattggtgcatgcattgagtttgttgctagagtaaatatagtatgagagagttattagcttttcttggtctttgtgtacctatgaaatatgtagatcaatttggaatggagggagtagtagagataagcatacaaagttttcgccacaacacgtagtgtttcatctagttttcatacagtatcagctaccccattgttaacgaccaaatttggtaagatcgacatcgaggaggaagattagatcgaagtggaatccaagacgaagattatttcagaaacagagcaagaatcggctagagtccaaatcggttatgttcagatcgactgagttcgagttagataaggatagccgatgcagccgattctgacaatatgactcggtatacgtcatcgagttaagttggtgtgctttacggtgattgctacgtaaggatagagtcctaaggaggcgattgtatctattaattaggatattttatgtaatttccttagagatatgtttgggcaaaagtctgccgtaaagacttatgatatcttagagtttgttagagataatagtcgtgtccggtatggacatatcttgtaattctcgagtataaatagatcccgagccctatgtaataattaacacacacgttcaatacaattcggcgcatcgccacctttttttgctttagttttatttcaacgagttcttgcttttgggttgagctgcatcggtttcgatcttcaacaagaggtaaaacttgttatggcggcttgcgttctcgggattagtgcttccatctttatgacactctaatcttgtttatgtaatctgttgagttatcatatattttatataatctctaacaatatcgttatctaacctacaatcgaccagcatctgtcggtagattgcagctgatcaggttagatattgacgtttatttagattatataggatatctaccactctataaaacttccagtggcttgattgtctagatgttgttcttcttttcatacttaatgttgtatcagttgagtttgatctattaagtcgtgcttagaatatcaatttctagcctgccttctggttgccgattagggtagtatcggggtttcagccgatcttacctgatttaactacttttattccatgtgcatgattgacatgttaagtctgccctttacattaagatcttattatatttgagtatattaagcttttgtttgatatattttacttgttttaatatcttaatatagagtggtatcggagtattagccaatacatgctagatctatctgatcggctatgctatgaacatatatagttctattattaacatatatttcgatctaagtgatttatactttctcggcatggcgtccgatctatcccaatcacttgatttaagtatatgtcaatatagggagtatatattgttaatatctacagccgatcgagtagatttagtttttccttatttattcatgattgccgatcgatgcatatatgacatcggctcaaaggtaaatgatatgtcatcggcatctagccgatcggctatcgtttataggattaactgcggtttctttgtctttatttcttgttgattgcaggatcaaatcaactggcacgctcatacacccgaaggcgagttttggacctgcactggagttaagcaaatctcccaggccgccgtgttcgatttccacatcaacacccatgcgcttctatcaagagaagtaaatgctaataagtactgcctccattccaaaataaaaataactttgttttttaataaactgcttgtgtccagatgtggtataacttttttttaccgaatctaggtattttcagctaatcatatgcttaagaaaggaatctctaaataatttaaactttgatcactgaaataactaacaaggaatgtttttccataatctaattaatatttgctaaataacctgtgggaccaataggccttgccagcgcaagtcttcgtccaccctaggtcttcgtccaccctaggtcttcgtctgccctaggtctacgtctattctcgatttagtaagccaggtcttaattggggccactgccagcgacagtcgtaagtccaccctaggtcttcgtcttcttgtcggcaaactgtgcatgtgtacagaaaacgtacggagcttctagataggctgtaagttaaaatgtatacatggaaatttacgactgtgggagggtaaactcctcaagtggaggacagccgaggctccgccgggagtagcggatgagattcgagagcttagtgaatgaagctatgtaatgtagagggggtcgggccccttgggaacgatgagacaaaatgagtttatacgagcggcggacagcctccatggtggcaaggtgtggcctcccctcctcaggtcccgattggtggcgggcagcctaccctcttgctgggctcggtgggtggcagacggcctcaacaacagtgcggcggatgaccttccaatgtcgctacaccagtagctcaaatccatgcgtcctcgtcatcggtttcgttctcttatttccagtgatttttagttcttgatgctaatctgtgcatgtttgatgtctgtgtgttgttagatgaatggatgatggcgtggttgttgatgatgaatgagttcttggatgtggtgctcgggatgcttaagggatgttatcgcttgggatgtgttctctgtgttgatgctttggggatgttgacgtgggtgttggtacgttgatggctgatcgagccgatgcattgatcgagcagtcaagcctttttatgtttgttgcatatgcttcatagaagtcggttgttagatgcttcgtatatgtatatactaggtgattccccgcgttttgctgcgggaattactaagtaattctcaatttgttttacatttaagttaggagtaaaaaaataaaacatcaggatttattagtcaaatgatacccgtgttttaatgtgaaacatatcgataagtatatattaaatattgtaaaagtgatagatagatttatgaaaatattgtgcaaatgatatgaggggtgatgattggatatacttgtattttgatttatagaattaaataaattatagatcatgttgtatgcttgcatgagattaaacatgtaattattgctagtaggtgatgatgtggtatggttgcatgttgagttttaggcttagtgggcattaaccttatagaaagcatatatatgtatgtgtgtgtgtgtataaaagagaatgaagaaaaacataactagttacctagttagaagagaggagaacaatcctataaaaactgactgaaattaatttaaaaatataatagcaaatttgtaccaaaaattgatcaacaaaagctataatcccccctcccctccaaaaaaacactccaaacacttttacgacgtatttattttttatcaaaaggacaggagctataaactaacaaattaaggagaatagaacaaagtctaacatggatcaaagaaagaacattgaggagaaagaaggctaaacttatgtgatactttttaaattacttcattattcatacaatatgcatatgccatttcataaaattttaactctaaaattgacccatatgttagaaactaaataaacaaaaagataaattcaactggaaatattcacacgatagactttttttataaagcaccagagtatataaaaaagagtattgttgacaactaaaatttggctagatatggaaaataacctgagccttctgcatagtgcaagtccgaccaaaggtatacggccgatccgactagcaaccccaagaccgagtccaattaagtctattcttgtgtttacttacttggacccgatgttttttgattcctatttgatctctaaacccaataggatgtggaggaaacttatagatgcaagaccaacacttttataagggttatggctgatttaattctaacccctgaatcctacacttgacaatcaatcgaatcgttgtttttcctttatttttcaaccatattttctactttacattctatagctgcatatagtacctaattcatccatctttgtcaatttatggtgtaaatcatccgtcctcgctacgagagtgcgatacccagcccttgtaggtttgtcctctaaattgatctaaatcgttctaaaggctggtttaatctctcattggctccgctagtcgattttcatattttctaaacccatcctaatcgagagcttttctatatcgaggtggttgatgactttgttaacatctcaaatatttaggtgagaccgtgttaattgcaatagtctccaacacaaattgacgacactgttgatcgagattttcagccatccaatatggccaaaatgaatctagaatgttttttgattcctaattgatctctaaacctaataggacgtggagaaaacttgtggacgcaagaccaacccttttataagggttatggctgatttaattctaacccccaaatcctacacttgacaatcaatccaatcgttgtttttcttttatttttcaaccatgttttctactttacattctatagctgcatagcacctaattcatccatctttgtcaatttacggtgtaaatcatccattctcgctacgagagtgcgatacccggcccttgtaggtttgtcctctaaattgatctaaatcattctaaaggctggtttgatctctcattggctccgctagtcgattttcatattttctaaacccatcctaatcgagagtttttctatatcaaggtggttgatgactttgttagcatcacaaatatttaggtgagaccgtgttaattgcaatagtctccaacacaaattgacaacactgttgatcaagattttcagccatccaatatggccaaaatgaatctacaagctgaggaacgagcttagctcggttggaacattcgctgtggtgtgaacggtcggtcgctagttggactcatggggcttcacctcgatgggtttttcccgtcttttcttcggggttgtccttagggtagtctcgactagaaaatagggtacacatgcgtacgcgttcagtagcggtcctgagtgtctctactattataaaaattgaagatgtttttgtcggtacttttggtacgtcatccgtgtatgagtcggttttcatgttcgttcgcttttggaaacataaatccgtatttgagtcagtttttaagttcgttcgcttttagaaatatagaaggaatcgtataagaaatcttttcaaaaaactcgcatgctaacttgagatgatcagactgctgtttgcagcacatgattttctagcaaaatatatatccaagcgaatttaacacagtgaatttcaccttaactaaaccatatctctatctctatctctactattataaaaaataaatatgtttttgccggtattttggtccgtcatctgtgtttgagtcagtttttaagtatgttcgcttttagaaatacagatctgtatttgagtaagattttaagtccgtttgcttttggaaataaaaaaaagtcgtataagaaatcttttttaaaaaaacttgcatgctaatttgagataaatgtcagactcctaactgcttctcatgattttctaaaataaaatatccaagcgaatttccatggtgaatttcaccctagctaaaccgtataacaattacaagattaaaataatatttacccgttgcaatgcacgagtattttttgtagccttaaaaaaatgaatctacaagctgttaccgctgcatatattaatcagatcggcaagatcgtttggttcttgccgctgatctatccgaccgctttcgcggaagccggtctaacctacaccataataccagtccgaccgggatgaccgacaggcagcaggcaatatcaatctgttagtgtatgcgtgtgttcttaccgaggacaataggaaatcagcaaagttaatttttgatcaaattggctacatacaaacatcaagtgtaccaaagaaatgtttctgggctgaggttaatacggctgaaattaatcaagggaggttttctccgactatgacaagtgaagacgagaaggacatgctcaccatggatgactaaatattgaccgaggaggagcgacaagagcttcaaaacaagtggcaaagattgagaaggcaatgctcacaagctttatcaagaccaatcaaagcatctctaaaagagacttccgacctgctacctcgaatcgtcgtctccaaaagtgacgggttgcgactatggtgcattaccgaggcacgaacggatacagaacaagatttaaggagaaactcatctctttcttacttattcagtcctcctactcttctctttctctctattctttctctttcatctctccttctatcaatggtaatccagcgaggtaggaaggactcgagtcccccgcacccacgctggatccgccctgcgaggcaccaactatatgcatgaagcacgtattatacatataggttggaccatcaggtggaggtcagttagaggctggctgggttgacatgtggggccgattggcccatccttaggtcagtcgggcactcttgtgctctgttagtgattacgtttagatgattgtgactttagatggtttggattaactcttgatgtggatcggatagttggtttgagcaaatagtcagggccagccaggcaagaaatggaccatccgagctgcgcaatgtggtcggcctaggtggggggtaaagaaggccgacccatcaccctcttgggggaaatcaaaacggaacgggaacagctcgattgacagaactcaagccaaactgtaccaccttcctcggcccaaggactgtgagtcctctgggccgtagcgaacggcccaagatatcccaaaggggtttggagttttcttctccgaaacccctgttcctctcataccgcctcgccagagcgcctccgtcggtagcacaaacgccactgcaggagcgcaggtgacgccgcaacatctctacatattgatcctcgaggcctccctgcgtcacggtcgccatctgcaaccatcctcttcgcgcacacacgccgcgcggcggtcgcggacgtacgagacgacggaggagcaacacatacagagcgtcggcgtgggctcgtggcgaccgcgcatggccagacatgcagcgcagtggccggagacagttgaggagatgcaaattttgtataaggccctgtttagatcacactctcaaaaaattttcaccctgtaatattgaacgtttaaacatctgcatgcatgaagtattaaatataagctaaaaaaataactaattgcacggattgcgactaatttgcgaggtgaattaatcttttaagcctaattgctatttgatttgacaatatggtgctacagtaaacatttgctaatgacgaattaattaggtttaataaatttgtctcacggtttactgatggattctataattagttttttattagtgtctgaacactccatatgacaccctatataatacccgatgtgacacgccaaaactttacgcccctggatctaaacaccccctaagccttaacattgcgatgagtagggttccccttaccgttttcggcgtagttatcggtccaccgcggtaaggtggataccacggtaactgcgaggtaaccgcgagacattttttttttagaactagggccagaaagcccccatttctcttactagaaatgaaaatatccttactaagtcagaaaggcaaaaccaaagaagaaaaaaaaagctaaaaagcttatccagatgcctcacgggctggatggctagacacgattacatcattctgacatcaaagggataaaacagatcacaaaaaaaaagagaacatcttcatccttctatcctcctgatcccaggtctccatccatgtcttgagcaaaagatatcacttgccatctgtcttatgagtctagctcccaactgttattcagtttgcttccaacttctgcaaagatgcctaggaatccacccaggaacaagccataaagaccaaatcagtaggatctcttggaattttattctcaaagcatgttttattcttggacttccaaattgtccaaatgattgcagctaagccaatcacaatcaagtgtttcatgtttttatcatatctatcaagccagtgtcaaaaagatcatgatgattcaaagttggaattatatccagagcccaacacatgatattccagagtaatttagccaaaggacaatcaaaaacaagtgttgtatatcctcttttttgtcacaaaatggacatttttcatcccccttccttcaaccttttttgtacagatttttccttagtgggaattttgtttttaacaaacaaccaaataaaaattctaattttcagaggaatcttaaatttccagattctcttttaaggaaaagacacctgatgcattttaagggctttataaaacgatttcacagaaaagataccatcccttgtcaaattccaacaaattttgtcttcagagtcatcctataagatcagactttccaaactatttttgattctcacccaatctctcattttatctccatccagatcccttctgaatttgatacattgcaagcctttcattttcacctttgcaattgtcacatgtttggtcaaagttatgttatacagatttgggaactgaatgttaaggggttttccacctatccagctatcttcccaaaacaaagttcttttcccatttcccacttttttgaacaaaatttaaaaaaaatcatcctttacttccatcaac

SEQ ID NO: 6012 - DNA, 10996 bp, Oryza sativa
  unsure (1)..(10996): unsure at all n locations
gaggaatcttaaatttccagattctcttttaaggaaaagacacctgatgcattttaagggctttataaaacgatttcacagaaaagataccatcccttgtcaaattccaacaaattttgtcttcagagtcatcctataagatcagactttccaaactatttttgattctcacccaatctctcattttatctccatccagatcccttctgaatttgatacattgcaagcctttcattttcacctttgcaattgtcacatgtttggtcaaagttatgttatacagatttgggaactgaatgttaaggggttttccacctatccagctatcttcccaaaacaaagttcttttcccatttcccacttttttgaacaaaatttaaaaaaaatcatcctttacttccatcaacccatgccagaaatgagaattaccctgtttaaaagttaccccagacaaggtgaagcatctaggcccccggtgttaattttggtaattaatgacaagtgctaattgtggactaaccattcttttgagctatattttaagttagattgacatcatgtgtgtgcatggatgattattgatggattaaaattgacggcgcaaagcaaaaggaagagaagacgataaactagtgttttcattttgaattgatcgaggcgtggggcgatcaaaattgtgctagtttatttttagcttcgccatactattaagaggggtaatgacctatcaaagggatgattttaattgccaaattaggtcatttgcatttagacttgtgctcacatttcacaacatgcacttgctatatatttgtcactgctctggactgccagggccggtctgaccgccggacagattccggtctgaccggccggtgtcaccagtctgaccgccatgtcatggccggtctgaccgccgtatcaatgccggtctgaccggaaggtgttggccggtctgaccggccggccatatggccgggatggcatgctctaggatggccgatcccgagccgccggagccgtattcggtcagaccgagctgaggacggtctgaccgagccgaggccggtctaaccgggcaccccatgtcggtctaaccggccgaggcagtggggcccaatgacagccctacaacggctagaaaactagccgttgtagagtagcacggtctgatcgggcacatacctccggtcaaaccgacagagcactgagttgggggatttcgcccccaacagctagttttggtgggtgggagtataaatactcccccaccagcagcaaggggactctcttggcacccaattcaattgcatacaccccttgtacctctctcacacacctttgagcttagtgttcatccattgtagtgattgaggttgttctagccaagagtcaagtgcattgcttccatttgtagagctagtgtggcacttgattaatcatctccacgccgggtcattgcttgttactcttggaggttgccgcctcctagacggcttgtggaggagttgcccggtgacctctccgagaagattgtggaggaggccaggcgtcgaattgtgagtggtttggagttcaccaccttcggagtaaaggaagaactaccccgagtgatcgaggcttgggtagtcctctccgtgggccggctcccgccttgcccaccccttgacgaagggggcgtgcggtggcttcgtggttgggcggtggagttggactcgcctcaacggggagtaggaaaccggcaagtttccgaacctcggtgaaaaatctcttgtctccttgtctcatttgattaccgcatttacatttgtgcaatttacatttctagagacatacttgagatcatatcaccctaggtttgctaaacattaacataggagtgtgatttactttcctagagatataattgagccactatcaccctaggtttgcaaaatataacttagttgcttagttagagttgaccctcaccaagcctagccacttaggttagtgttgattaggtgtcatttagttttaaatcgcttattcaccacccccctctagtcgacatctcgatcctacacaaggttttatttttcaaatattttcccctaagaatctcctgccaccaaccttctttgttttccaaattccatatccatttccccaacaaggccttattcataatgtctaggtccagaacacctagaccccccgatctcttggtgagcagatgatgggccattgcactaaatgatattttctgatgccttggtcttcttgccaaagaaacctcctaaagaaatccattttttctttcacccctttgggtaacttgaaaaaggagatcatatacatgggaacactgcttaaactagaattgatcaagattaatctccccttattgactgaagtttcccttgccagcatcccagtttgctttccattttgttttcagcatttctccaatctttctttgtaatgcgtttctgatctattgggatccccaaatatttcatgggcaaagcacccacactgcaagtaaatatctgactgaaaacctctgccttatcagcagtctcaccaatgcagaacacctcacttttattgaagttgattttgagaccagataattgctcaaacaaacataagatgtattttagatttttttgcatgtcttattatcaaatagaagaaatatggtatcatcagcgtattgtaaaatgaccatcttgttgttatcattatcccccagtactcctatcagcagattatcctcagctctttacactagtaaagttagtacttcagctgccaaattgaataaaagaggagatagaggatctccctgcctcaaacctttatgtgttttaaagtaaggccccactctatgtgttttaaagtaaggccccacttgatcatttacctagacatcaactttactacccattatcactttctttacccaatctgaaaatgtaccgcgcatggtaactatgataaccacgtgataaacgcatggctgacgacgagattatatccacgtgagaggatgatggttcagatctaatcgatcacaaacaatgaaacaaatattgaatcagcgaatcagagtggtcaggaaaatgtaacggaaatatcgattcacgctcactcactcaagtaggtgagcagtgagctgagtcagcggtcgatggatcttcgaggacgcggttgttagtttggtcaatgagtttgaggctgtgtttagatccaaactttacatctaaacttttaactttttttatcacattaatttatcatacacatataactttttagtcacatcgtatcaatttcaacttaaacttttaactttgaaagaaactaaacacagtctaagcttcactgtgtaatgccagtccactacgcgtcaaagtgtagtgggctttcagccttgaagggctaatttcaatgggcccgggattccgtctatacaaggcctcgtctggttttgccacgtaagcgaatcacgagttttttttatttataattttttttattaaaagttttacaaaaataattttccattttgaaaattgacggaaatagtcgcctaccgccctctgggagggcgatttttagagggcggcgtaaatgacgtggcagccggccgttcgctctcgggcgacggncgtcaacgaaattagcaggcggnccccttgccgccctccgctagggcgattttgtactgtgcggggggccgcctgcaaatgggcggcgagggggcatggaattttgcaggcggcccccttgccgccctgggggagggcgattttgtactgtgctctatattttttttttatataaatagcaatagttatgaaatctttttatattgaaaactatacaagattaaaatctcaaagactggtaaaatacaattttattattttttagggcatatttggattgttaccgtacaaatattttgttagtgccaaaatataagcaagttttggtagtactaccaaatatttagtaaggtaaaattgcatttgatcatatttggtttgctgccaaaatgtaaaattgtagtgaagaatgttatacataatctcaaatctaaattacgtattaccaatgaataggcttccattttcgtgtgtggtgagctagtgggaaagaagatatgaagaggttgccttcagattgtcaattatatagcgtcgttttcactgcaatatatgtgaaatcaatgagatacattattcattagatgtgacaagacgatcacgcgtaggcgtgattcactttatgtcaacaggcagcgtcgaaagttgatagtgataactcgagctgccgcttttcatgtgtgctgttgtggactgtgcgcgctactggatatggcactaccgtgaagcgccgaaagtgtgttgttgtgagcataagttgttcaagcaccatatgaatgaaaagaactacgtagacgagacaaacacaagtagtactgcagtagtaatagcaaaagtagtactgctttgcaagtttgtaaggcagaagaaacggtcacataaggactgaagaggtagaacactactgacgaggcctcttacccctgtccctcctaccctgcgccctaatgtgcccctgggagtacgtgagtcggtccgggggtacggcacggccaacccgtcctgcctgtacaggtgtgacctctggctgctcctgagtgtgcgcctctggagctcctccgagctgagaggagcctagtacgtcctggtggtctgcaccgtgcaagtcgtcgtcgtagaactggctagtaggaccagtcctaccggcgtgagacgaagaggccccagtaccgaagatcccggctgcatatcctgctggacaaggaccatcagattcgtacaagtatttagcagtagtaataaaaagtaaagtaccgtgtgggcgagggaacgacgctccgtgagaggaagagctggcgaacgcgcccgaagaggtggcgaacggccctgcggagctagcggaagcgccggtcgtgcctgcgaacgcgctcgaaggcagacgaggtcctgcgatgaggaaacgtgcagttaaaacatggtgacactttcgtgcaaaagctgaaacaaaaatgaactaatatcttggctgaactgtaccgtgcgaaaccggtgctgtaggtcgcactgctccgaagctaggggcgctcgaaggcaaacgaggtcctgctccgacggtaggcgcgcgaggccgtgggtgtaccggaccagctggaggtacgacgtccacggcgctgcgacaggagaagacgcgcatgaccgcacgcatcttgtcctgcatccggtcgaaggtcgccctctgctcaacgtcagtcaagtgcaaacctctgttcaacctcacctggacagcggtgatatcggcactgatatcccgtgcggcatcagcctatgcaagatggaaataaaaaattcagtagttgtcctattttatgcaagataaatgaaataattgttggaagtaatacaaattggacgtaccgccacgaagtagtctcggtcacggtgcgtgggatacgcgtccgtgacagcggcaacgtgcggctctggggcgtctggagtgaaggtcacacgcgcacgagtgcgaggaaggtaccagcgaaggtagtcacggtagttctcctccgtgtgtgggaagagctcgttgatcacctcctctgtagctaacacccagtcgtcaacgtactgctgtacacgtggagcccaaagtgcgcctgctagctgtccccgtcgagtcaacctgtgaagagaggtaaattatatggctcgatgatgtaattatcataaaaatttcgaaatgaacaatccgaactcacgagtggtcggaaggggggacggtcgtctgcacgttgcccggaaacacctgcctaagtccgaactgtctcatcacacgctgcgggcagtgaggctcaacgaaaatgtcgaacaccatcggcaggatggtcagccagtaatcctggtcgcgtgtgcacaaggacgaaagtcctagcggtgctctcgcagcgacggcctcttctgtgtacggctcccagatgacgtcgctcggctggagacggtcaaactcgaacacgaagtccgggtaaccacgtctcacctgcacgtgagcgtaacgacgctgcaataaacatgatcggaattagaaatgttatgtgaaggaaaaaaaaagaagaggactgataaacttataacgcagcgaagttgcactaaccccacgtcgacaccagtaagtccccatcgtgggaccgtcctctggccactgcgcgctgcgaccaaccccgtagggtgcgctgtccaccactggtcgccctatggcaaacctctcggctgcccaaagctgaagcaacatagggcagccagcgatgatcgctcccgcgtcagtcttcgtgcacgcctcacagagggcacggtacgtggctgctagcacggcagaaccccagctccactgcggcacgtcctgtggctgagcatccgcgatggaccgtgcgtagtggaccagccggaagtccacagcgtgcccgtgggtgctagtgaacatcacccacccgaacaaccacaacaggtacgcctcaagggagcgtcggaccgagtaatcatcagcttcagggtgcagaaggtccgcctacagttaagaatgaaatgttagtacaaaacactcatccggtcgcaaataatcatgtatgataataacatcttatttacttacagtgaactggagcaaccaagccttgctaggcccgactgtagagtacggaggaagggtgctggtcggtcctaggtgtggaaggcgcatcacctgctcgaagcgcgcagtgatatcctccttccacccaaaaacaccgtccacgggaccaactggtgctcccgccagcggtagcccgagcaggtacgacacgtcctgcagtgtcggagccatctccccacagggaaggtggaacgtgtgcgtcttaggtctccagcggtctacaagagcggcaaggagtgaccggtctgcatcccaccgcttcgcagggtcacggtcgtccgccgccgcctcaacaagcctacaaagtggtagaaggcctgccgcacgcaacctgtatagagcaaacttcaaacataagtacaacacaaagcaaagttgagttgaaatgtgaacatacgcgtaccaaggaacgtgacgggggtcgacacgcaaccactcgcgcgacgtgcgtggacggaaggtgccgagctgtgcaccctcgactgctgacaggaacgagcggtggttcctgtcaatcgcacggttcaacagcgccggtgtgtcgtacgccatacctgcatcaaatagattgatcagaaacatataaataattagttcaacataagtaataaatgttcataagcgaattactaacacatattaaacaatagtacaaacaaacaaaagtgtcaccatacggaatatttctgattacaacaataactgcagttacacgatatgagtacttagtccgaacactcatcacgataacattatgatacaacaccgaatagttcacaatactactagtacaacaatagtcggaggtactcattacaacaacattgaattgaaattacacgatagaagtatttagtccgaacactcattacatcacaacagcattttatttcctaaatcgaaagcattgttacaccatcgaatcgcctgctgcgcgacgacgccttggccttgcgcgcctgcttgttgttccttcaccaggtggtcgcctaccatcacttgcctgtccagatggactggcatctgcgccgcttggaacttctgcatttttcgggcattgcttgtaagtatggccgcgcagatcacacttgctgcagcgtaaagtcctcccacctgcttctgactcatccatatcatttctgatgcgtctagtttggcgtcgaccctttttcacccttaacttagatggatcaggaatataaaaaacttgggcactcagcgttgtgtaagatcctgagatcccgaacccatatatttcctcactccatgtatgaaagattgcttctttcctgaaaaaatttgagacgtacacattgggagatatgccacaatcaccggcagcagcaagaacgtgtgagcaaggaaggtgatgaagcttcggcttcatacaactgcaggtacatccaccatccgccttcaagacacattcctgcacggcttgcttgcgatagataccacgcctgctcctatcaacacacattatttcataccgatgcacttgtgtgccttgagcaacaactctatgtctccgtgcctttttgattttatcttccatgtactttgtcactacgttgccaaacactatgttgttatcggccatggacggaccaattttcttgtatcgatccctaaagtaggcttgcgtgccgtgaaggatgaattcaacaatagcaaccaatggaagtacccgaactcctcgcattacccagttgtacacctctgccaaattggttgtcattatgccataccgagatccatcggtgtcgaacaatagagaccacttctccttaggctcattctcaatccactgactgaaatttctgatggacgaccctgacctccttctcattgttggtgggtcatcatgtaatgcaccaagaggtatgggaggctcgtcaccttcaacttgtggtctgcgagattgctcgtctgtttgcttcgttgtcaactcatccaacttgtcccacaactcattaaatttcttctcttggttctgtgcacagagcctcttaaagagctccataagatgcttgttcttgaattgcttgtagaaatttgcacccatgtgacgcatgcaccaccgactccgaacatcaggccacttagctggaagtcccttctcatcccaaccgttctgcaagtagtcaatagcccgcaacatacccgcatgacgatcatgtataaggcaaacgttgggcctcatacgcaccactgcaatgtgcactctctctaggaaccagtaccagctttcagtgttctcactctctacaaatgcaaaagccataggtagaacctggttgttcccatcacacccaattgctgtcaatatctgacctcggtatttacctgtcataaaagttccatctatgcatagaacaggtcgacaatgcacaaaagcattgatgcaagcacccaatgagaaaaaggctctttgcagcacactctttgttcgatcatcaaccgatgtaaatgtatgtaggtcatagtaagtattattattcctctgggcaatggtggctaacaaacgaggcaaattatcataagaagcttcatatgtgccatacctcatctaaataatcttttgtttggctctccaggcctttgcatagcttatggtgtacttgaatttgttctcgatgtgcctaataattgattttggttcaaagccaatgttaccaacaacactgctgtacatctcacttgccacaaaagctgaagtgatgtttcggtgatacttctccaccccttgtaagtagcacttgtgctcggtcacaatgctaactttccaataatcattccatttacccttatatgcatggacacgccacggacaatcttccttcatgcacctcacttcatacacataatttgttgacttgaccaccctaaactctctctgtaatgaaactgcccaatgcttcaccgcctccttcatctcatccttatgagcataccttgcaccctcaattacctcgttctccttatactcccagggtacatgatcaccctctgatatgacaagtccagagaagttctcatttgcccaatcagtggccattacatcaccttcctcatcggatgatgcgtcgtcctccgcttgctcattatccgaatcttccctctccatttcatcaacaattataccgactctctccccctcatccgccatgcccatggcctgctcctcccttggttgattttcctcattttccatcgatggtccaacaacatcccctgcattgctaggaccctccacatcttcggttcgcattgaaacatttgtatctttctcttgtaccgacacaaatataacgaggggccatgaccgttcaaaagccatttgcacataccgtctccaagcagcagtgctgtccatcggcattagttcccaaaaataaccttctattgcacgactcactacaacagatactgacattgtgtagacttcttggtctattctaaatcctctcaacaaccaactataaattgactgaaatgttctctccgcaggcctatcgatgcccttagatgtcattacaaaatctgacagatcaacaccatctggaccaaatctaatatttccttcaccgtgaactatctgaaatgtgaccttacttgacattgtgcctgatgaaaacattaactgcgttaacctcgcatttctgtactacgccttaagttacattctctacaatattgtcctctaaatttctaaaagtacgttacattctccagatcaaactaaactacatcttacaattaacactactgtctatgtctcaattcatactattatattctatgctctggatctacacatatgtgctaaaatatatggaactaaaactaaaacgcaacatatatactcaatcataacatattagtacaaatgcaaaagatgtatgggagcatacctgtgatgaagtgagcgaaccagcagggcttcgccgctccgcttctgctgccctcccctctctctctttcgttttttctggatttttagtgaatataatgaaatttaacagaggaggggctgggctttataggggggggcccaaaaatcgccctcccccagggcggcaagggggccgcctgcaaaattccatgccccctcgccgcccatttgcaggcggccccccgcacagtacaaaatcgccctagcggagggcggcaagggggccgcctgcaaatttccatgcccccccccgccgcccatttgcaggcg

SEQ ID NO: 6013 - DNA, 18906 bp, Oryza sativa
attaatgacctctaagcatgccattagatagatctcgagatttggggaattttggaagttgaacggagtcaaacggatttacggctgggaagatattgaatttccaagattatcggatttttggtctaaaggaaaaaggattaaattaaattctttttggaaaagaaaaagaaaagaaaagagggagggaacatagacttttctcgggcggctagggcgcggcccaagagatttggggcggctcgaccgagcttaacgggccggccggcccaagacggcccaagcgcgcgcgcgcgcgggagggaggagagagagtccggtggaccgggctcaccacgcgcggtcccgggtgggacccgcttgtcagcggctcggctcaccgtgcagagggagtatgcggcgtacgcgcgtgggcggggctgggacgcggtgcacgcgcgcggttcgcggaggaacggatgcggcgggcccacgcgcagcctcacggctcaccgcggaccacgcgcacggggagaaacggagggagcggctggccgggtcggcttatccggtcgcggccgaggtggcgcctacgtggcagccacgcgggccggcgggaggtagacgacgacccggccgcgaatggacggcgggcgatagcggcgagcggcggggcgagccacggcgataccggcgaaggcgagcacaccgggtggctgcacaggacgaggggagacgagccaacggctcggattcgccggagggagtccgtcggtggcggattgcggcggtggcaaccggcggagaggaaagggggaaacggcgacgaggtcccgaggggctaattcccggcggtgagagcatcttcgcggcttcgggaactcgacgcttgcgtcggattgggcggaactacgccgagcgaggctggcgacgagcgggtgctacggagctcgggcggcgacggcggcgagcacacggcgagtgacggcaacggtcggggcggcgccggctaactacggggaggcttctcaagctactaccgaaagctagggggaggagatggagcgaggaggaagaacggagagaggcactaccgtgcggaggaggggcgctgtgacgagaggccgacggcgcgggagtaaacttctccggcctcgggccgacgaagaggaagaagaaggcgcgcccggagtccccttccgcgtccacgaacgcactggctcctccgacacgcgcaacgacgattggcgacggcgaaatagagggcggcaaaggcgcggaggcgaaaatgagggagggaagggaggaggagacggggcgacgcggcagagggaaaggagagctcggcctccgcctcttggcggcttgcgcgcggagtggcgggggccgggggatgacgacggcgatgacggtgggatggtttggagcggcgcgacgacacgggcgacaggcgcgggctggcgcggcagagggtgacggcggcggcgaccagacggtcggccactcggcttgcgcgcggcttgcaacgggcggcgtccgcgcgggcgcgcgcacgcgaacacggcgcgtgggaagcggttttgcgagcgggaagctcgcgcgaggggaggggcgctcggcgcgggcgactcctgcgcacgcgcgcgcggcgagcgggcggagcggaggggagcggagagagaggcgctcggcgcggctctcgcacacgcgagcagcgagcgggcgagactgagcggggggggaggagcgcgccggggggagagagagagagagggagagagagagagagatgggccgaggaagagagagatgggccgagcgagattcggcccatcgacctcgggggaggcaaaatagacttttgcggaggaatttgattggaaggatttggattcggaattgaacttgacgatagatcggggattgagatcttgagatggcacggacactagacaacaagcaaggaatcaaatttcgcaattagggtttttaagagataattttcccgctaggcgccacgacggaacgggcgctacagaccaacccccctaacaagaatctcgaccccgagattcagcacctaagggagcagctccggaaactcggcgcggagaagatcttctcgttcccaggttgcctcatcttcagaatgattgctccattggactttgtagaacttgatggtcttccttcgagtctgacgttctgcctcttcaagaaccttgatcggtctttccttataggtcagattcttttccagctcgatattacccagggggacttgctcttctggaactcgaagacatttctttagctgggatacatggaacacgttgtgcacatctgcgagaccttcaagtagctcaagctgataagccacttcgccacgtctggcggttatgaggtaggggccgatgtagcggggtgctaacttgccggacatcccaaaccttctcataccacggaggggtgatacccgcaggtacaaatgatctcctttttcgaactcaaggtcacgccttcgattgtcagcgtaattcttctgacggttctgtgctgtcttcaaacgttctcggatcagcttaacttgttcttctgctgacttgagtatgtcaggaccgaataccagtgcttcgcccacctcattccagcacaagggggtgcggcactttcttccgaacattgcctcattcagcgacatctgaatactggcctgataactgttgttgtatgagaactcggcatacggcaaacaacgatcccaagtgccttcgaaatccaaggcacacgcacgtagcatgtcttctaggatttggtttaccctttccgtctaaccatcggtctgcggatggtaggctgtactaaaatttagatcagttccgagggcttcatgcaactgcttccagaaccttgaggtgaactgagtgcctcggtctgacacaattttcttgggacagccaaatctacatacgacatgggtcatgtagagttctgccagtttctttccatcataggtcgttttcactggcacgaaatgagctgatttcgtgagtcggtccacgattacccaaatggagtcgtatccgctaggggttcttggcaaactggtgatgaaatccattccgatctcttcccatttccactcgggaatcggtaggggttgcagcagaccagctggcctctgatgttccgccttgactctttggcaaatgtcacacagggctacgtattctgcgacatctcgcttcattccagcccaccagaagtatgccttgatatcttggtacatcttcgtacttcctggatgaatggagtaggcggactcatgagcttcctttagaatgagatctcttatctccttcttggccggtacacagatgcgtggaccgcaccaaactgtgccttgatcgtctatggagaaattggtgtctttcttctcctgtattctttttattaactcttttatcccttcgtcgtctttctgagcctcccggatttgcgactctagggtaggctgtactgtcaagctggcagggacacctgactgtaccacggtcagccttaacttctccaattctctgcacaggtgatcttggtcaggccgtatttgagctacattgcaataggccttgcgacttagcgcatcagcgaccacgttggctttaccaggatgataatgaattcctagatcgtaatccttgattagttctaaccatcttctctgtctcatatttaactcggtctgtgtgaagatatacttaagacttttgtgatcggtgtatacttcacatctattcccgattaaatagtgcctccagatcttaagagcatgaaccacggctgccaactcgagatcatgggtgggataattgacttcgtgaggcctgagctgcctggatgcataggccacaacccttcgttcttgcattaggacacatcctaagccttgtcttgatgcgtcacagaagatctcgaaatcttttcggatatctggcaaggtgagaactggggcagtggtcaaccttttcttcatttcttgaaagctgtcttcacaggctgcagaccattgaaatttcttttccttctttaacagctcggtcataggtctggctagcttagagaatccttcaatgaatcttcgataatatccagctaagccaaggaagctgcggatctctgacacattcttgggcgggttccaagcaagtacagcttcaaccttgctgggatctacttcgacaccgttggaggaaatcacgtgtccaagaaatgctactcgatccaaccagaattcgcatttcgagaatttagcaaatagttgatgatctctgagcttttccattatcagcctcaggtgttcagcatgttcttcctcattcttggagtatatcaggatgtcatcgatgaacaccacgacatactgatccaggtattccataaagattttgttcattaagttcatgaagaatgctggagcattggtgagtccgaaggacataactgtgaactcatatagaccataacgcgttgagaaagcggtcttcgggatatcttcagatctgattttcagttggtggtaacctaacctcaagtcaatttttgagaagactcttgctcctttaagttgatcgaataaatcgtcaatccgtggcaacgggtacttgttctttatagttacttcattcagggctctatagtcgattaccattctctcagagccatcctttttcttaaccagaagcactggggctccccaaggggatgagctaggtcgcacataacctttactttccagttcttcgatttgtcttttaacttctgctaactcattagctgccattcggtagggtctttttgcaattggtgcagtgcctggtgccaattctatggcgaactcaatctctcggtctggtggcatacttgttaattcttccggaaatacgtcgggatattcacagactatgggcaccgactccaaggaggtgacttgcaaacaggttaggatagaccgacttgcggtaggggtgttaggggtaaagcggacttgctttcctccaggtccttgcaaggtgatggacttttcggcacaatctatctgtcctttgtgcttagccaaccaatccatccctaggatgatgtccaagctttgcgagtctaggactatcggtttggctaggaagtcaacttccttaattctaaggttaacttccgggcatatttgagttgcccttatattccttccaggggaatgtactatcattggtacacgcaaattttgggttttccaaccatttcttttcacaaaagcttgcgatatgaaagaatgggaagctcctgaatcaaacagaactattgcgggtacggagttgacagagaacatacccatcacaacgtctggagcatcctgagcggtttcagcttgaatgtgattcacacggcctcgaccaaagttgttggaagcacgtgaaccttgtccacttgcttgagagctaggacgagactgagctgccgctggagtaggagttctggcagtgctgccattagcatgccctgagttggtgttggtaggattctgaggacactgtctagcatagtgacccatatggttgcatcggaaacactgaactgctgatggtccctgcggtgacttgaaagaggtaacactgttaggcgcagtattgccactaggggcacgctgctgtggctgaggtgccggacggttcatctgaggacgaggggcgtagcctggctggcggttagcctgagtgaccgactggtggtattgcatgggttgaccgtagcgagggcgaggtgcgcctcgggaagaatttccctgatggttagacttgcgtttcttgtattcttcggtagcctcttttctggcatcctcaagtagtagtgctttgttgatcatatgttgaaaagtggggaagtcatgagcaatcaactggagtctcattccaactgcgatccccttcaagaatttcctgatcttcttcttgtctgtgtccacttcctcaggggcgtaccgagccaacttgttgaactgacttaggtactcattgacactgctgttgccttgcttaagtctgttgaattcttctttcttcatgtcaatagtgctttcaggcacatgagctgcacggaaagccgtagcaaactcatcccaagcaatgttagtgggttcagggtgagcattgcagtaattctcccaccaatctacggcaggacctcttagctggtgagaggcgtagagcgtcttctcaaccggagtacactgcactaagttgagttttctaacaacatctttcaaccaatcgtcagcctcgacgggctcgacggtctgagagaactctgggggacgagatctcagaaagtctgtcagcttggatctgttgttgcctatgtgagggtggccatttccatgcgcattatgctgaaaattggctatggctgtggttagtccttgtaagatttgtgtctgaactgccattaagtgttgcatgttgttttccacatgaggtggggaagggaggcgttcttctccagaattgtgactggcagcggggtgagagtggtgagactgttccatctctgcattacgggaagctgtgcgatgcgagaggctgctgcggcggggttgctcgacttcggcgttacgggaagcagtacgatgcgaacggttgctgcggtgagactgctcattagctgattaatgatttgcttctggctcaactctaccatcttcaaaaccaaggcgggctggtgcacgagctgcacggcgggggcggctagccatctaaactcccagaaaagggcggggtaagagtcagataagcacttaggagggcaaggagcaaagcaaatagcaactcagatagcacacactaggcataaactggatttttcaaatcataaaaacacctgatacaacgggtgtggacaagtcacagagctacgccgagcttgactgtgcgcacaccacctaggagaaccagactaccaaacaacacccacaacaaacacacgcacgcgctacctcgccacgactccaaaagagttggcggcggaacaaaagggcctaacacacggacagctgctgaagactgcctcctctactcctcgtcggcctggctgccccctgtagtcggctcctcagtcgaagaaacgtcgatcggctggcgcgaagggaccggcggaacctgtcgagggccggcagcagcacgggccgctggcggtgggggagctgggtggcggaaacggaacacggtggaagaaccaacaatacgcttccgcgcagtgcggataaagcgtgggccacggctggaagaagcaactggggtgtgtctgggggtgtaggaagggctaactgggtgtgggtagggggagtacactggtgagtacggcgcacgcgagctgggggagcacgggccactgggagtgcgggcagagccgcgggagctgtgggaggacaggtggctggcgtggcagaggcggcctgagtcccaagagatagtgtcaactgaggtgacaccctcctcggccagacgggcctccaaagcggcgtagcggcgggcaagggagcagtaagcctcaaggagtaggtcgtgctgagtggcctgagcctccgaaagctcgaccatgcgagttagcactggctgagactcgctgtacgggcaagggtacctggcgtctgagtggccagaaggaaggcgtggaagctgtcggaaggcggagcctccgagtcggtggctgtagtcgtgggccaggcgacgaagcgcagtccaggagaggtcctggtacgcgatctggtgagtgggcctggccacggtgaagtggtgtgggcgaaggccagctccgtgtatacctccacgggggtaaaggtatacagagagctcacagtgagggggaacacggtccacggagtaccccgtgtactcgggacaagagaagccaaggaaacgggcgaggtcacgaagctgggcgacgtggtgaccctcaccaaaaccgtgggaactgaagctggcgttcactgccatctacaattttgaaggagggagaaagatcagtaaccattttagaaacaaactattgaaaataaagaaaacaaaagaaaccttagcttttcgcaagtagttttgaacttagtatccttagggtcgtcctaagcgtcgggtttcgccctagggccaagcttgtgctctgataccatctcttgtcatgccccgaactagttccgaccggaactagcccgtgacgctccaaataaacctgttaatcgataccagtcccaggagacagtgctggtatcacagggagacagaatatcacagcaacagaggtctctttattatagagtagaagtacagtcatgttgggctgcggacagatcccgagctcacaactgcattacaaaaggaaagcggaagccaggacttggaccaatcatcacaggcgcgacttgggaactaggccgaaaccctaaaactcatcatagccagcttgctcctggaagaacacctcatcagcaggatccgcttcatcttcttcagcaactgggggggattatttaaatagagcaagggtgagtacgggagtactcagcaagccaggggaaataagtgtttaatgcaggcttcaaggaaaggctgttgttttcgtaattgaatttatttgaactcttttctgaaaacaactaagtgagtgcttctcaaacgacacggatgagacagtgcgtctcgtccggtcggagtatgtgcaatgcatcagtctttagatcttgaaacagggttggcactcggccaacagctttttaaacggcctcccgggccaacaactcttcaaacggccacccgggcctagctgatcccgtcagctactgatttttcaaacatcgaaccccttttcacaacagcaatttcacaagcagtagacaaacaaaactacgctaggaatcacctcacatccgcccatgaccgtgggcacggctgttcgaacagtttgttaacctctgcagagggggtacactttacccacacgacattactaacccggatcacccagcccgtggggatcagccacgtcgggagacctccaagctttcatgacaaggcatttcgaaagccgatacaggtttaccatatgccgtcgagaggggtcccagaccaacaacaggttaggtcccagaccatactgtgccaggaagcccaggggtcctccccgacaccaccccggcgaatccacatgtctctcggcatcaaggctcccctgataagctagttactcagccaggggtgtcccattccacccatgtggtcgtacttgtcttatgtttggatgaaatttcaaggaatcggtccttaagtgcaagagcgggaaaccgtacacccggtacgttccccggtccgcggttttggaaattcatttggttcgcaagcaccgacccaagtgtcgggttttccaagtcttttgtaaaactccagttttacccaagttgttactcagattttaagtttgaaggcgaccgtcgatactcgcacagagtgctcgagtatcgaggcgcaactgggtggttacaaggggacgtggtatagcaattaacaaaggaaggatcaaatgcgaccaattaggtaggtccgccaatctgccttgcggacgggacaaacagattaagtgcgatcctatcaatgcataatattttgcaagcaacataattaaatttcaaatataggctcaagatgttcaaaggtggcttgccttgctcgagatttggagcttgatcctcgaaatcctcgcactgcgggtcttcgggctctgaaactacacgcgaaacgggacaactcaacaaacggcgaaaataaagccctattaatgacctctaagcgtgccattagatagatctcgagatttggggaattttggaagttgaacggagtcaaacggatttacggctgggaagatattgaatttccaagattatcggatttttggtctaaaggaaaaaggattaaattaaatcctttttggaaaagaaaaagaaaataaaagagggagggaacatagacttttctcgggcggctagggcgcggcccaagagatttggggcggctcgaccgagcttaatgggccggacggcccaagacggcccaagcgcgcgcgcgcgcgggagggaggagagagagtccggtggaccgggctcaccacgcgcggtcccgggtgggacccgcttgtcagcggctcggctcaccgtgcggagggagtatgcggcgtacgcgcgtgggcggggctggaacgcggtgcacgcgcgcggttcgcggaggaacggatgcggcgggcccacgcgcagcctcacggctcaccgcggaccacgcgcacggggagaaacggagggagcggctggccgggtcggcttatccggtcgcggccgaggtggcgccgacgtggcgctacgtggcagccacgcgggccggcgggaggtagatgacgacccggccgcgaatggacggcgggcgatagcggcgagcggcggggcgagccacggcgataccggcgaaggcgagcacaccgggtggctgcacaggacgaggagagacgagccaacggctcggattcgccggagggagtccgtcggtggcggattgcggcggtggcaaccggcggagaggaaagggggaaacggcgacgtggtcccgaggggctaattcccggcgacgagagcatcttcgcggctttgggaactcgacgcttgcgtcggattgggcggaactacgccgagcgaggctggcgacgagcgggtgctacggagctcgggcggcgacggcggcgagcacacggcgagtgacggcaacggtcggggcggcgccggctaactacggggaggctactcaagctactaccgaaagctagggggaggagatggagcgaggaggaagaacggagagaggcactaccgtgcggaggaggggcgctgtgacgagaggccgacggcgcgggagtaaacttctccggcctcgggccgacgaagaggaagaagaaggcgtgcccggagtccccttccgcgtccacgaacgcactggctcctccgacacgcgcaacgacgattggcgacggcgaaacagagggcggcaaaggcgcggaggcgaaaatgagggagggaagggaggaggagacggggcgacgcggcagagggaaaggagagctcggcctccgcctcttggcggcttgcgcgcggagtggcgggggccgggggatgacgacggcgatgacggtgggatggtttggagcggcgcgacgacacgggcgacaggcgcgggctggcgcggcagagggtgacggcggcggcgaccagacggtcggccactcggcttgcgcgcggcttgcaacgggcggcgtccgcgcgggcgcgcgcacgcgaacacggcgcgtgggaagcggttttgcgagcgggaagctcgcgcgaggggaggggcgctcggcgcgggcgactcccgcgcacgcgcgcgcggcgcgcgggcggagcggaggggagcggaaaaagaggcgctcggcgcggctctcgcacgcgcgagcagcgagcgggcgagactgagcggggggggggaggagcgcgccggggggagagagagagagagggagagagagagagagagagagatgggccgaggaagggagagatgggccgagcgagattcggcccatcgaccttgggggaggcaaaatagacttttgcggaggaatttgattggaaggatttggattcggaattgaactcgacgatagatcggggattgagatcttgagatggcacggacactagacaacaagcaaggaaacaaatttcgcaattagggtttttaagagataattttcccgctaggcgccacgacggaacgggcgctacaatatgtaaattacttttagactttactaaatttacttttatatgtctaagaagtaacttggtgaaatctaaaaataatttagacatatcataaaagtaatttgtgattttttattaaaatataatcatgtgagatcttgttgtaaagatttaattattacaaacacaacggtgtaatcggattgtaaatcagatgagtaatttaagagaaaattttatttgaagcatagatgataggaatatttcccccacttgctcaatggattaatagcaaccaaaactcctaaagtactagcacgtggatgtctctggttaagactaattggagaggcctcttcaattagatttaccgtttgatattggtacaattttttgtctggatgcatgcatatgcatgtgtcggcgacatgggaccgggagtatcatgactagaggcttgggcagccgcgatcacccacgtggcctgaccccctcgggggggtcgggcccgagggtgatgtggccgcccctccctttgtctccccgaggggtcggaccgctcccgtttcggccccgagggccggggcgccccgaccccctgtgggtttggcgccacgtggatgggttaggtgagcacagcggggctcacctaaccgcatttattgcgggttggacgagcgcgtcacgccgcatgtaatgcagcgcagcgcgctcgcttatccggtccgtgaccgggcgcagtgtgtgaccggtcacagatcggtcagatcgcgggttaggtggtggcaggcggcctgttacacgcctcgccccgtcccgtcgaattgatgagagcttccaggcacttgtccctagccggagacggcgtgccagctcctgaagatggcacgtcggtcccggtcagatatatgccaggcttcatcgcaaccattgcaaggaagtcattgtatgaagaagggcagacatgcagcttgctgaactgacgcgtggtggacaagagtgaccggtctgtgactggtctgacgcctgtcatgtcataggcagacaaccgcgctcccgttttgcacctccttccagcggagtggaggtagatatgacccatcccatcggagggtcattcggacagcagctattgcaaatctccgcccatttatgaagggatgacagggtgatctccgaagtcagacgagtgaggacgcctggccacactcaagaacaagctgtgttttagcttccaagagaaggcgagccaagttttggtgaagataggatgggtccccacccaaaagaaaagtaggtagaagtggagcatgtgggatccccttgagttataaaaggaggaccttgcccaccaaaaaggggaaccaaaaaaggaggggatcgaaaaaaaagggagatcagaggaagacaactgagagaacacctgagctctctagttctccaactctctgtaattccttcacacacagatccaccagaacactggagtagggtattacgcttctcagcggcccgaacctgtatacatcgcccgtgtcttgcgtgttttctttctcgcgaacattccacagaccaagggcttagaatctcactcagcgcccccggctgaaccggcaaaggggggcctgcgcggtctcccggtgaggagccccacgctccgtcagcatgttttccttctatcgcataacctgacttatcatgtcattccgtgaactttaatttctctgacttatcctcagaatctgcataagtcggcaaagaaaaggccggcaatgttacagattttggcagcaaagcaagcaaataaccatgaatcgatgaaagcatatggctattagaaccaaggccctcaaggaaaagctcgccacccgctcagtgatacttcaacaagtccttaaaaaaaattcaatctgctcaatggtcaggagaaaccctccccacaggcacttaaaagatgtgagtaattctacggtgtttgagaatgtacaaaaaaatttagtgtaattgctctaaagatattgcaaaggcgtgcaaccttgatgcgaaggccacaatggaatgggccggaaaaggtgctcagccaagccacatgatcagtgtaagcaaagctaccacaatctcgaatttctcttatttacaagaatgacacttgacgacttagaagcgtttatagagtatcacttggcggcttagaagcatttaaaggatgttaatggcgatcaactgccagtggcgtgcccacatacaacttaccggtgtcaaagggcaccgggtaaaattgttaaattctaactaatttatgctattttgattagtatactagtgaataagtagataactactatgtagtggacgccaagtaatttttgttctaggttcgccactgtcagcttcgcccaacctttattgctttcggaccacttctattacctgttatactacctttaatctcttttatgttcctctagttatttgtagtaagtaccttaatgctacctcttagtgtcttcagaaccttttacgaatcctctacaacgagcaagatgaaaaaaattagatgaaaaaaaatgaaaaaaaatattaccaaattcataagaaaaggaaaaaaaaaagaccgaaataatatcctatagcgggtgtggtgggggggggggggtttgaaatttcgttccgtaattttagacttatcatcgactccttgcaaaaaaacacacacataggcatgttctgagttctgaagtactctgcaccttatcacctcggccgcggcctcccgatgcagggtgtgcaatgctgtctcctgcgtgtcgcggcggcacgactcgacgagctcgagcacttggtcgagggccttgttgagaatgttcgtccttgcctgcagcgttgggtcctcgtcgtcatcctgctcgtagcccttcacggcttgggcgacttgcttcgcgtgctgggcgagctcatgcatggcagcgcttcttgttgttccggtgagccctctgctccgccttgtcgatcttgctcgccagattcactatcgcagtgacaacggcaagcagctccatctcgtatccttgatcacgtacccttgcttgcgtgcttagtttagagagaagaaatatggtgccgttgctcctgagagaagtcttagttgagttgtcatctctttgaaccatgtctcatatgattggaataagtctatattgcatgctgatcgttggatcgggtcatgccgggctggcatatcgtgcaaagaaagaggcccaaacacaaaccaatagttgggccggatgacttcgcctatatgtgtcaacatcaagctctcgaatggccgcgggccaacgacaatggctatggcgatggtgatggagtccgaagccatgtacgaggaaagaaagctggtgaggggattagcaagggacggccatggcgcggtcgccggcacaaagacgagcaactacttcagttgcgttgttgatgtcaatggggttcggagtttaaaactccgaccccctctaccatctccgatcaagatagtgcccgcaatttgagcacttagcccggtgaagagcaccacggtggactcatcgtagttgaagagtacatgcaacaccgacgaggttgccattggcgagtagagagagcacatggcaagggcagtgacgaggccggagaagaacacgatcatcttgtcgagttgttcagggagatggatggtcgagatgttccagttctgggctgcactttttcttaataactacttcatccatcccaaaatataagcatttttagcgtagagacaagttaaatttttttaactttaactattaatagcaaaaaaaatttaaaagatcaatcatataaaattgaagatattagatttatcattaaacaaactattataatatacaactctttttatataaaacatcttacttttgttgatattggtgatcaaagtagcatctcgtggactgtgtcagggtttaaaaatatttatattttaggacggagagagtaaatatattggtcaattaattaattgacgatgattactcattcgtggattgttagggattaccatttttcaagattcttaattatgttaacaccaaatcttgttttatcattttttttttgtttccatatgctcccagcgttattagttggaatggaaataagagagcgagaagttcttcccggaaaatttccctatccccacacctcgctcaaaaccgtaaaccctaatctcgccggctcgccgcgcagccgcaggttctccccagcgagatggacgaatctccggtcgccaccgtcaccgatgactccgccgagaaggtgagcctcgtcgacgctgaccggagcggggataggagaaaagcagcggcggccggggagtcgcacaccagcgacgacctcctcctccgccgccgcctcctgtacgagctgaggaggctgagggaggcgaagaaggcggagcggaagcgcgacgcccggtcggcgaggctgatcctcctgtcgctgctgctcgcggtggcgacggcgccggtcctcctctggctctccgccggcggcgagccgctgctcctcgtgtggaggctctcctcaccgcctacctcttcctttgcgccgccctcctctccgtcacccggggcctcctcgccgccttgcttgcttacctcgccggccataccatcaccccgcgcgtcggtatggtggtcgtcttcctcgacggatgtcttcctcaactccgtctccgcgcgctgctgccgtcggtatggtggtcgtcttcctcgactccgtctccgcgcgctgctgccggatcaccatggccgtgctctcttcccttcgttgccaccacggtgttcgtcgcgtgggagctgatctcgtggtggctcaccatcgccgatttccccgtcgacgagatcgtcggcgacctgtccatcgtcgtcatgttatatgtcttttgcttcctgctgcaaatcggagaggaaaactcacttgtactctatcatcgccgttttggtagtcgtcgcagctttgcccctatttttctccatcgtctttggtatgttgccccctttggggggccccccccccaaaaatttttggggggggggttttttggggggggttttttaccctttttttaacccctttgggggggaaatttttggggttgggttcccctttggacacttagaacctgtatttccttgggtatcgtctgcgactctactcttcttaccagcagcacaaggtgatgatgatgaggtactactacataggagtaataatctatttgaccttggtattgcacattttgtggatttatattactactcccatgttacaaatgctagtaatgctgctctatgcctttgttttgccatgttacaaaccttgttgaactactgttttgtatgcgctccttccttgtcatgtatgagcagtacatacggtggagtacattatatgctggagctgaattactacttctactgtttttgttttatactacactggtgaagaaaccttttgtagtccgggttcgtaccccccctttagtcctggtttccaaaccggaagtaccaatccgggactaaagatcgctatctttagtcccgggtgaaataaccgggagtaaagatcgatctttagtcccggagctgaccttttttttttgcatggccctgttgctgcatggtttatatatatatatataacccatacatatatatgcatacatatatatatatatgtatatatatatatatatatatatattatattatattatatgtatatacatgcataatatatatgtatttatacatatatatgttatgcaaatgcatatgtatatagatatatatatgaccaaaatatatttacattatagaaaatgtgtacacatgcatatagaaacatatgtagtcatgtattaattacaatccattatatgtcctaggtagctacgatttcgacgtagtagtactcgctgctagctcagaagctaaggaccggtgaattgtgtttccgttgtagtagaattcacccttgggatcaaggatttcttcgttgatgaatcccatgagttgttcttgaaccgccgcgataaattccttgtgtgtggtcaggttatccctcatgcgaataaactatatgaatgtatgaaattgattagtaattaaacaagaaatcgctacgtaatgaaattttgaatttatttgtacgtacatcgagctctcttgtggtaatgatttggtctgcaaggcagtggcaatactcgcacacgtaatagccgcacaagttagttccctgcttttgctttgcgcactacaaataaatgacaaacaacgagagatctaattaatatacacttgtatgtatttgaatcggagaaatataaatgtagagcatgtgtactcacaggaaatttgaacttccgcctaagtctttctctccatttgccgcggaccaaatgacggaaccgataccaagccctacatggagtttaaagctatgattcgtagtagaaattaacataacaagattttcttaattaacaaaggaacttatgacggtacctgtctataagttcgaaaaccttgttaaacgtagactcttttttatccattgagtcatatacgttgacggtgcaggcctccaggtcgaagagtaaaagcacccagtggaatctgcaatgtgcgtgagatgcattacatatgaaacacttagcaagttcgtacgggaatgaaatttggtatgtaggaagacagtaaaattaaactaactctgtgttgtatggcaacagtatgaacgtcttgtaatgctgcgccttcaggagatggacgagattgtcctctgcttcttgtggatattggtcgagcattgcgacgtttactttccaagggtcgatgaatccagtatcgaaaaccctccgccgtcgggccctttgaatctccattctacaatgataaaagggagtatattattttctatagtctacttatatacaaggatctaattaattaaaggagacgtatagtaag

SEQ ID NO: 6014 - DNA, 2073 bp, Oryza sativa
ttactctcacgtgcaggtgagacgtggttacccggacttcgtgttcgagtttgaccgtctccagccgagcgacgtcatctgggagccgtacacagaagaggccgtcgctgcgagagcaccgctaggactttcgtccttgtgcacacgcgaccaggattactggctgaccatcctgccgatggtgttcgacattttcgttgagcctcactgcccgcagcgtgtgatgagacagttcggacttaggcaggtgtttccgggcaacgtgcagccgaccgtccccccttccgaccactcgtgagttcggattgttcatttcgaaatttttatgataattacatcatcgagccatataatttacctctcttcacaggttgactcgacggggacagctagcaggcgcactttgggctccacgtgtacagcagtacgttgacgactgggtgttagctacagaggaggtgatcaacgagctcttcccacacacggaggagaactaccgtgactaccttcgctggtaccttcctcgcactcgtgcgcgtgtgaccttcactccagacgccccagagccgcacgttgccgctgtcacggacgcgtatcccacgcaccgtgaccgagactacttcgtggcggtacgtccaatttgtattacttccaacaattatttcatttatcttgcataatataggacaactactgaattttttattgagaaaattccctatctagcatcaaaaaaagttgctcttccccctgtagcatccaaacttcaaaagttccctatctagacaccctcaaaatttttattccctatctgacacatctgttgctcccattacctccaccgtcaaaacaagcttggacccacatcaaaattttttgacctcgctctttctggatcggtcccatccccaactccacgctgctgctcctcaactccacgccgccgcaaccctagatcgccggcccatggccggcagcgcggatggcgaccccctgggcggtgaggacggcgattccgcaggctcaggcaccgtttccccatgcgcgcccctgcaggtagtggcgccggcgacacgggaggctaggttgtcgcgggaggtcgggaaggcgaggcggcggtcgttcccggcgacggcgagcgggggggggagcgcttcttggcgatggcgacggcgacggcggtggagacgccgagctcccgcatggcgagggcctcctgcacggcactgaggcagacggctaggtcgtcgcgggaggccagcgccctgccagcacgggcggccaacccccggcctgctcggccggctaatcccaggcggtcgcaggcagccaggacccttccactctctccgctcgccaggttggttggttggtcgtagcatcttgtgaaacttgtttctttctgttctgctacacgccattagtggttcttgctctgtttgtgttcgatcgattgagcactactatgtgttcttcgttagatgctcagtttttgtgtttacggagatttgcttgatcggtgcaggtgatgagggcgatctctgcgtcgaggagggaggccatggcggcggaggaggagaaccgtgcactctcggaggcaaggatcgcgtcgctgtcgctgcagctcgacgagcggctgctgctgcgcgccgcggacgccaggctgagcggcttcaatggcttccgcggcctgctacgcgctgcacaacgccagctcgctgctgctcctcgtcctcacctccggcgccgtctcctgtgccgccgccgccaccgcggcgggccgtgctccgcggagggcgccgcggacaccggcgggttcatggcatccattgcaatgctgcagcagaggatggtggaggaaaaaacagtgaacagaggaaggggaaaaaacgcctaaattaccaaagaagggcaaaaccgtcttttgtcctacttgttaacaccgttaccctcaaaactaacggaagtgctagattgggaacaaaaattttgagggtgcttagatagagaacttttgaagtttgggtgctatagaaggaagagcaactttttttgatgctagatagggaattt

SEQ ID NO: 6015 - DNA, 2749 bp, Oryza sativa
actattcttctaaaacattaactaaaaaaaagtggtacagaaataaaggttgctataccaagttcaggtgtattgttgcacttgaaagaatgttgttgctgtgagctaaacacttctaaggtactgttatccatggacgaaactggcatatccacactttctaccgatggaacgtgtggatcaataacaacttggatgccttcaagttgtcctgaagaaagtttagagaaaatctaccttttgaactgataaaacacaagatatgtgcaatagaaagaaaagaccaactaccatggtgcatcaagttcttgtccaaagtgtctggctggaatctatatggcacaccaatgtctgataatccaacagatccatcataggttgatgaaatttgcggatgcattccttgcacatcaagttgttctgtgagattttgaagaatcaagaactaatcaagaagcatttaacagaaactaattccagcagcaaattatgatgattggatattgggagcactcaaattactcaagagagggcaggtcgaacctaccttgtagtgtatggcttggttgcattgagaatgattcctgaaggcaatagctgtcatttcttatagaaagagcctcatgttcatgagacacactgctctctttaaggcaactagagtaaactcctggtctacatttctgagcatgagcaatgatcaaatcccaatcttggtcggaaatcttccccaaaatctacatagggtgatattaaaaaaactatcagtaacattgcatagataataaattagctagcaaaataacaatgttaataatcaatctcatactttacgcagatcatattcgctattattgtagaaagataagaagtcctccactgtcttgataccattctgctctagtaacttgtgcctgtcaccgttctttgcaattttactcaatttatatacagcatcacgtggggatggattgggattcttctttgttactgcagataaagacatttgatgtagtcaccctggattaggatagtttgacttggaacaatactcttatctataaacttggtcgaacataggatagttttacttaggataaaaccagagataccccgtgtgaatgcatgggttgtggattaagttgttctgttcttaagtatttaaacagtatgaagcttacatatatatagattatgtaacataaatagcctgtgtgaatgcatgggttatggattagtagtcataatagttaaattgttcttactactcatctgcttgccccttccctaaatgttaatggatgtactaatgctagaatagaatggcacgcgtgaactcacagtatccccgaacatccttcacggcaaaagattcagttactccttcttgaattcttactgagattctttcatcagctgccataacccccaacttgaactttctgcttggaacaaaactagaattgtcttggaatttggcactattgagataacccacaccattttgcagtctaaaatacagcttcccagacagcaaatggcctttatgaggtcgtccaggtactattttactatggaaatactctttagtccactgtcccttgttatcatcgtcaaagtcaccgtcaatggctacaatatgaactctcatcgaagaaaatggttccattgttacgatcttgtcgttatgatcatatatggctacctgaagggggttctcatcatctgcttctattttgtgtgttgagtacttatcgttactgcatgaatttacaaattgtaatcgaagtggcacggtgcagttctgatcagaatcatcagataacatcctgaaaaatagtgcaaagaaatcaaacacataatgatactaactttaatttatggcagttattatgtgttctcccaagaaacaaagagatataacaacgatacatatatcttatgcacatggaataggcgtactgttcctttctctcaactcttggcttggctactttctcaagaaaaaagatacttgttttttttcccacatacaccaacaaatttttataagagcaacttggcttaatttttgtccctcaactctaaaattggacaacatttttctctgaactctcaaattattaaaaggaaaaagtcagttttactcccctcaagtatgaccctggagcaaataaccccctaacctttaatttggtttacttaaccccctaggttcttaaaaccggatcactattcacctttctaatctaatacaatccgctttgctgatgtggcacatggattaggtggttttgcttactaggttggatctaacgtggagaaagagaacccaggagattaatcacacgtcgtattctcctccatgcgttggactcttctccctcacaagtcctctcatcatctcctctctcccttccgacggcggagaatccaggtgatgatcgtcgcagataggcggtgctgatccgtgagatcgcagccccgtggtgcgtccctccccctccctcccttcctccctccctcctccccactccatcttggcatgctttaggtttagggttgttctagaaggggataataagtgcgtgtggcagttggttgatgaaatttttttggttgatttcgttggtggtagggcactactgagggttaggttgttgctatcccttgctgtttttttttcttgcgagctcattatccatcgtcagatgccggcgctcggcgtgtgcgtcttgaagccgtcgcg

SEQ ID NO: 6016 - DNA, 16857 bp, Oryza sativa
  unsure (1)..(16857): unsure at all n locations
tgcgcctcgatactcgagcactctgtgcgagtatcgacggtcgccttcaaacttaaaatctgagtaacaacttgggtaaaactggagttttacaaaagacttggaaaacccgacacttgggtcggtgcttgcgaaccaaatgaatttccaaaaccgcggaccggggaacgtaccgggtgtacggtttcccgctcttgcacttaaggaccgattccttggaatttcatccaaacataagacaagtacgaccacatgggtggaatgggacacccctggctgagtaactagcttatcaggggagccttgatgccgagagacatgtggattcgccggggtggtgtcggggaggacccctgggcttcctggcacagtatggtctgggacctaacctgttgttggtctgggacccctctcgtcggcatatggtaaacctgtatcggctttcgaaatgccttgtcatgaaagcttggaggtctcccgacgtggctgatccccacgggctgggtgatccgggttagtaatgtcgtgtgggtaaagtgtaccccctctgcagaggttaacaaactgttcgaacagccgtgcccacggtcatgggcggatgtgaggtgattcctagcgtagttttgtttgtctactgcttgtgaaattgctgttgtgaaaaggggttcgatgtttgaaaaatcagtagctgacgggatcagctaggcccgggtggccgtttgaagagttgttggcccgggaggccgtttaaaaagctgttggccgagtgccaaccctgtttcaagatctaaagactgatgcattgcacatactccgactggacgagacgcactgtctcatccgtgtcgtttgagaagcactcacttagttgttttcagaaaagagttcaaataaattcaattacgaaaacaacagtctttccttgaagcctgcattaaacacttatttcccctggcttgctgagtactcccgtactcacccttgctctatttaaataatccccccccagttgctgaagaagatgaagcggatcctgctgatgaggtgttcttccaggagcaagctggctatgatgagttttagggtttcggcctagttcccaagtcgcgcctgtgatgattggtccaagtcctggcttccgctttctttttgtaatgcagttgtgagctcgggatctgtccgcagcccaacatgactgtaattctactctataataaagagacctctgttgctgtgatattctgtctccctgtgataccagcactgtctcctgggactggtatcgattaacaggtttatttggagcgtcacgggcttgttccggtcggaactagttcggggcgtgacacatatattatagaagtaacttataaaagaagaaaataactttaattaatgccttttttcattgaacaaattatctataaatatatatatatatataagagttacttttaaatttgattaaaatacttcctatacattcataatgctctgaagcgattacttttattaattttttttagttaattccataatttgtgctgattaatttaatttctagataaagttatgtttttatctttacaacggatttacttcaaatgacatgctaaagttatcttcgttttgttctaagttacttctataatatatataaattacttttaggttttactgaatttacttttatatatctaagaagtaacttagtgaaatctaaaagtaatttagacatatcataaaagtaatttgtgatttttcatcaaaatataattatgtgagatctcgttgtaaagatttaattgttacgaacacaacggtgtaatcggatcgtagatcggattagtagtttaagagaagattgtatttgaagtataggtggatggtgtctcttatagatgaagtggtagctgatttatcctagctgtgtagttacgtccaatatcaaaatatgtgcttcttcaaacactgaattgcaaagtattatccttcatctcctcggtactatacactgaacaataatactaccaataatgtcacgctgcatcagcatcagtaacatatccatgtcacatacatggggccgtcttggcgtgacaggccgggttcgaaccagatggcacggcctaccttgggagtttctcataaggataattctaccgtcttaagaagatatcagaggtattatattttttatataaaatttaatacctttaaatactaaacttttttaagtataaaaaatttttagtgtaaaatctcgatacctttagatattttctcaagtacataaaatttcttttgtcaaaagggttgggagttttcttctccaaaaccccctttccccctcatgcatgcgcctctccggagcaccgccgcatgctttcagcccctcatctacggcggctgtaaccaaacgaacaccctaccacgaggccacctcctctctacttctttagcacacgagaagaggaagcacctgtttggcatggtgaccccagccgtcggcgactgataacgaaatcgctagttagtgactagtcgcgcgcccttcttcccgcgcggatggacgcgtggcgcgcgtagaagggaagggggcgcggcggccgcgcttagtgggggtccacattggtttttttcgccgttttttgtggggtttcatacggttccttttttatgttttttcttttttttccgtactttcagttttcagttttctttttttttctgtttttcctttctatgtttttttagtttttttaaggaaaaagtacgaattacccccccccccccccggaactattccggtagtacgatttacctcctaaactacaataccggacatttgacaccccaaacacttaaaaccggataaattacaaccctaactcgattcgaacggttttcagcctacgtggcacacacgtggcggtacagtcagcaaaaaaaaacaaataaaacaggtggggcccacctgtcagcatttttttttcactcctctctgaccctctctctcggagaacacagcaagcggagggcgggcgaggagccgaccgacgacgccgacgggcggtcggcggcggggatggcggcggccggcgggcgagcgaggatccgacgccgacgggcggccaacggcggggatgactgcgggcggcaggcgagcaaggagccgacgccgacgggcggtcggcggcatggatggctgcgggcgggcgaggagccgacgccgacgttcggccggcaacggaatggccgaaaaattttggggggggccccccttttttgggccccccccgggagggggggggtttttttgggacgaccccccggggggggggggccccccttaaaagggccgaaagggggaaaagcccccgaacccgaattagaccggggccggccgaccggtggggatggctgcggacggcgggcgggcgagaagccgacgccgacgtgcggccggcggctgcgggcggcggacgaggagacgaggccggaggcgggcgggcgcggagggggctgtgagcaccggtagatgaggttggcgctcgatgaggttgcggcggtagagctcgaggatgctggccatggcggcctcccgctcctcggtctcctcgtcgttcgtgtcgagctccttcaccgcgaacgttgtcctgtgcatgttcctccccatcacgatctccctcgtagtcgaagacccctcccctccgtcctcccccgtatgcccaagcgagcagtcgtcctcgcccctgtccgccgtcgtcgccgcatgccacgctccgctggctctgtgtctgtcacgcccagaaattcacaaataatttccgaacttatttgtgcatgaaatcatcgtccaggaatcagccgaggtacacaaactgacaatttaatatacaaatctatcataataataacgttacatacttacaaaagaaaagaaaacagcagcggaataacggtctagcgatggcttcagctccgctcccacaggcggctcaactggggtataagccaaacgtcttctccttctggatcctttttcttcaactgaggtttgattgattattgcaaggtgagcatataacatactcaacaagccacacagcaaatatgcaagtgcacaaggataccaaaaaatggcataatatagggctcatttgcaaaaacagcatttagcaaacatttgagaattgtaaaacagtagagtaattaatcatcaattttaatcaacaccgaacaacacacccatgctgctcaggcccaaccatcctgaacaaccatacccggctgtacagatctatctccaaaccaggaatgtaccattccaaaccaggagctaatcaaattagcagttatagcattatttattatggtgagaagtgtgggactaatcacaaaagacattgttagacccgcccataaccgcgggcacggctattcgaatagttttactctggccagaggtgtaccactgtatccacaagacacagccccacaacatgtcaccatgcgcctcaataccaccacggtacctcagaaaggagctgtgacagtacccctcgcacaacacaatccaccacagcgcaccattcctggatcataatcacccccttataaacaaggcatggactccccagcgacccccgtgggcttatctccgccacttctcagtctggtgccccgcaatgaaccatgctatacaaaagataaagccgttgcccatgctggcttgtggttggcacgattaatgttttacaaccgaaactcgtgaaccggtccttaattttcacaagcatgaccatcaaaaccatgtgctcacaacccaccattatcaagttttaattggcaagtaattaattaaccaatcacgattgaccatcgtgagcttccattaaatatccataagtgatagtgaagcatgatttatcccattagtgagctattgtttctaagcatggctaagcatctattttaagcatctagctgaaccaaaccaatatataaggttctagctaatcaaattataacccataggtaaataaagtcatctccggccataattaaatgggaaaggctcaccacccagtgacattcaaaaataaatgcacagttgaaataaatagagaatttaaatataggatcaacatgctcaaaggaattgtgtttgggatctgtgtgacttgccttgcaataattggtcttcaattatcttcttgaactcttctgacacacacgcgaacctttgaaacgacggaaacgacaagctaacacgcaaaacgaggaaaaatactaataaaaaccaaataaacagaacatataaagtaaacaaacatgtagatcatgattttagatgaattatgagacttaaacggcctcattccgatttcgtatgagttaattacgaattttacaagatttaattccaattaaagcctattaaagaaaagactattccaaattaattaaacaatttacaaatgatttataactgagataaaagattaaaacaacctccggaaatagattggatcatatttgatagatgacatatgttaaaaagaaataatatgccactgaaaaaaaagaatgggtttatatggctgagactaatcttgaccgagtcgaccaagatcggatggcttggattgacctggcaagcgagcctcacgacataccgattgaactacgtgacacgggatcacccaaatgatcaaccgaaaccggcgaacggaaccggcgctatgaacggttctaaactaaaggacgactcaatacggacgaacgaacgaaacacggggaaacacctcgttcaaacaaacgagcgaacaactcaacaacggttgtggctaaaccggtgagctagacacgattcacggtaaagccccggtacggcaaacgataggccggtaggaacctagggatgcacctacggctttacaactcggctaccgggctacggctaaagcggtacacgggtggacacgacacagcagcgacggcaaacggtggctacggtagcgggacggcaacgacttggcacgcacgagcagcagcagcacggctgtagcagggagcggcacagcgacggctaggcagctagcgcagcggcgacgctagggcagcagctagcggcacagcaatacgacaagcggtgcgcacggcagcggcacaagagcggttacggtggcacatatacagcagctgcgcaatggcaacgtacagcggctaaacagcgacgcggcggcaacaaggcgccggcggcagcggcggtgcatacggcagtcggcaagcgacgcggtagcggctgctctagggttagagcaatagcggcggcgacatgaccgagggattgaaacctaacccgagggaacacggatagaagtttcaccgaaccaaagcgattggagagggagagatgacgacggcgacccggcggcaacacacggagacgacgacaacgctagacaaacaacgaattagattagattggattaataccctaggaaaaaatctacaccggtgaacgacataggagcggcggttgccggcgaaccacggcacaataatgcaaacggtgggcaccgggaggaagaggagattgagaggattccattcccgcaactaatttggaaagaggagcaatggggtggccggatttgaaaggaggaggcggcggcaacaggacacgggcacagcagctcggctctggctggaggttgaagatgcactgtagcgaggggatgcaaaacagacttttggctgggcttctattgcacagcctgatagatggagggatgcaaactagaattcggggggataaggccggccgaatagaaggaagaacgggccgaggactaaaggtgaacttttcctatttcggcccgaaaaggaaaagcggattttaattatgtcacatcctgatttttgtttcaggatttataaattatttaataaattattattagaatttatattaaatgttcattaatttacaagtgaagttaaatgtgggaaataaaatttcctaaatataaagcatggatggatttaatttttattaaattctccatggttaattatactctctggaattttctcggatttttcggagctcaattattaattttaatcatacaaagagaagttcagcaattatttaaatattaaattaatcattaaatggtctgattataattttgttaagtactttgagtgtccaagtattttcaggatttttcttgaaattatttgagtattggaagtatttttaacaattcaaagatcatttcagtgattattttaattggaaaaagtttttaaatccttccctaagtcgttgggccgatttcggcccaactctttctctctccgcgcggccgaaccggcccaatcggcccagcagccgccccctcctctctctctgtcaaagtctgttttgcctccctccttcaatcgggccgaggaaatgaagcccagccggaaaagtctacttttcctccctctgctactgttcatcttccagctctggacagagcccgagctgccaccttacgccgccttccgcctccaaatccgctccaatccgaccccgtttcttccggatttttgaggggttttgatcctctcatcctcctctatcttttcccccaagaatcggagcaaatcgttgggtattttatccgaatcaaactcgttttcgagtttatctccaaaaccgagttttgattttcccggagcgatttcttgcgggaggagtccgatctcttcaatccaaggctataaataggaccccctagtcctcctctttcgtttgccccctctcccgtcctctcccgtgacccgtggagccgtcgccaccgtgcaagccgccgccgccgtcgcttcttcgtcgccggccgtcatccgtcgtcgttcggcacttcggtgagcaccatcgggttcgtctcgtcgtcctctacgtgtacatgccctccaaatccgcagccagccgctctatctccggcgaggtcgccatcttggttcggccatgggtgatgtcagcatgacgtcatcggtttttctttttctcgtttttctaatagattaaatcttcggaaaatcataactaaataaccgtagatccgtttcaggtggttcaagttgctaaatttttctaaaatcaagatctacatgttaaaaatatccacatgtactgtttatgcttgtttttgtactgttttgttgattttagtctttttgctttagtttccgacgttccggaggagagcgttttcgttgagcaaggttcggaagtgtttgcggaagcccaaggcaagtcacacagatcccaaataaccctttgaacatgttgaacccgtttaaagctattattttatttcaactatgcattatttttgaatgtcatcgggtggtgaacctttccccgttaattaatggccgaagatgatcttattttcctatgggttataatttgattagcatgaaccttatataatggattggttcagctaaatgctatatgtaagtttgcttagctatagaaacattagataactaaaggggttaattataaactatattatattattcttattaattatggttatatttaatggtagctcacgatggttaatcgtgtgatgttaattaattgataattaaaacctggttaaggtgggttgtgagcatatggttttgatggttgtgctcatggcaattaaggaccggttcgcgagctactgttgtgagacattaaccgtaccaaccacaagccagcgtgggcaacggctttatcttttgtatagcatgattcattatagtgcgccagactgtgaagtggcgagaagtccatgggggtcgctggggagtccatgccttgtttataagggggtgactatgatccaggaacggtgcactgttttgagttgtgttgtgcaaagggtattgtcacgatttccccctttgcaatgccgtggtggtatttcggggcatagcaacatgtgtggaatcgtgtcttgtgggtacagtggtacacctctggccagagtaaaactattcgaatagccgtgcccgcggttatgggcgggttgagcaatgtttttcgtgattagtctcacacctctcacagtaaatatggatgttaatacttggtaataatttgtttagctcctggtttggagttagatctgtacagccgggtatggttgttcaggatggttgggcctgtgcagcatgggtgtgctgttcagtgttgattaaaatttctgattaattacttcactgttttacttctcttaaatgttttgctaaatgctgcttttgcaaatgagcctatattatgccatcctttggaatccttgtgcacttgcatatttgctgtgtggcttgttgagtatgtcatatgctcattcttgcaataatcatcaaacctcagttgaagataaagggtccagaaggagaagacgtttggcttataccccagttgagctgcctgtgggagtggagctgaagccatcgctagaccgttaattccgctgttgttttcttttctttgtaagtatgtaacgttattattatgatggatttgtatattaatttgtcagtttgtgtacctcggctgattcctggacgaggatttatgcacaaattagttcggaaattattagtgaatttccgggcgtgacaaattacttttcccaattaaattaatcactgaaatgatctttccattattaaaaatactttcaatgctcaaataattcaaagaaacttcttgaacatacttggacactctaagtatttaacaaaattgaaaccagctcatgcaatgattaatttaatatgtgaataattactgaaatattctttatattattaaaattaggaattgagcttcgaaaaatccgagaaaattccagagagtataattaataatggagaatttaataaaaattaaatccaaccatgctttatatttaggaaattttatttcccacatttaacttcacttgtaaattaatgaacatttaatataaattctattaataatttattaaataatttataaatcctgaaacggaaattcaggctataacagtgtcccacgtcgccgccgcctcctgattccacgcgcctgccggctcttgtgtcccaggtcgggctccgccaccgcgctccgccgaccgcccgcgcccgccccctcgtctcgcgccgccggctcgtctctggcccgttgccaaccgccttgcccccaacgccgcggtccacctgtccgccgctcccttgtctcacgccgccgccatccaccgatgcctccgccgtctagcgcccgcccactcgtctcacaccgccgcttgcccaccgccgggccccgcgcgccgctgtcatccaccgggaggcccccgaggtcgacgtggtcgcggcacgcagccccccggcggctgccgcctcgcctcacctcgatgttgcccgcgctcgctgcctccgccgcgtctgaactctgaaggagaagagagagaaagagtgagggatagaagagagagagagagagaaaaaactgacatgtggggcccacctgttttttaataaataagttgctgactggactaccacgcgtacgccacgtagaccaaaaccaccgcggattgggtcgagggggtaattcgtccggtttgcatagttggggggtgaagaatatccagttttgtggtttaggagagtaattcggacgaccgcgatagttcgggtgtacaaatacaaaccttatatacacaaatacaaactttgtatacgtgtatacaaattttgtatatgcgtatgcaaactttgtatatgcgtatacaaactttttatacgtgtattttttaggttttatacgtacgtatactaactttgtatacaccttttcagttttctctttctgttttagtttttttccagtttctcttttttctccttatttttaagatgtgcgtatgcaaagttttttggttaatttaaccgggttttgggaaaaattaatttttttattttttttgtttgtttcccccttttttaaagggggtttttaaattttttttgggggggtttttttttgtttttaatacgacatatacaaactttgtatacgacgtatacaaacttttgatatatcatatatatatatatatatatatatatatataaacttggtatacgcgtatgtatatatatttttatacatataaaaatatattttttttatagtagtaccagcagtatactaatagtaggtactagtagtaatagtagtagtagatactagtagtagtaatagtatagtagtactactagtggtaattagcagcagcagcaggtgcggaccgcgcgaccagtctggtcgcgcattagctgcccccgactgataagagtacggcgttcttgccacgcccgctcgcatgacagcccggccctgtttcgcaaccgtatgatctcgccggtgtaggttgacatcatgggccgaaaccgaatcaaccccaacggtacggtgaacgaacgaacattaattactttacgagacaatcgtgccggcgagcacgtaagccgcgccgatggcgccctagcttctctagctagttctttaccatatatggattcatgcatggacacggcaagtaattaagttcctgaacaattaaacttgaggtcatcgttgtattcgtgtccttcgtcgatcggcctatatatatatgcaggcgtggcggtgaccacgcgggtggccaccacgggagaagatatatacttctatatacccctgcagcggcatgatcaccgtggcgtacgtgcaggccagtcgccatggcccaaaccagacgagaacgtaaagcaacgtcgtcgatctgtgtgcacccagccggcggccatcaccgacgttcaactgtgttctttcccaattttcctaacacctcctctcgaacatagccttaggctcagagatgctcgccgcaccctgcacgtgccaacggtcataagaaatcctcgagttttaaactcccaaccctttcccacgtgtgcaatacctcatttgatatttgattaatttcgttattacgtaatggaaaaattacaaaaaccaccccataaatcacttgaagtttaacatttcaccccataaatcatcttgttgcaaatacccacccctacttaatttgttgcaaaaaccatcctaatgtgcacacgtacttaatcaaatcaatttgttatcggtgctgtatggttatcacaagctaaactagccaagtaaatattgtccaagcgtttgcattagacttatttttcatatttgattgaacttttttttttcatatagcaaaactcagtgcgacaatgtttaagctctattttgcaattttatttgtggaatctcaccgaaaaatatgaagaacactctagaagtatttaattttggtaaagaccatattaacggctcacactttatgaaatcatattgatttggttaaacatgtgtttattgggatggtttttgcaacaaaactgagtatgtgggtggatatttgcaataaaataacttatagggtggaatgtcaaacttcaagtgacttatggggtggcttttgcaattttcccttacataattaatgcaattaatttaaacaaaacaagccaagcaaaagaagtcgagatcaactacatatatatgcacgcatggttagggaacaataatctccaacagaagtactatatatatatgccggtgtcaccgtgtcacgcgtacgtgttccggtgttcgttcgatgagtccactgtggtgctattcatcggttcactgtttgaatctgccggcgaatgcttgatagaatatggctgtcagagtcgtagatggccgaaccggatatggattttcatctttccagagtaagttctcccattgtttgtatattattttagtagttattaaaaaaatttaaaatgacttaacaatatagactaatataaaatatatcactccatacattcaagaccacattcgacttttacaagttaaaaaaaataaattgaaaatagttatcatatattcgtggctatatgttatttttgttacaactcgcggatattgaatttaacatgcatgttttggggtgatacatttcacataatcacattaatctatctttctaaattatttttttaaaaaaatttaattatttagatgatatatacgaaatgaggatatccctctagctataccccttgttggacgcgaaagcagccgcgcgccgtttgttcacgcggcccagacaccgtcaaagattattttcagcacatctggatggcacatgccgagacttcagagtgctcaccctgaataacctttgcctaatgtgctacacgtgttcagttacaataatcttcaaagatgctagaaagggttcggtgtgtaaaactccgaagcacccatctatatatatatatatatatatatatatggcgccacaaaatttagttagaaacagtcggattgaacttcacaatgattaccaccatttcaaacacaaagttgaccactaatgagccacggcaatatagcaaataagtaacttgattataatacacaatataaattaaatttaagatagaaaactagcgatcacaaaatttacacttaaataaattaaaaattacactgtaattattagtataagtgcagtataattttaatgtaagtacgatgtgtaattataatataagtgaggtgtaagtgcagtgtaattatagtattaaacactaatttctcaatgtaacttttcttatgggccaccatattttttatcaacatgtatttacattataagtccctaaaatttacatatgtaattttaatatattttcactgtaagtcacaaaattacatatataattcgtatgtaattacaatgtaactatagtgtaatttttattacttataactactttgaggaaagaacgagtaccatctttgtggtcagttggtcaaaagcgtgctgctgtaactcatcgatcacacgatagactccccgccaccgcgccttcattgctcttggagagcactcgcacgaatctcgatacaccgccgcacgcacagacgtccgacgaaggtcgcgtcgcgtgcgccatatttcaacgcatgtgtgcgatttttgtgcaaggagtccgtacgtgataactgtcagctcatctgtcatctgatccgtatacttgatcgagagatcccatggggttcggagttctcttctccggatcccctcgacacttcgtatccagcggccacgaattacatgcaccctgaacacgaaagcaccgtggcgtggacgcatggtgatcctgttcgcgatcgagcgacgaacgagagacattctcacctcctcgccgcgccctacgcatgcagtcgcagtggcatgaaatgcatcatctatcctgatcgagcagcctcgacagtgccatatctgaatatatatggccatcgccaatcacaccaacaaaatttgacatggacttagtcgtttcgtatctgagttccgtaactctaaaagcatagccatccctctttcgattttatccatctaaacgaaacggaagagctcgactgacagaactcaagtcacgacccgtttgttacaggtcgggttatggaaaaatttatcactccacaaaacatacaagtttaattttaacttatacaagttgtaataaaaatgacaatttttactaatagttagattttaatttgttatttttgttataacttatagaaatcaaacaatctcttcaagaaattgataaagcaaaaaagacatttactataggttggtaatgagaacatgcatggtgggaaacgtaattaaggccaattggtctaaggtttgttctcctgttcagtatggtggcctcgggatttcaaacttggaacaatttgctagagctttttggctagggtggctgtggttcaaatggaggacgccagaaaagtcttggataggaactgaaacaccttgtaatgaattgaataaggatctgtttgtggcatcgacgaaagtccaaattggtgatgaaaaaaaggggagcttctaagaatcaaactggattggtggtcaaagcctaagaagtcaagcgccgaacctctatataggcattctaagaggaaaaaccacactgtccaagatgccctgcaacaaggaaggatggatcaacaacatccgccacagcctcactattcctctccttgatgaattatttaatgtttgggaagttctagcacatgacaccccacaactaacatatggggcataagactcgattgtttggtgatggacaacgatgaggaatatagtgcaaaatccgcgtatcaattccaattcaacagaatggtatagtcgccatcaacaaagttgtcttgggaggcatgggctccagcaaaatgcaagattttcacctggctggtgcatcaaaaccaggtgtggatagctaacctgtttgcagatcaagggatgggcaaataactatttctaccaattatgttttcggaatcttaaactgccgatcaccttttgttcgaatgtccagttntgaagcaaatctggtttggagttctcacttggctgcgacaaaggcgtatcatcctgaattgggcacaaataacaagcgacccggaaacaacaaaacaaaaagggctcatatatctcttcttgctcgtcgcttagaaaatctgaaaggaacgaaactcaagaatcttcagaggaaaagagacgacggtgcaccaaataatcagtcgtatctaagaggaattaggttggtgcggtatagctcgaggaacacgctcgatatatacggattcaacgattgacgtctgtcttcagctgcagtgatcttcagtcttctccggccaagtgtagatggcccgtgtgtgcgcgactggccgagatcaagccagacttcaacccggccttcctgctcagcccaagaatttattacacgtgttttctttacctcaattagttattcttaactcatatctgggccgcacaggtccgatccaacagctgcaggtatcctagaaggggttggagttttggtcatggacacagcgacgatcgaggagatcatcacacgtgtcctgtgtcctctcctctcctctccttacgctcaagcctcgccggcgccggagttcccacgccctggccccgcccctgatccagggaaaacctgatgaaacaagaatgtgcaaagtaaatacttgctccgtcctaaaatataagcatttttagcgtagtgccaagtcaaccattttaaaatttaactattaatagaaaaaataaaaaaaataatcatgtaaaattgatgttattagatttatcattaatcaaactatcataaatgcaactctttttatttaaaatattttatttttatagatattgttggtcaaaatagcatctcaaagcctgtgtggaaatccgaaaatacttatattctagtacggaggggtaaataataaaccaggtttcagatctttgtgtatgaattgtgaccaaacattcgatgcttcaaagaaattgcagacacgaaactatctcccccggaaattaaaatatcagttttaatgaatttcgtcattttctaaaaaaatgggtcaaggtttgtttaaatttaaaatatttcctttccaaaatttctgagatcggaaattaaaatctcagttttaatgaatttagtcattttctaaaaaaatgggtcaagtttgtttaaatttaaaatatttcctttccaaaatttctgagatctctgaaatttcgttgcccccggatagggctgcaggaa

SEQ ID NO: 6017 - DNA, 5007 bp, Oryza sativa
tgcctttcttccgtaccgggtggtttgttgcaaggaatcgacgatgacccatgtatacaaccttcctacagtgcttaagatacgtactttctgtttcatccatacagtgagtgcaagccttgtaccccttgttggactgtccggataggttgctaagtgcaggccaatcgttgatggttacgaacagcagcgctcgtaggttaaactcctcctgtttgtcctcgtcccacacggggacaccttccttcttccacaactgtttaagatcttcgaccagtggtcttaggtacacgtcgatgtcattaccaggttgcttggggccttgaataataatcggcatcattatgtacttcctcttcatgcatagccagggggggaggttgtagatacacatcgtaacgggccaagtgctatggccgctgctcatctctccaaaaggattcatgccatccgtactcaaaccaaaccgtatgtttcgtgcgtcctttccaaattctttaaattttctgtcgatgtttcgccactgcgaaccatcggcggggtgtctcagcatcccgtcctgttgacgctcttcagcgtgccatcgcaacattctagcattccccttgttcctgaacaaacgccttagccgtggtattatagggaaataccacatcaccttagcaggaattctcttctttgttagctgcccgtcaacttctcctggatcgtcccgtctaatcttgtatcgtagtgctttgcaaacagggcatgcttctaggttctcatactcctcaccgcgatataggatacaatcgttcggacatgcgtgaatcttatgaacttccagtcctaacgggcagactatcttcttagcctcgtacgttgtctcgggcaatttgtttccccccggaagaatgttcttgacgagtttcaataaatcgccaaatgccttgtcactaaccccattttttgccttccattgcaacaactccagagtggtatccaactttttgtgcccctgctcgcaacctgggtacaacgaagttctgtggtcctccaacatcttgtccaatttatgggcctccttttcacttttgcagtcctccctagcgtcctgcaacatctgaccaagatcatccgcaacgtcgttaccatcagcagctatttcctcctcgcccgtttgatttccttcaaatccaacatactgagcaaagtccggaatattgtcgtcttccacttcatcttcttccatttcaacaccttgctctccgtgggatgtccaacaattatagcttggcatgaaccccgactcaaacaagtggaaatgaatagtcctggatgcagaatactccttctgattcttacacttattgcatggacaacaaataaaacccctttgcctgttagcttcggccactctcaaaaaatagtgcacgccgtcaataaactctttggaccgccagtcagcatacatccattgccgatccatctacatgagtcaaaataaccgtacacaaataattattcttacaataatgacagtcatacaataattataagatatctttattcatacaaaaatcataaaatattacaccaaataattcttaaaaactatttgtaaagttttaaactaattttaatgtgttttacttcttttaattttcattttagtttgttttctattatttaagattaactttcactagagttttccttctcaactattttataaaaccttgtttagcaaatgaactaaatttctatatattctttcttccccacacacattttctctctcatcaacttacaactaaattttggagacaaaaaaagtgtgcaaaacataggtgcaaatgtagtatgacaaaaaaaacattggaggatgaagttgcaaaccttttaggcatctccgatttgtatgtaatcaccaaaataaattcaatagaaattttggcatgacctcccatcttttttgaagaaattttgaagcttgctcgggcagctggaggaggaagaagacatatatataggggtgggactttagtcccggttggtagcaccaaccggggctaaagatcaccgggatctttagtcccggttggtattaccaaccgggactaaagttacgactttagtcccggttggtaagatcccgggggggcctgacatgacctgacagcattcgaaccgggactaaagatgatctttagtcccggttggtaacacaaaccgggactaaagatcaaatatgcccgttacccttttgaaccgggactaaagatcatttttagccacggtttttattgcatccgggactattgtggaaatcggccgatcgacgaaagatggtttctccaccagtgctaccagtatatactgatagtatataaaagggtatgttagaaatttgatagaaaataaaataatactttagtaatttttggttgagatagaatctaattgggagtacccggtcctggatcttatcgtgcactaggggaggagcatcctgagcgtcatttgatgatgaagcacgtggcgatagcacgatttgatgatagaataacgaagaaaagataaaattaccctttcaaactttataccacaatctaattaacaaaaaaaattaaagcaatctacaccgttagatcatatatacttgcagcagtatattgtaccgtaaaagtccgtcaggatgtttgtggacaacgtgtatgttctcagtattggatttttctttttgggacgaaggcatatatatggtggagctgaattactttaatttcaactgcttctactaatacattaattgacgtgcaatctcgcaaaagaaactcgtactgttctgatttccttgccagagtaacacagtgtacatatggtgtatagctgaatatattaatgtacttgtaatgttttgttttccttgctatgtatatgcaggcctgatgacaaactggacgaccagaaccaagagctggccaagagcaaggatacaccagctgatgctgatcatgaaccggtggaagcatcgtcgtcttcctcaccaaggtcgtcgtcggtgccatcgcctccagcagctggttccccaccatacattcacccggaggagcctatcctctcctgatgggagcggcaagaagatggctgtgcaacgcctgagctttgtgtgattgaggtctgaatctttttttttcttttgacatttgattgtctgaatcctccgggcttgtttggcacagctacagctccatctctcctggagctgaagcttagataaacagtttcagctccacttaaaataaaaacaaagttgagtggagcgctctcacaaaagctctatagagatgtggagctgggttttgactactccacaactttcacttcaaactcatctcctgaagctaaattttggagttgaacctctagcaaacaggaccggagaatcagagacatgatcattagtattcactagcaacatgtgtataagctactagtacttttttttttagaacagctactagttctagtttgtgcttgccaacgtattagtatccacatcatagatcgatcattaccactttatcatgttctactacagttagtcgtctttactagtactccctccctcagttttttatattataaattatttaactttttattaagtaaaattgtattaaatttgatcaggtttatagaaaaatttaacatctaaaatatcaaattagttacactaaatataacattgaagatattttaataataaaatttgttttgtattgaaaatactaataaattttcctatgaaattgatcacacttaaaaaagtttgactagaaaaaaagtcaaataacttctaatatgaaacggagtgagtacatactaatgagagctaaagagtacaatgaaaacgaatggaagaaaaaaaaagaaatgaatggaagaaagaaaaaaagagaggagctagtgtctggcggtgacaggggaagtttctgaacctcattggttgcccatattttgaaaaaccattctaattttgaaggatccaaaacggaaaaagtcttgtttgacctttataagactagcccaaaaatgtgaatcccccgctttccaataggcttgagataaaggttgtgatcccaaatatttatagcgtaatagttgttgctatattccatcggtgataaagtagtttgtataaccacttactaatcaacactttattctttacctcgaggtcatgaattcctagccctcctgttcttagggacgacaaataatgtcccacttagcaagtcggtatttcttcttatatccatctccttgccaataaaacctagatcaaaggtaattaagttttttaagtaccccactagggattgcaaggaatgacatcatatacattatacattagaagactgctaagtactgagttaatcaaagtaagtcgtcctcccaacgaaagaagttttcttttccagctacttaatttcctctcaaatctctagactacttctttctattccgtatttctcaacttcctataattgatcgaaatgtcaagataacggaatgggaagttgccgacctagcagccaaaaagttggttgtattgatcactatattcaagtgcttcacaaaaaggaggactgcatggcggatcctggtcactggtctttaggacctgctttatcaagaattaaaaactttctgcagggaagggaagttcacatcaaatggatccccagagatctcaacaaagttgcagatgatttggcaaaatcggcaagacaagctcaacctagcagtcgcttggcttgactgttctaatgtttctcatatttgccaaagggatatgtgccctgttaaaagaggcattatcaatgctccaaagggagatgcaactgtaactcaatgctatatgtttctaaactctgtttttaattaataaaatgtatgagttctaaaaagaaaaaaagaaaaaaagaaaaggctttaaggcatcccactcgtttcatc

SEQ ID NO: 6018 - DNA, 9583 bp, Oryza sativa
cgctgccactatacatcctctatgacccatctgccgcctactttttattgtcattgggactctaaaaatcgaatataactatcgttggaatttaatttttacttatagaagtcccaccaaccatcgacgggtctgccattgtactcctgtacgacccgcccgctgcctctcatttttgttgtcattgagattttaaaaattaaatatgattatcattggggtttattttttttattttctagatgttccgtcaaccgccttgaccgattgcttcacgacctgcacgtcgtcctttcttttaatcgtcattaggattttatttagtgttttgttaatagtttttagatgttacatcaaccgccaccactctatttctttatattcatgttatttaattaatatcgtcatgtgttttagattactctgatgattaaaaaaagtcataattccaataattgaacttcccatggtaatgtactaatatgtgctaacctcactgtttatttaatgtaggtttagagagtaatatatgacatgctaagctgctatgatctcattgatgtcctaattgggtttagtcaataagatggatgcgtccaacacctcgcacgcatgtgttattgtcgtttgtttttcatgtgtgcacgcatcatattgtcatgggtatggcgcatgagacagacacggatgctagttttacacgtgattaccaaattataccacaaacaaatacaactcagttaccgatttacgacttaatctatctatctatcaactccatccgtttcagaatgtaagtcattctagcatttcccatatttatattgatgttagtgaatctagacatatatatctatctagattcattaacattaatatgaatgtggaaagtgctagaatgacttacactgtgaaacggaggaagtattatctatctatctatctatctattatattattaaaacagctttgaaaagaagcaccactttcactgtggaggctagaaattccaacattaatcggagaaaaagaaaaaaaaaagaaaaggagagtacaagtagaaatacaatctaaaaatagctgaaattcagaattaaaaataagctatattgaaagaagtttccatataagaacccaatacgagattaatcaaatttcgaaatagaataaaatccaaaattagaaaaggaaaggagagtccgagtagaaatacaattttaaaatagctgaaattcggaattaaaaatatgcaatattgaaagaagagtccatataagaacccaatatgagattaatcaaaattgggaataaaaataaaaataaaatatgaaattagcaaaaataaaaaagaagagtccaagtatgaatacaatttaaaactaactgaaattcagaattaaaaataagaaatattgaaagaagagcccatatcagaaccaatacgagattaattaatattaatttggaataaaaataaaaataaagtctgaaattagcaaaaagaaaagaagagttcaagtaggaatacaatttaaaattaactgaaattcggaattaaaaataagcaatattaaaagaagaatctatataagaactcaatacgagattaactaatatttagaataaataataaaataatattcaaaataagaaaaactaaaagagagttcaagtaggaaaacaattttgaaacaactgaaattcaaaaaaaaagaacactatacggtattaattaaaatttgaatttttttctaaaattagaaaaagaaaaaaattcaattaggaatacaatttataaataactaaaattagtgataaaaaataaagactgttgaaagaaaaggctatctaaaacacatgacgagataaattaagtaacatgcatataaaggagtagagtaacagcggcgtataaaaactgttaataaaacacaaaatagaatcctaatgacgattaaaaggagggacagcaggtaggccgtgaagcaaacaggtaaggcggttgtcgggacttctagaatgtaaaaaaataaaccctattgataatcatattcaatttttaaaatctcaatgacagtaaaaaggagaagcagcggacggggtgtataggagtatagttgtatagccgccgacggttggtggaacttctagaaaataaaaaatgaattatgaattccaacgatagttatatttgatttttagaatcccaatgacaataaagtgtaggcagcgaatggactttagaggagtacagtggcatcatttgacgggacttctaaatattataaaaaataaaacccaacaagacaataaactctaaaacctacaaggttcattttttaaaggttcggaacttctaaaaagtaaaaaaaaaaccaatgataatcatgttcgattttaaaatctcaatgacaaatggaccgtagagtagtatagtggcatcgtttgacgggacttctaaatattataaaaattgaaacccaacaatacaataaattctaaaatctacaaggtccattttttaaaggttcggaacttctaaaaagtaaaaaaaaaacccaatgataatcatgttcgattttaaaatctcaatgacaataaataagggaggcagcgggcgagccataaaggagtacaatggcaaagccaccaacggtttggcgggacttctagaaagtaaaaagttgaactcgaacgataattatgttcgatttttaaaatcccaatgacaattaaagagaaaaaatagtgaacgggccgtagaggagtataatgatagtgtttgacggaacttctataaattataaaaatgaaacccaacgagacaataaactctaaaaactataaactataagatccaatctttaaaggtttcaaaaagaataaatagaaatagtggtagatcgagtaagcaaataaagaacaatatgatagaagtaaggggtaacagctggtgtgactttttaaaactatataattagaaatacggggataataaggtttggttttcaaaatcttaagataaccagatagctatttaataaattttaagcaaaatcatactgaaaagggattgcctacacatttgtcgggtgatttttaacaagaaatcacccagattttttttacacttagatttatatccaacggactataaaataaaataactaatacaaatttgcttattcaatatttttatcaaaattatagtgcacttacatatcatatcaactaaatttacatgtgtaattttagttatatagaactgtaattttatattttaaatacttacatgtcatatcaactgaatttacaaatgtaattttagttatataggactgtaattttatattttaaagaaaataacaaatacatatttacttacactttatttttataaaaattacagtgcacttacatgtcatatcaactgaatttacaaatgtaattttagttctataggactgtaattttatattttaaaaaaaataacaaatacatatttacttacactttagttttatcaaaattacagtgcacttacgtatcatatcaactgaatttacaaatataattttagttagtgtaattacatacaagttgcagtgtaattacactatgagtgtattgtaattacatctgtgaaatttctagaaaaaaatttatcggcaaatatatatataaaaaattgaatagaataggtttctagcgatggtagatttgttaggcatggccgcatggtggtgtaatctagtgtgggatcctagctttggcttggttcagatttatgcacaagattcaagtgcagagaaggtcgtcccgtccggcgatcgtctccactcatcatgcccaaagggacgagcacagtgcgaacaagatcatcccgaccggctgaccacgcatgcagcctccaccatcgtgcggtcagcaaatccgtgaaatcctggagaagatcacactcaatttctcccttaaaaagggcccccggggtaaaaaaaaaaaattttttcacccgggggttaaaaaaacctttttgggaaaaaaaaaaaaaaaataatttaattggaatgtcttggttataaggggtcgctagccgcgcaattgcgtgggccacccagctagttagcttaatcagcaggaaaattagatctctattctattctcgtagagttgtattacctataaaaccttttctatttataaattaatttggggactatctatacaacgttcgactgaaaattagcctaaaaatctgtcaaatgtaactgtaacataattacaatgtaattttcataattacactatatttatactataattacatatgtaattttcataattacactatatttgcactataattatatatgtaatttgcatgtaactcgcatgtaattatagtataagtaagatgtaagttcaaactagatcataaaaatattgtagcccaatggggcagtcacgccttcatcccatgaggtcacaggatcgatccctaaatatgattttgtttttcttcctaaaagcacatatcttgatgcgtattagactgttagcatgaatctaagacacatccaacggtttagaaagtgaaagatttagccatcaaaaatctgtcaataaatatttagcaatccgattaatttggtctttttttttcctttcccctcttattaacgtgaacaaacttttgcgtttatatcacttcaaaaattaattatctattctgatttggattcaaggtcagtgtcaggatgtcatgtgattggttcatcaattgctacggtttcacactcctatccgtttcatctctttaactttttaaattttaattaaatcttaaccgttaatattcaggtatatcacaatcctatgcaggttggtattttcttccttttgtttaattaacgtgataatttctttacatcaaatatatcacaatttaagggcacagatattttattatacatgcatgtataattagctagatttagtgtacaactcttatcttctgtttcttatagataaaattgtagtagcattaaaatttagtcctatcataatctattggtatagattttaatctaccattgagcgcttaatagttaagctaatttttgcttggccatatgcatgcaaatacatgcatgtccgattcctagtcaaattagtcaaagttgccttttttattttaaggatattggctggtcccaatctctctaagatgttttttttgggctcacgtattttcctggttgatctagaccatccttttttttctagacaaatacgatccaacgacacatatatttttcctttttttccgattaacgtgggaatttctagcctccacagcgaacgtggtgcctcctttcaaagctgtttttaataatataatataatatataatggataaatagatagatagatatatagatagatagattatatacaaaggcaaagcttttgtgcccttatctatctctactattataaaaattgaatatgtttttaccgatattttggtatatcatccgtgtatgagtcggttcttaagttcgtttgcttttggaaaaacatatccgtatttgagtcggtttctaaaatcattcacttttgataatacagaaggaatcatataagaaatctatttaaaataactcgcatgctaacttgagacgattggactcctaactgcagcttatgattttctaaaaatatatatatccaagagcgaactcccaaaataaatttcattttaattaaaccatataacaataataatattaaaatagatttcacccgttgcaacgcacggacattttttttctatttttttaaaaaggcaaagcttttgtcggccttataaagaaaaaaaaaatcatttcacaatccacaccaacccatttccagaaaattcctctcactgcgtcatggcttggcgtctctccttcctggaccgacccttttatttgtccatccataataattccgcgaaaatctggtagcaagaacacaatcctcctgagttgagagactactgccatagtgccatgcatggcgctgtggggagggctggggcaagcggcgacggtggcgcagctggtcggggcggacatcggaggcctcatcaccatgatcatgcaggcggcgatgacggctcagcagaacaaggaggagtgcgagcagctccccgccgcgtcttcaccatcgccgagctgctgcagcacctgcaggatcccgatgtgctgcgacggcctgagatccggcggccgctgaccgggctcgacgacacgctccgggaggcgcgcgagcttgtgctggcgtgccaggacaagagcgccgtgtacaggttgtgtacaggttggcgatggccgggaggcaggctgaaaagttcagggatgttcagagcaggatcgactcctacctcctgctcttccccgtgatcagccacatggacatcactcgtcgtctcgatcgaatctacaacatcctggttccgaacgacatggccgggccagctatgtctcctgtctccatgccccaattccccgtcccagcctcctaggtacattcgaatgcatgcataatataacctcaaactttcaattgcaatttgtacttggctccaaagggaagcttagaattgaactctaattttgcctttcttccgttatctgcacatctctgtactaggatgctgctaagatgtattggaaggaaccacatggagtccaagagtttagttttaacgagctcgcaaaggcgaccaacaactttgcccctgaaagaaagatcggtgaaggtggcttcggctcggtgtacatgggaaggcttcctgatgggcgggtggtcgccatcaagcaccgttgtcggaactcagatcagggtatggaggtgttcatggtagagatcacaatatcctctcccccatccgctacaagcacattgttccactatatggctattgtgatgtgttggtcgaggagaagcagcggcgcctcctgccaccgttccggaaggaaaaggaggagaaagagcatctgcttgtctatgagtacatggagaacggctcgctggatcaccacctgcacggcccaacgtcgtcatcgtcgtcgtcgccagtgatggcgtcctggaagatacgcatggagatactgctataggtgtgtcgcgggccatcgagtacctgcagtcctgcggtgagcagccgattatccaccgcgacatcaagacatccaacatccttctcgatggcaactgggtgccgcgcttgacggactttgggtatgcgttcacctgggaaggcccaggcactgatattaatgttctttgtggtaccatgggatacatggccccggagtaccttatgacatgggctctgaacccgacaatcgacatctacagtttcggtgttgtgatgctggaggtattgacggggaagaaaccatatctctttaaagaagaatggaaggaggagaagagagaaaaatgtgagcaagatggaaagaacacagaagaggacaaggaggagagtgaacgagaagaagaggagaagacaacagaagaacaacatgagtggcaaaagcgggacgggtggtctagtggtcacagcttggcgtctttaacgccactgattgaggcggggaagtgtggaaggtgctggacaggcggccggcagcggagccaacggcgaggcagctgaaggcggcggaactggtggcgcagacggcagctcgctgcctgcggctgcggtgggaggagcgtccagccatttcggaagtcgtggccaatctagagaaggcgctcgagctcgtccgttgcgacgggtaggcggtagcatagcgtgggctcccgagacatcttatgtgaataattgggcaatgtatattctcatcatgtaataattaacgctgttgcttctcttctcttttttttttgtgcgcatacacaattaaacataccaatgtggtgtgatcaacgaacagaatcttatctttttttgctgatttctaatgtccacttgtgcagctgtgctgaaccaacaacccccccggatcacttgctcttagcttgtgctgtgaattcaactgttaagctaggtgcctcccaatatcttcctgttcacctgtttgagtgtaagaaatagttgaagacgcacgaattttaactggttttgctcccattagcaccaaaaaaatcaacaaaatataaggccttgtttagttggggaaaatttttggatttggttgtcaaatcagatatacgaacacacatttgaagtattaaacatagtctaataacaaaacaaattacatattctgtcagaaaactgcgagacggatttattaagcctaattaatccgttattagcaaatgtttactgtagcacttcattgtcaaatcatgacgcaattaggcttaaaatattcgtctcgcaatttacacgcaatctgcgtaattatttttttcctatatttaatgctttatgcatgtgtccaaacattcgatatggcagcgtggaaatttttgttttgagaactgaatgttccgaacgttagcagccctgctactgctctttcttcgtattgtccccacaccttctccctgctcttaaaactaagaatctcatgcatgtctgtgcagcagaatcctctgtccgtctggcctgttgcagcaatatcctgcaggactaaaatttagtcttcggatcaaaacaccacctaaagctgggttcatagggctcaccggctcagaatgtattcaatggatgattgcaaccgacgtattttcccggaaatgtttatcaaaaacctgataatagttggggtttcaaataaaaaaaaacctgataatagttacagtctgcagtaacggacactgggcttcctttgcgcggcatttcatcgaacacttggagctcaagaccaatcataccagtataccgtagcctctccggcgagtcaaaccttccgctccttctctctttcaagagagctcgaggcgaccgcaaagccatggccgggcgtgttgtggcgtgagactgtttgcactatctgcccgattgctcccctgcagccctgccgacgccgcctccgcggcctcgtcatcgtcgagggattttgctgctctagtggagacgaatcgctaggccgaaacggggtcgcggttgacgtgcctccgtatgggccagaattgcggtagtatgggccggccctataagtaagtggaccggggggggggggggggggtcggagaagagaactactagtactccagttccagtattagcaagcagcaggttactcgatcgatcacgttgcagcgttgcttggtttgcatgctagcggatctcacaaatgccatgatgccaactgggatcggaattcaaaactccgacctcctttggcatctccacaaaccgtatattcatcaagcattcgcggccagattatttaacactgaaccgataatgctatcaagcattctataaaacagagtcagtgatcacttgggtgttggtatgttcatgtgcatgccgcaggggacagctaggatgcggcggcggggctgcaggaat

SEQ ID NO: 6019 - DNA, 29746 bp, Oryza sativa
ggatgccggctcaactacttcccggtctctctccccggtgctggtactgcggaggcggcaacctctcggatggcggcgagttcgggggaacctcctgaccaccctccccctggtccccctcccgacgacgctgccacttcctcccttctcctcagtccgctcccgactcatttggaatgaatgaagccgaggtcagtagcagctgccagtccagcgccatcccactaaggtttgtgagcttatcccaaaatcacaactggagacaggattggatcatagggacgcttatatatatttgtcgacattacaaactattagtgcaataattcttggtgataaatgctcaagggttaagcttatataaattgtagttgcatgaatcatattagcaactcattggcttcctttggatgagttataatctataatgtaccttttggcttattagcttcatttggattttaattatataatgcaagctcattcatctaattagaactttagatgaattctatttatagttagagtaattctacggtccttgaggaggtaccatgaggtaccaaaaatttagtgcaaaatttggtacctcatggtatctcatagtacctaggtaccaaaaggtaccaaatttacaatagaaaaaatggtacctccttaaggaccgtaaaattgctcagttagagcaatatatacggatatactaaaaattagagacaactgaactaagtttttttagcaagaactcaatatgttaacaatcttgtttatgtgcattttacatatcactgtgccgatcgagctttgcatgaaagcttgtgagggtttgtatttaacatacaacaattggcaggagggttggtaagataatgcccaagaatttgtcagttttgtttaggcatgtgaacttttatttgacaggcaaactagatttgtgaaatatactcatctttctattcagtttgatattgtaaatatgcccaggattccaaccttaaagagtgttgattttttttcaggttttggcggcatacatcagaaaactaatgatgtattgtatgcatggttgttagctcttacatgttaatgtaagggttgtttgacaaaaaaatctgtcgcaatgtgagctgggtcagtttgcattttgccaaggtgtgtttggaggctgcagtctctaggcatatgtaagctgtgatgtgaagttctgtgttttatgtattttttttcaacttcttcagggttaaatgtgataatatgtatgactgttattgtggtcaaaactgctcgtcatgggtgcccatgtatagagggaaggttatgccaaaatttttaataaattatggaatttgtgtaattgtgtggtttgctagctcttcatgcttgtgtgtaaaaaagccatttaagcgcctatattaaccagcgatctctctttcctgtataagcgcataagttaactgatgatctctctatatccacataagagcatatattaacgggtacccctaatgggcgatcgatcgccgtagggatggggtagcgatcagattcgctccccacctcccccctccctccctccacctggtttctttttttggcaccgcattactttcctattttaataaatttatacacctaaagtttatgaaactaaagtttacacatctaatgtttagagaccaaaagtttataagtcaaaagtttatatatccgattcaaatttgaatttaaatattttttttatatagtatttttgtacatctaaagtttatagacctaaagtttataagtcaaaagtttatatacccgtttcaaatttgaatttgaattcaaatatccgattcaaatttgaatttgagttgaaatacttttcatatatagtatttctatacatctaaagtttatacacctaaagtttatatacccgattcaaatttgaatttgaattatatctgattcagatttgaatttgaattcaaatattttctgtatatagtatttctatacatctaaagtttatagacccaaagtttataagtcaaaagtttatatacccgattcaaatttgaatttgaatttaaattttttatatatagtattttctacacataaatttttctaacttttgtttttcaaaaaaattttgtgtggtctactgtagtagaaagaggagaggagaggaggaagggggagagggtggacgggtgatcgctgggcaggcggggagcgatcacccgcccattagcctttccgcgcgttgttgggccagatgggatgcatgtttggtacgggtttgctcccctagcccgttaactgtgtgtgggcttctttctctcgcactgcacagctcgcggggaatctcgtcgtagcccattatgacaagcagcccacgcaccaccaacccattatcagcctttctggtttttgcaaacctttaacgctttgtacactctgcccgttagatgtatatctaatgcacacaggatcgactgataaaaccgaagtttgcaggcacctgcgggataggcggtcacattttatagggatttaatttgtgcattaatttactggaactgaaacgatattatattgagcgaccatacagtagacatactagatagatagcccgatcgaagtagaaaacccgatcgaagcttacatatgcatctatgcacttacacactcaacacacaggaccaagtaataagtatataacattaacgcaaacacacgcgtactcgtttatttagttaggtataggactaggagagtacgcactatagtattacacacatatatatatgcatacagatacagtcgtcgtgcgatcagctcgcctgagctccgtattcagattcagggatcaccatctggcgcctagccatgacggggaggacctggaggtaatactccatcttgtacaccaccgtcagaatctgctcggctggctgctccacgcctctgccgcggccgccgctgcaggatatcaggggtagcgggatcatgctcctttgcggctgctggctgtaccacacgatcatgcgggcgtcgccgaggacttccttgaggttgttcaccatctctctcgtctccgcctcgcgcgttagcccgtacgcctgcgggtgctgcatcaggtcggccacctgctgcgccagctgcttcagccgctgcacatgcccctggttctgcctcgcgctcccggcctcctgcacgataagttcacaggtttgcaccacctccttcgcaagagtgtcgctaacgccgccgccaccactgccctcttctgctgggattgatgctgcgaaccggctgctgcatatgatatttacaattatattccaacatacaaagaaaaacggaactttacttaaattaacagtatttaagtcatgcatgctttcagcgtacttagtacccctccgtcccaaattacagggcgccaagtaaaattaaacttggtagctttgactaataatcatactaactattatgtatgttatatcactatatattcatattttgaagtactttcatctgatgctatttcatatttattatgatcatagaataaaatacaataccgattaaaatatgttattgaaaatcatgtgtaaaaaaatataagccttataatttaggatagatggagcactagttttaagtatacgtgcatctgttcttacccgttcccgtccgcgaggtccttttgtatccatcccaacacccatttcgcgtctgtggacatatcatcacgatgagtcaaacctctgatgtatgagttcagctcatttttcttcctctgaaattagaaacaattattattccagcttctttctgtgcgtgtgtatataaaaacattattattctataaaaatattaatttttgataatcaactcatgaggtcaactatatatttcgaattcttctcaaacttattcaagtatcaccaagtttatatataaaaatatttagtagcatttttaacacaaaacaaacctaatatcagcatatattcatgttagctaattccgtgttttggataatactaaattttcatataaacttagtcaaacttaaaaaaaagtttgacttgaaaaaaaaaactctaagcgacttataatataaaatgaaggtataatacaactttctttttttaaaaaaaagtctattccctctgtctatataaaataaacatatataagctcaagaaaatactaaacatgaaaccaagcacaaaattattaattcagacttagttgagttgagataacgtatggaaacaggtaattaattaatgcacaaactacctccctaagtcccaaagcacaagacgtatctattagcttttatatgacatgcaacatgtatatacataccttgaatattaacttctttcataatatattacaaaaatctaagaaaaatatttttaagtacaaatatatataatggtattacatgcgtgacacaaaatttgtatagtatatattattagcaaaaataagctagaaatgttaatttaaaaataatataagctagagctctatattaatttacctctggcaggttcctgcaagcgccatctccaagtagcatcttaagaacagtcatgaagaaacgatctttgtggatgttaacgatgagcaccatgttggcgacatggaactgctgcaggatgatcgagatccgtttgtccagggcatcgaacttcttggccttcttagagggggccaaacgcttataccagggcttctcgatttggcatgcctcaacgagcaagagcgcgtcgtcgagggcagtttttaggctcctcagcaccccttccgtcgccaggtcgggcgtccactggttatccagctgcgtcaggaggtttcttatgttttggacgtgttcactcagaagagagcactgctccttgcttcgccgagctgaatccaccatctccacgattcgactcgccaggctgaggatcgccgtcaccagcccaacggtctctcccaccatacccatcatgtctaccgatcgcgctccgcgcccgtgacactcctttccaaattaaattcactcagattgcttccaaaataatcacttatatactcctgtggtttgtaacgtaaatgactgtggtttgtaacgtaaatgactgaaatctatccccatgatatactccctagtccctccctttctaaatatttaacgccgttaatttttttaaatatgtttaactattcgtcttataaaaaaaataagtaattattaattatttttctatcatttgattcattgttaaatatactttcatgtatatatataattttacatatttcacaaaatttttgaataagacgaacggtcaaacatatgctaaaaagttaacggtgtcaaatatttggaaacagagggagtacttaactagcattatggcctgcattgtgcagctagtatcattatattttttttatctcacgtaataacatgtatgcatgcgggtgcacgctcgtgtgtgtctgtctataggaaactactacacccaccctgtatacaatttagttaattaaatggtaatttttttaccacctcaaggagcccgcactttcccttatatggattaattgattgaccaatatgcggggagtttttttttatggattgattgaccaatacgcgaggagttttttttttttttttgctggattgattgaccaatattctcggaggttttttttttaatggatggattgaccaatatgtgaggagtaattcttttatttgcatcctttagatagagagtggaagctcttggatagtgaaaaaattactctgttagtgcaagtttaatagtatagccaatacaactattagctccaaatcatttttagccaatctaatagttaatttatataatagttacctataaatatatattacaccattaatatctggtcccacctatcatatatacatagtgttgtggagttcgtgttataactgactacaaatttatagcccgcttcttttctctctcctctcttatcttctccagtagtacttattgtttatgttgtacttgctctaaggtgagggttgagtgttgcattctcctagacgaggctccttcccattaactatatgtggtaacaaaattgcaattcacatgtcaaagtgcagtcaaaaagtttacggttgatctatttttgtccaacccaaacaaatactatacgtgtcgtttttataacaaaagattattaaatgatggttacagaagttatacatgttggtaaaataataactagacgatgaataccgaagttatacgtggttagtaaaatgatcgctgaacggatggatgtgggagtgattcgtgtcagtaaaaaagttactaaaagatatttgcgggaattctgcattggtttcttcagggaaaatcctccgaaactacctatacttaaaaatataggtgaatagctaatacggtccggtccttgaagttatgttttgggcttagttagttcttgatgttttaaattgtccaaataaatcattcaaattaattatttggtataatatattccttagacccataaaaatatcacgtgagcatgctaagtcatcctcgcatgcagcagtacaaatgaaatgaccattgtacccttatataccatttagaaaataaagaaaagacaaacagaaaaaataacatgccagcccaggccaaacattgttgcgaatgggtggccgacaaaggaatttacacgatcagtcataagtgacaattccaaaacgatcatgcacgtgtaaaacatttatcttctttttttttcttttctatatggtatataagggtagaatggtcatttcattcataccgctgcatgcgaggatgacttggtatacttacgtggcatttttttagtccaaggactatattaacccaaatgattaatttggaggacttgtttggacaatttgaaacatcaaggactaaactgagcccgaagtaaaacttcaggggccgtattagatattcacccttatctatagatgaaaatctaatattttttttgctttcatccttattatgtgcatcactttgaagttcgaattaattccttaaggtatagaaaatgtgttgcctctgattaaagatactaaggggagttgaatcttaaggtatcagattttcttgaaaccccttttattttatcagacaagtcaacgtaattagactcgctcatgaaaatacgcagacagttccctgtcaagacataacctcatttccaccggtgggtggcttaaacatgcacctatgaaaatcatttttttacaagcgggcggcttaagctactcgcctatgaaaataaaatttccaaaatttaacacatatatacacataactttttcgtataaaatcatatgaagacaaactttatatcaaaattgtatatctcgtcaagatctataattttgtagttaacaacgtttttcgtttgagatggtttagagatacaaatattcgatctattttataaaatctcagaattatatatgtttcaaataacctccaataaagatgtattaattctatatcaaagttgtagggctcaacactagatctacaacttcctaattgataacattttcatttaagatcatttggaaaggtgaagtcaaaagaacaacatcttaattataaactcttggtagtgtgagatggttaggatatatggatgtgtggacatgagatcttagttgaaatcttatacatcgtatgtgtccatactttgtgaagaaatggtatagctaatgaatattaatttgtgcctactaaaatttaaaatattttttcagttttgttttggcgcaaaataaaatataaaaagtaaaaattcattttgacgggtgggaggcttaaacgaccgtacatgaaaattcacaaacatgcaggctgttcagtcgtgaaattttaacagacagttgctcacaagcggctagccgtttgtgaaaaatgagttttagtcatatgataatcttttatgtaatcatgaactaattaatttaatcttacacgttaggaccatccggatcgtaaaaatgcactccctccgttcatgttataagtcgctttgatttttttcgtagtcaaactattttagtttaactaagtttaaattagcaatattatgatataaaattagcttcattaaatgtaacattgaatatattttgatagcatgtttgtttggtattaaaaatgatactgtatttttctacacatttgatcaaacttaaacaagtttgattaaaaattcaacgtgacttataatatactccctccatctacttttgatagtcatatttcatcttggcacacagatcaagaataagtgattctacttatcatccatttaaacatgctactagtcattcctcgtaaacaaacgatttattaatatttacatttctcgataccaatgtaactaatcttgtgtggaagaatagagagtcacgcattaaatccaagaaagacattaagatgataagttattggattgaaatatacttatcaaaaataaaatttttagatttgaaaatatgactatcaaaagtagatggagggagtaaaatattataaaacggagggagtacacattttatacgtaatatcatcgttcatctgtaaactgatcgagacgacaacaatatagtagagaaggttacttcacgattagaaataatcgaaactattacttacttttactgatcgtaatactctctccatctacttttgatagtcatattcccaaatctgaaaattttatttttaataagcatatttcaatccaacaacttatcatcttaatggctttcttaaatttaatgcgtgcctctccattcttccacacaagattggctatataggcatcgagaaatgtaaatattaatgaatcgcttgtttacgagaaatgactagtagcacgtttaaatagatgataagtagaatcacttgtccttgatccgtgtgacaagatgaaatatgactagtcgcttaccagccttcgaccttgtcagaactcgtagcgatatataggatatagtatagctagctctcccgagcactaaacagatggatgagatctcgtttgcctttgcttctggcaaagcttacaggcagccagcacgggctgcacggtatttattcttgcacgcatagcatacgcctgaaaaacgccaaagcagtccgtgtcgtgcatgtctgttctccgaatgaatcacatatctataaaagattatccctactgagtatacttaattaattactatgcgtttttattaagtcacatcatcgtaattaattatttctataaaagattatccccattgagtatacttaattaattattttttattaagtcacgacaccttaattatttttttgtcctcagataattaatctatttttttcttgcattaagccatatcaccttagttttagttttgttttgaattgaatgatcaatctatatatgacttaaattattataaatacaattataacttttaatcatcaaagatgaaaattatataagtatataaagttatctcatctagctaacttatattttatttctactagaaaagatgcttgtgcgttgtaacgggtaaagtcaatttaatttgtacatatgtgtcggtggataaataattacaatctactgttttgtttattcttgtccgaatcatttataactaagtaaagactattttgtgtgcaaatattttttatgcatgttcttaacgactcgaaagcaaatactataaaataaagtacgataaaaaagccaaaaagtcaaatttaaaattaagttctaaaatttaaaattggcttataagaataagcataagccaaacaatgaggcctttaaacatgagcttgatttgtcgtccaattttatctcaacttaggcaggaattgatgattcgttcatcctttatttcggttggcattttcttttcaaaagtaaataatgattattatggattattgtaacgatatccctgatagtgggatagtacgtatgagcatgtgtggaaactgacttgaaatcatgctaacatgtcctaggaattgtgccgcataatatgaatagaattagatgatctaggcaactatgtacgtgatatccacatggactatgcgagtttcattcgcttggtatccgcatcacacggactctctttcgtagttcgctcatgagtcatgaccttgcaatgaatgttaggcgtgacgggaatccgatacggacaacataccatagttttgacaaaaacatcttcaatttttaagtcatggacgaggacgacgcagtcccaatcgggcactatcgggtatacggaaaatcgcgtgcgcgagggcgttgcaggcccaatcgcggcggcgcgcaaaggcgcgtgtggaaaacagactcgggcacgggcctgattgttgcctgcggcaaggagcgcgtgaaaaggtgcgggcccaattaattcatgcacgtctcggataagagggacactctaacataagaaaaaattaaggaaatgatttgatagaaacataaaactaaaatcgattcaaatacggatgacgtatcataattctagcggaaacaactttaatttctataatactccattccaaattgatctacatatagtttttttgaggttattcctaaatgatctacatatttgtgttcatttattagagtctattcgttatttgtgcattggagtaaatggacattgatgcatgcatccatgcacacaagtatttataacccacatgcaatatcttgatttgctattggctaggaaatattggtgcatgcattgagtttgttgctagagtaaatatagtatgagagagttattagcttttcttggtctttgtgtacctatgaaatatgtagatcaatttggaatggagggagtagtagagataagcatacaaagttttcgccacaacacgtagtgtttcatctagttttcatacagtatcagctaccccattgttaacgaccaaatttggtaagatcgacatcgaggaggaagattagatcgaagtggaatccaagacgaagattatttcagaaacagagcaagaatcggctagagtccaaatcggttatgttcagatcgactgagttcgagttagataaggatagccgatgcagccgattctgacaatatgactcggtatacgtcatcgagttaagttggtgtgctttacggtgattgctacgtaaggatagagtcctaaggaggcgattgtatctattaattaggatattttatgtaatttccttagagatatgtttgggcaaaagtctgccgtaaagacttatgatatcttagagtttgttagagataatagtcgtgtccggtatggacatatcttgtaattctcgagtataaatagatcccgagccctatgtaataattaacacacacgttcaatacaattcggcgcatcgccacctttttttgctttagttttatttcaacgagttcttgcttttgggttgagctgcatcggtttcgatcttcaacaagaggtaaaacttgttatggcggcttgcgttctcgggattagtgcttccatctttatgacactctaatcttgtttatgtaatctgttgagttatcatatattttatataatctctaacaatatcgttatctaacctacaatcgaccagcatctgtcggtagattgcagctgatcaggttagatattgacgtttatttagattatataggatatctaccactctataaaacttccagtggcttgattgtctagatgttgttcttcttttcatacttaatgttgtatcagttgagtttgatctattaagtcgtgcttagaatatcaatttctagcctgccttctggttgccgattagggtagtatcggggtttcagccgatcttacctgatttaactacttttattccatgtgcatgattgacatgttaagtctgccctttacattaagatcttattatatttgagtatattaagcttttgtttgatatattttacttgttttaatatcttaatatagagtggtatcggagtattagccaatacatgctagatctatctgatcggctatgctatgaacatatatagttctattattaacatatatttcgatctaagtgatttatactttctcggcatggcgtccgatctatcccaatcacttgatttaagtatatgtcaatatagggagtatatattgttaatatctacagccgatcgagtagatttagtttttccttatttattcatgattgccgatcgatgcatatatgacatcggctcaaaggtaaatgatatgtcatcggcatctagccgatcggctatcgtttataggattaactgcggtttctttgtctttatttcttgttgattgcaggatcaaatcaactggcacgctcatacacccgaaggcgagttttggacctgcactggagttaagcaaatctcccaggccgccgtgttcgatttccacatcaacacccatgcgcttctatcaagagaagtaaatgctaataagtactgcctccattccaaaataaaaataactttgttttttaataaactgcttgtgtccagatgtggtataacttttttttaccgaatctaggtattttcagctaatcatatgcttaagaaaggaatctctaaataatttaaactttgatcactgaaataactaacaaggaatgtttttccataatctaattaatatttgctaaataacctgtgggaccaataggccttgccagcgcaagtcttcgtccaccctaggtcttcgtccaccctaggtcttcgtctgccctaggtctacgtctattctcgatttagtaagccaggtcttaattggggccactgccagcgacagtcgtaagtccaccctaggtcttcgtcttcttgtcggcaaactgtgcatgtgtacagaaaacgtacggagcttctagataggctgtaagttaaaatgtatacatggaaatttacgactgtgggagggtaaactcctcaagtggaggacagccgaggctccgccgggagtagcggatgagattcgagagcttagtgaatgaagctatgtaatgtagagggggtcgggccccttgggaacgatgagacaaaatgagtttatacgagcggcggacagcctccatggtggcaaggtgtggcctcccctcctcaggtcccgattggtggcgggcagcctaccctcttgctgggctcggtgggtggcagacggcctcaacaacagtgcggcggatgaccttccaatgtcgctacaccagtagctcaaatccatgcgtcctcgtcatcggtttcgttctcttatttccagtgatttttagttcttgatgctaatctgtgcatgtttgatgtctgtgtgttgttagatgaatggatgatggcgtggttgttgatgatgaatgagttcttggatgtggtgctcgggatgcttaagggatgttatcgcttgggatgtgttctctgtgttgatgctttggggatgttgacgtgggtgttggtacgttgatggctgatcgagccgatgcattgatcgagcagtcaagcctttttatgtttgttgcatatgcttcatagaagtcggttgttagatgcttcgtatatgtatatactaggtgattccccgcgttttgctgcgggaattactaagtaattctcaatttgttttacatttaagttaggagtaaaaaaataaaacatcaggatttattagtcaaatgatacccgtgttttaatgtgaaacatatcgataagtatatattaaatattgtaaaagtgatagatagatttatgaaaatattgtgcaaatgatatgaggggtgatgattggatatacttgtattttgatttatagaattaaataaattatagatcatgttgtatgcttgcatgagattaaacatgtaattattgctagtaggtgatgatgtggtatggttgcatgttgagttttaggcttagtgggcattaaccttatagaaagcatagatatgtatgtgtgtgtgtgtataaaagagaatgaagaaaaacataactagttacctagttagaagagaggagaacaatcctataaaaactgactgaaattaatttaaaaatataatagcaaatttgtaccaaaaattgatcaacaaaagctataatcccccctcccctccaaaaaaacactccaaacacttttacgacgtatttattttttatcaaaaggacaggagctataaactaacaaattaaggagaatagaacaaagtctaacatggatcaaagaaagaacattgaggagaaagaaggctaaacttatgtgatactttttaaattacttcattattcatacaatatgcatatgccatttcataaaattttaactctaaaattgacccatatgttagaaactaaataaacaaaaagataaattcaactggaaatattcacacgatagactttttttataaagcaccagagtatataaaaaagagtattgttgacaactaaaatttggctagatatggaaaataacctgagccttctgcatagtgcaagtccgaccaaaggtatacggccgatccgactagcaaccccaagaccgagtccaattaagtctattcttgtgtttacttacttggacccgatgttttttgattcctatttgatctctaaacccaataggatgtggaggaaacttatagatgcaagaccaacacttttataagggttatggctgatttaattctaacccctgaatcctacacttgacaatcaatcgaatcgttgtttttcctttatttttcaaccatattttctactttacattctatagctgcatatagtacctaattcatccatctttgtcaatttatggtgtaaatcatccgtcctcgctacgagagtgcgatacccagcccttgtaggtttgtcctctaaattgatctaaatcattctaaaggctggtttgatctctcattggctccgctagtcgattttcatattttctaaacccatcctaatcgagagtttttctatatcaaggtggttgatgactttgttagcatcacaaatatttaggtgagaccgtgttaattgcaatagtctccaacacaaattgacaacactgttgatcaagattttcagccatccaatatggccaaaatgaatctacaagctgaggaacgagcttagctcggttggaacattcgctgtggtgtgaacggtcggtcgctagttggactcatggggcttcacctcgatgggtttttcccgtcttttcttcggggttgtccttagggtagtctcgactagaaaatagggtacacatgcgtacgcgttcagtagcggtcctgagtgtctctactattataaaaattgaagatgtttttgtcggtacttttggtacgtcatccgtgtatgagtcggttttcatgttcgttcgcttttggaaacataaatccgtatttgagtcagtttttaagttcgttcgcttttagaaatatagaaggaatcgtataagaaatcttttcaaaaaactcgcatgctaacttgagatgatcagactgctgtttgcagcacatgattttctagcaaaatatatatccaagcgaatttaacacagtgaatttcaccttaactaaaccatatctctatctctatctctactattataaaaaataaatatgtttttgccggtattttggtccgtcatctgtgtttgagtcagtttttaagtatgttcgcttttagaaatacagatctgtatttgagtaagattttaagtccgtttgcttttggaaataaaaaaaagtcgtataagaaatcttttttaaaaaaacttgcatgctaatttgagataaatgtcagactcctaactgcttctcatgattttctaaaataaaatatccaagcgaatttccatggtgaatttcaccctagctaaaccgtataacaattacaagattaaaataatatttacccgttgcaatgcacgagtattttttgtagccttaaaaaaatgaatctacaagctgttaccgctgcatatattaatcagatcggcaagatcgtttggttcttgccgctgatctatccgaccgctttcgcggaagccggtctaacctacaccataataccagtccgaccgggatgaccgacaggcagcaggcaatatcaatctgttagtgtatgcgtgtgttcttaccgaggacaataggaaatcagcaaagttaatttttgatcaaattggctacatacaaacatcaagtgtaccaaagaaatgtttctgggctgaggttaatacggctgaaattaatcaagggaggttttctccgactatgacaagtgaagacgagaaggacatgctcaccatggatgactaaatattgaccgaggaggagcgacaagagcttcaaaacaagtggcaaagattgagaaggcaatgctcacaagctttatcaagaccaatcaaagcatctctaaaagagacttccgacctgctacctcgaatcgtcgtctccaaaagtgacgggttgcgactatggtgcattaccgaggcacgaacggatacagaacaagatttaaggagaaactcatctctttcttacttattcagtcctcctactcttctctttctctctattctttctctttcatctctccttctatcaatggtaatccagcgaggtaggaaggactcgagtcccccgcacccacgctggatccgccctgcgaggcaccaactatatgcatgaagcacgtattatacatataggttggaccatcaggtggaggtcagttagaggctggctgggttgacatgtggggccgattggcccatccttaggtcagtcgggcactcttgtgctctgttagtgattacgtttagatgattgtgactttagatggtttggattaactcttgatgtggatcggatagttggtttgagcaaatagtcagggccagccaggcaagaaatggaccatccgagctgcgcaatgtggtcggcctaggtggctggtaaagaaggccgacccatcaccctcttgggggaaatcaaaacggaacgggaacagctcgattgacagaactcaagccaaactgtaccaccttcctcggcccaaggactgtgagtcctctgggccgtagcgaacggcccaagatatcccaaaggggtttggagttttcttctccgaaacccctgttcctctcataccgcctcgccagagcgcctccgtcggtagcacaaacgccactgcaggagcgcaggtgacgccgcaacatctctacatattgatcctcgaggcctccctgcgtcacggtcgccatctgcaaccatcctcctcgcgcacacacgccgcgcggcggtcgcggacgtacgagacgacggaggagcaacacatacagagcgtcggcgtgggctcgtggcgaccgcgcatggccagacatgcagcgcagtggccggagacagttgaggagatgcaaattttgtataaggccctgtttagatcacactctcaaaaaattttcaccctgtaatattgaacgtttaaacatctgcatgcatgaagtattaaatataagctaaaaaaataactaattgcacggattgcgactaatttgcgaggtgaattaatcttttaagcctaattgctatttgatttgacaatatggtgctacagtaaacatttgctaatgacgaattaattaggtttaataaatttgtctcacggtttactgatggattctataattagttttttattagtgtctgaacactccatatgacaccctatataatacccgatgtgacacgccaaaactttacgcccctggatctaaacaccccctaagccttaacattgcgatgagtagggttccccttaccgttttcggcgtagttatcggtccaccgcggtaaggtggataccacggtaactgcgaggtaaccgcgagacattttttttttagaactagggccagaaagcccccatttctcttactagaaatgaaaatatccttactaagtcagaaaggcaaaaacaaagaagaaaaaaaaaactaaaaagcttatccagatgcctcacgggctggatggctagacacgattacatcattctgacatcaaagggataaaacagatcacaaaaaaaaagagaacatcttcatccttctatcctcctgatcccaggtctccatccatgtcttgagcaaaagatatcacttgccatctgtcttatgagtctagctcccaactgttattcagtttgcttccaacttctgcaaagatgcctaggaatccacccaggaacaagccataaagaccaaatcagtaggatctcttggaattttattctcaaagcatgttttattcttggacttccaaattgtccaaatgattgcagctaagccaatcacaatcaagtgtttcatgtttttatcatatctatcaagccagtgtcaaaaagatcatgatgattcaaagttggaattatatccagagcccaacacatgatattccagagtaatttagccaaaggacaatcaaaaacaagtgttgtatatcctcttttttgtcacaaaatggacatttttcatcccccttccttcaaccttttttgtacagatttttccttagtgggaattttgtttttaacaaacaaccaaataaaaattctaattttcagaggaatcttaaatttccagattctcttttaaggaaaagacacctgatgcattttaagggctttataaaacgatttcacagaaaagataccatcccttgtcaaattccaacaaattttgtcttcagagtcatcctataagatcagactttccaaactatttttgattctcacccaatctctcattttatctccatccagatcccttctgaatttgatacattgcaagcctttcattttcacctttgcaattgtcacatgtttggtcaaagttatgttatacagatttgggaactgaatgttaagggggtttccacctatccagctatctttccaaaacaaagttcttttcccatttcccacttttttgaacaaaatttaaaaaaaatcatcctttacttccatcaacccatgccagaaatgagaattaccctgtttaaaagttacctcagacaaggtgaagcatctaggcccccggtgttaattttggtaattaatgacaagtgctaattgtggactaaccattcttttgagctatattttaagttagattgacatcatgtgtgtgcatggatgattattgatggattaaaattgacggcgcaaagcaaaaggaagagaagacgataaactagtgttttcattttgaattgatcgaggcgtggggcgatcaaaattgtgctagtttatttttagcttcgccatactattaagaggggtaatgacctagcaaagggatgattttaattgccaaattaggtcatttgcatttagacttgtgctcacatttcacaacatgcacttgctatatatttgtcactgctctggactgccagggccggtctgaccgccggacagattccggtctgaccggccggtgtcaccagtctgaccgccatgtcatggccggtctgaccgccgtatcaatgccggtctgaccggaaggtgttggccggtctgaccggccggccatatggccgggatggcatgctctaggatggccgatcccgagccgccggagccgtattcggtcagaccgagctgaggacggtctgaccgagccgaggccggtctaaccgggcaccccatgtcggtctaaccggccgaggcagtggggcccaatgacagccctacaacggctagaaaactagccgttgtagagtagcacggtctgatcgggcacatacctccggtcaaaccgacagagcactgagttgggggatttcgcccccaacagctagttttggtgggtgggagtataaatactcccccaccagcagcaaggggactctcttggcacccaattcaattgcatacaccccttgtacctctctcacacacctttgagcttagtgttcatccattgtagtgattgaggttgttctagccaagagtcaagtgcattgcttccatttgtagagctagtgtggcacttgattaatcatctccacgccgggtcattgcttgttactcttggaggttgccgcctcctagacggcttgtggaggagttgcccggtgacctctccgagaagattgtggaggaggccaggcgtcgaattgtgagtggtttggagttcaccaccttcggagtaaaggaagaactaccccgagtgatcgaggcttgggtagtcctctccgtgggccggctcccgccttgcccaccccttgacgaagggggcgtgcggtggcttcgtggttgggcggtggagttggactcgcctcaacggggagtaggaaaccggcaagtttccgaacctcggtgaaaaatctcttgtctccttgtctcatttgattaccgcatttacatttgtgcaatttacatttctagagacatacttgagatcatatcaccctaggtttgctaaacattaacataggagtgtgatttactttcctagagatataattgagccactatcaccctaggtttgcaaaatataacttagttgcttagttagagttgaccctcaccaagcctagccacttaggttagtgttgattaggtgtcatttagttttaaatcgcttattcaccacccccctctagtcgacatctcgatcctacacaaggttttatttttcaaatattttcccctaagaatctcctgccaccaaccttctttgttttccaaattccatatccatttccccaacaaggccttattcataatgtctaggtccagaacacctagaccccccgatctcttggtgagcagatgatgggccattgcactaaatgatattttctgatgccttggtcttcttgccaaagaaacctcctaaagaaatccattttttctttcacccctttgggtaacttgaaaaaggagatcatatacatgggaacactgcttaaactagaattgatcaagattaatctccccttattgactgaagtttcccttgccagcatcccagtttgctttccattttgttttcagcatttctccaatctttctttgtaatgcgtttctgatctattgggatccccaaatatttcatgggcaaagcacccacactgcaagtaaatatctgactgaaaacctctgccttatcagcagtctcaccaatgcagaacacctcacttttattgaagttgattttgagaccagataattgctcaaacaaacataagatgtattttagatttttttgcatgtcttattatcaaatagaagaaatatggtatcatcagcgtattgtaaaatgaccatcttgttgttatcattatcccccagtactcctatcagcagattatcctcagctctttacactagtaaagttagtacttcagctgccaaattgaataaaagaggagatagaggatctccctgcctcaaacctttatgtgttttaaagtaaggccccactctatgtgttttaaagtaaggccccacttgatcatttacctagacatcaactttactacccattatcactttctttacccaatctgaaaatgtaccgcgcatggtaactatgataaccacgtgataaacgcatggctgacgacgagattatatccacgtgagaggatgatggttcagatctaatcgatcacaaacaatgaaacaaatattgaatcagcgaatcagagtggtcaggaaaatgtaacggaaatatcgattcacgctcactcactcaagtaggtgagcagtgagctgagtcagcggtcgatggatcttcgaggacgcggttgttagtttggtcaatgagtttgaggctgtgtttagatccaaactttacatctaaacttttaactttttttatcacattaatttatcatacacatataactttttagtcacatcgtatcaatttcaacttaaacttttaactttgaaagaaactaaacacagtctaagcttcactgtgtaatgccagtccactacgcgtcaaagtgtagtgggctttcagccttgaagggctaatttcaatgggcccgggattccgtctatacaaggcctcgtctggttttgccacgtaagcgaatcacgagttttttttatttataattttttttattaaaagttttacaaaaataattttccattttgaaaattgacggaaatagtcgcctaccgccctctgggagggcgatttttagagggcggcgtaaatgacgtggcagccggccgttcgctctcgggcgacggccgtcaacgaaattagcaggcggcccccttgccgccctccgctagggcggttttctactgtgcggggggccgcctgcaaatgggcggcgagggggggcatggaattttgcaggcggcccccttgccgccctccgctagggcgattttgtactgtgcggggggccgcctgcaaatgggcggcgagggggcatggaattttgcaggcggcccccttgccgccctgggggagggcgattttgtactgtgctctatatttttttttatataaatagcaatagttatgaaatctttttatattgaaaactatacaagattaaaatctcaaagactggtaaaatacaattttattattttttagggcatatttggattgttaccgtacaaatattttgttagtgccaaaatataagcaagttttggtagtactaccaaatatttagtaaggtaaaattgcatttgatcatatttggtttgctgccaaaatgtaaaattgtagtgaagaatgttatacataatctcaaatctaaattacgtattaccaatgaataggcttccattttcgtgtgtggtgagctagtgggaaagaagatatgaagaggttgccttcagattgtcaattatatagcgtcgttttcactgcaatatatgtgaaatcaatgagatacattattcattagatgtgacaagacgatcacgcgtaggcgtgattcactttatgtcaacaggcagcgtcgaaagttgatagtgataactcgagctgccgcttttcatgtgtgctgttgtggactgtgcgcgctactggatatggcactaccgtgaagcgccgaaagtgtgttgttgtgagcataagttgttcaagcaccatatgaatgaaaagaactacgtagacgagacaaacacaagtagtactgcagtagtaatagcaaaagtagtactgctttgcaagtttgtaaggcagaagaaacggtcacataaggactgaagaggtagaacactactgacgaggcctcttacccctgtccctcctaccctgcgccctaatgtgcccctgggagtacgtgagtcggtccgggggtacggcacggccaacccgtcctgcctgtacaggtgtgacctctggctgctcctgagtgtgcgcctctggagctcctccgagctgagaggagcctagtacgtcctggtggtctgcaccgtgcaagtcgtcgtcgtagaactggctagtaggaccagtcctaccggcgtgagacgaagaggccccagtaccgaagatcccggctgcatatcctgctggacaaggaccatcagattcgtacaagtatttagcagtagtaataaaaagtaaagtaccgtgtgggcgagggaacgacgctccgtgagaggaagagctggcgaacgcgcccgaagaggtggcgaacggccctgcggagctagcggaagcgccggtcgtgcctgcgaacgcgctcgaaggcagacgaggtcctgcgatgaggaaacgtgcagttaaaacatggtgacacattcgtgcaaaagctgaaacaaaaatgaactaatatcttggctgaactgtaccgtgcgaaaccggtgctgtaggtcgcactgctccgaagctaggggcgctcgaaggcaaacgaggtcctgctccgacggtaggcgcgcgaggccgtgggtgtaccggaccagctggaggtacgacgtccacggcgctgcgacaggagaagacgcgcatgaccgcacgcatcttgtcctgcatccggtcgaaggtcgccctctgctcaacgtcagtcaagtgcaaacctctgttcaacctcacctggacagcggtgatatcggcactgatatcccgtgcggcatcagcctatgcaagatggaaataaaaaattcagtagttgtcctattttatgcaagataaatgaaataattgttggaagtaatacaaattggacgtaccgccacgaagtagtctcggtcacggtgcgtgggatacgcgtccgtgacagcggcaacgtgcggctctggggcgtctggagtgaaggtcacacgcgcacgagtgcgaggaaggtaccagcgaaggtagtcacggtagttctcctccgtgtgtgggaagagctcgttgatcacctcctctgtagctaacacccagtcgtcaacgtactgctgtacacgtggagcccaaagtgcgcctgctagctgtccccgtcgagtcaacctgtgaagagaggtaaattatatggctcgatgatgtaattatcataaaaatttcgaaatgaacaatccgaactcacgagtggtcggaaggggggacggtcgtctgcacgttgcccggaaacacctgcctaagtccgaactgtctcatcacacgctgcgggcagtgaggctcaacgaaaatgtcgaacaccatcggcaggatggtgagccagtaagcctggtcgcgtgtgcacaaggacgaaagtcctagcggtgctctcgcagcgacggcctcttctgtgtacggctcccagatgacgtcgctcggctggagacggtcaaactcgaacacgaagtccgggtaaccacgtctcacctgcacgtgagcgtaacgacgctgcaataaacatgatcggaattagaaatgttatgtgaaggaaaaaaaaaagaagaggactgataaacttataacgcagcgaagttgcactaaccccacgtcgacaccagtaagtccccatcgtgggaccgtcctctggccactgcgcgctgcgaccaaccccgtagggtgcgctgtccaccactggtcgccctatggcaaacctctcggctgcccaaagctgaagcaacatagggcagccagcgatgatcgctcccgcgtcagtcttcgtgcacgcctcacagagggcacggtacgtggctgctagcacggcagaaccccagctccactgcggcacgtcctgtggctgagcatccgcgatggaccgtgcgtagtggaccagccggaagtccacagcgtgcccgtgggtgctagtgaacatcacccacccgaacaaccacaacaggtacgcctcaagggagcgtcggaccgagtaatcatcagcttcagggtgcagaaggtccgcctacagttaagaatgaaatgttagtacaaaacactcatccggtcgcaaataatcatgtatgataataacatcttatttacttacagtgaactggagcaaccaagccttgctaggcccgactgtagagtacggaggaagggtgctggtcggtcctaggtgtggaaggcgcatcacctgctcgaagcgcgcagtgatatcctccttccacccaaaaacaccgtccacgggaccaactggtgctcccgccagcggtagcccgagcaggtacgacacgtcctgcagtgtcggagccatctccccacagggaaggtggaacgtgtgcgtctcaggtctccagcggtctacaagagcggcaaggagtgaccggtctgcatcccaccgcttcgcagggtcacggtcgtccgccgccgcctcaacaagcctacaaagtggtagaaggcctgccgcacgcaacctgtatagagcaaacttcaaacataagtacaacacaaagcaaagttgagttgaaatgtgaacatacgcgtaccaaggaacgtgacgggggtcgacacgcaaccactcgcgcgacgtgcgtggacggaaggtgccgagctgtgcaccctcgactgctgacaggaacgagcggtggttcctgtcaatcgcacggttcaacagcgccggtgtgtcgtacgccatacctgcatcaaatagattgatcagaaacatataaataattagttcaacataagtaataaatgttcataagcgaattactaacacatattaaacaatagtacaaacaaacaaaagtgtcaccatacggaatatttctgattacaacaataactgcagttacacgatatgagtacttagtccgaacactcatcacgataacattatgatacaacaccgaatagttcacaatactactagtacaacaatagtcggaggtactcattacaacaacattgaattgaaattacacgatagaagtatttagtccgaacactcattacatcacaacagcattttatttcctaaatcgaaagcattgttacaccatcgaatcgcctgctgcgcgacgacgccttggccttgcgcgcctgcttgttgttccttcaccaggtggtcgcctaccatcacttgcctgtccagatggactggcatctgcgccgcttggaacttctgcatttttcgggcatttcttgtaagtatggccgcgcagatcacacttgctgcagcgtaaagtcctcccacctgcttctgactcatccatatcatttctgatgcgtctagtttggcgtcgaccctttttcacccttaacttagatggatcaggaatataaaaaacttgggcactcagcgttgtgtaagatcctgagatcccgaacccatatatttcctcactccatgtatgaaagattgcttctttcctgaaaaaatttgagacgtacacattgggagatatgccacaatcaccggcagcagcaagaacgtgtgagcaaggaaggtgatgaagcttcggcttcatacaactgcaggtacatccaccatccgccttcaagacacattcctgcacggcttgcttgcgatagataccacgcctgctcctatcaacatacattatttcataccgatgcacttgtgtgccttgagcaacaactctatgtctccgtgcctttttgattttatcttccatgtactttgtcactacgttgccaaacactatgttgttatcggccatggacggaccaattttcttgtatcgatccctaaagtaggcttgcgtgccgtgaaggatgaattcaacaatagcaaccaatggaagtacccgaactcctcgcattacccagttgtacacctctgccaaattggttgtcattatgccataccgagatccatcggtgtcgaacaatagagaccacttctccttaggctcattctcaatccactgactgaaatttctgatggacgaccctgacctccttctcattgttggtgggtcatcatgtaatgcaccaagaggtatgggaggctcgtcaccttcaacttgtggtctgcgagattgctcgtctgtttgcttcgttgtcaactcatccaacttgtcccacaactcattaaatttcttctcttggttctgtgcacagagcctcttaaagagctccataagatgcttgttcttgaattgcttgtagaaatttgcacccatgtgacgcatgcaccaccgactccgaacatcaggccacttagctggaagtcccttctcatcccaaccgttctgcaagtagtcaatagcccgcaacatacccgcatgacgatcatgtataaggcaaacgttgggcctcatacgcaccactgcaatgtgcactctctctaggaaccagtaccagctttcagtgttctcactctctacaaatgcaaaagccataggtagaacctggttgttcccatcacacccaattgctgtcaatatctgacctcggtatttacctgtcataaaagttccatctatgcatagaacaggtcgacaatgcacaaaagcattgatgcaagcacccaatgagaaaaaggctctttgcagcacactctttgttcgatcatcaaccgatgtaaatgtatgtaggtcatagtaagtattattattcctctgggcaatggtggctaacaaacgaggcaaattatcataagaagcttcatatgtgccatacctcatctaaataatcttttgtttggctctccaggcctttgcatagcttatggtgtacttgaatttgttctcgatgtgcctaataattgattttggttcaaagccaatgttaccaacaacactgctgtacatctcacttgccacaaaagctgaagtgatgtttcggtgatacttctccaccccttgtaagtagcacttgtgctcggtcacaatgctaactttccaataatcattccatttacccttatatgcatggacacgccacggacaatcttccttcatgcacctcacttcatacacataatttgttgacttgaccaccctaaactctctctgtaatgaaactgcccaatgcttcaccgcctccttcatctcatccttatgagcataccttgcaccctcaattacctcgttctccttatactcccagggtacatgatcaccctctgatatgacaagtccagagaagtcctcatttgcccaatcagtggccattacatcaccttcctcatcggatgatgcgtcgtcctccgcttgctcattatccgaatcttccctctccatttcatcaacaattataccgactctctccccctcatccgccatgcccatggcctgctcctcccttggttgattttcctcattttccatcgatggtccaacaacatcccctgcattgctaggaccctccacatcttcggttcgcattgaaacatttgtatctttctcttgtaccgacacaaatataacgaggggccatgaccgttcaaaagccatttgcacataccgtctccagcagcagtgctgtccatcggcattagttcccaaaaataaccttctattgcacgactcactacaacagatactgacattgtgtagacttcttggtctattctaaatcctctcaacaaccaactataaattgactgaaatgttctctccgcaggcctatcgatgcccttagatgtcattacaaaatctgacagatcaacaccatctggaccaaatctaatatttccttcaccgtgaactatctgaaatgtgaccttacttgacattgtgcctgatgaaaacattaactgcgttaacctcgcatttctgtactacgccttaagttacattctctacaatattgtcctctaaatttctaaaagtacgttacattctccagatcaaactaaactacatcttacaattaacactactgtctatgtctcaattcatactattatattctatgctctggatctacacatatgtgctaaaatatatggaactaaaactaaaacgcaacatatatactcaatcataacatattagtacaaatgcaaaagatgtatgggagcatacctgtgatgaagtgagcgaaccagcagggcttcgccgctccgcttctgctgccctcccctctctctctttcgttttttctggatttttagtgaatataatgaaatttaacagaggaggggctgggctttataggggggggcccaaaaatcgccctcccccagggcggcaagggggccccctgcaaaattccatgccccc

SEQ ID NO: 6020 - DNA, 18832 bp, Oryza sativa
cattcgcggccagattatttaacactgaaccgataatgctatcaagcattctataaaacagagtcagtgatcacttgggtgttggtatgttcatgtgcatgccgcaggggacagctaggatgcggcggcgttgatccggcgaggcgaacatgagtcggtggatgggggcaaacatgggatctcagtcgttcgagatggacggcggcgagcaacttcagtcatgttgttcatgtcaatggggttcggagatgaaaactccgaacctctctagcatctgtactgcccatttgataaagctagtgtagtcgtagcacagtaaacttagccttaagccaactgccagaagtttgtttatccacagaaggccttaagcctcttctctctctatttggttgatgcgattagcactcccatgcagaaacgcccttcagctggagctcatcagtcggttgatgcaattagcgctcccgtatagaaatggccttaagccggttgatcctggaaagcatgaacatgttgctggtagcaatgtggcatctctgccttattttggtggttcgtatggttaggtaagcgacgcacatgtctgaaatgatgacacagttgagaattttaaactcgaatgtgtgtggcttaaacaatccagctagagatgttgtctaagagacaactgaatttcctagagtacagatcttatgtcgataggaaacaaaattaagtaaatgtgaaaagagataggatttttttaaatttttaattctattaatagacctttccaaaaactgaaccttttggccacgctagcagcgttgttttgccaccctagccatggtggcgtggcaaaagctggacaacactgccacaccatctgcgcgtggtgtcacaaagtgatttggccacgctaggcgggctggtgtggccaaaaggtttagatttgaaaatacttttcggaaaggtctattataaaataaggtctaaaaaataaaaaaatttcgagaggtaggggtaatagatggtagattttagtatcttgcctgcagatggaattttgtgtttttttttaggctatgataataacgcgtcctgtagataaacatatttttttggaacatgccaaggtgtttttttaggtagtagagcgagtcaaagagacaaaatccatagaaaatcaaatttttgaagattataattcgcccagatttcaacaaactggaattaaaaccgttagtccatatttaagaatactagagcgctcggacaaaactatcatgtcgaacacatacgtgttcatgtattagttcataacacgtgccatgtgttttaacagagccagcgacatctagcaaattaagaactacttactactagataacaatgtgaactactaaataaaaacaattaagttcgtctccggtgccgaaacagagaatatcaattataggcaatgtaaaattatccctaaccaaaaatttcctgaactactctttataccgcgcgctgcagccctacagtctcatacaaatcatccaaatggacgtatcaaataaatattacactttatttatttctaataagatagcttactataaaatctcgtataaacctgactaacgcaatcgaccacatcgacaacaactattcatcttagcccacaagagtaaaatgtattttgcaaacctttctaacccaaacaaccgcaccacaccctaaaggaaactgctcaccgcagaaaagatgtataccatttgcaacataataacactgaaaattttagcacatatagagacaatataccgagaaaaataagtactataatatattaacataaagaagaaataataaatatgctacctttttattatgtattagtaaataatatatacgggctataaactagccggtgtgctaacaaacatgtttattttctaattatattttcagaggaaacaaatagttctggagagagttcaaaccattacactcattaataatagtcatgtcctatgttctacaaatcataagatgaagttattatacacaataatgtggaaaccatcttaaatgcgaatacaattatctcatcattattcatgtccttgtgaatttgtgaaaaatataaaaataatttgtctaagcgactcgtaggatatgagttataaggatggaaaaaactagaggatgtatagtcttgtactagtggcacgaaagctgggacgaacaattgtagaacgtgagtaattattatgaatattatatacaaatcatttgcttatacgataggagctaatgcaatttcatatcaaaaatggtggatgcaatctctaataataaagaccggaaaaaccgaagactacaaatcaatcagataaagtttattaaatttcataaaataaggctttatctgtgacagtaacacgatatgtattttcatcccttaagaatatccccgttttcacattgtcattcaaataatcactaaacaatgtgaatttttttaacaagatagattaatatatgatatatcactctacaaatacgcaatttcaattcaatatatacaaattgtaacagaaataactatgaatattctctgcaaatagaggaggctttctcttgctatgctatgattatttagctctcatgctcatgctcacacattctcatagcatggcaagagaaagcctcctttatttataggcctacctagccattggatctttgacaaggattaagacacttatcctaatctagagttttcacttcttgctaaaaatacacatgtgcatccactattattaaaaatatatatttactaaaagtgtttctgataattttattttactattgtagaccatttgtgaagaaacatctagtccgtaaacattttggaatattcaagaagatttgggttgtctgcttttactccctataattaaatctaactagtgtgaaaatttagaccctctttggagaaagaaagaagttctcaaattctaccatgatttaatttatgggaaaaaatcaattcataatgaattgaaaaacaaaccatctaataggttaatgcatatgttaacttggtaagaactggttggtggatctaagatgaaaacaatcacggaaatttgccaattgattaatatggtcaattttcgactgaaatttctaaagatatgctaccagtcccgaccatttttatccctagatctatctatattttcatgaaaaacacaacatgcaatagctgccaattggggtctgtctatacttgcatgttggaaaagcaagacatgtaaagtcaataacttaaatctaggtagtcaagatccaccaaaaagaacataaccagatgagctaccttgaaagattttttttctcagttgatgtgatcgatcgaagcaactccgtactccttaccaagttaggtgtgaattgtcataccactgcaggccgatcgctcctgtgacgccgtgtggcaacaagtacttccttctcatggtagaagacaagagacgctacatgtggctcacgctgctcctatccaaggctgcgatcaatcgattcaaggcgtctgcgaaggttgaatccggcgacgcctcaaggcgctgcacaccgattggggcagtgagttcacctacatcgccttcaccaattactgcgcaaatgaagggagtctagtgacagctcatgaccccctactccccaccacagaatggggttgtagaacgccgaaagcaaaccatggtggcgatggtgcgtaacatgttgaaggcgaaagggttgtcggatgcgttctgggggaggcatgacgtcgtatgaggcatggcacgcttcctccaggttgtgcactatctgcgcgtgttcgctgcatcacccacatcaaggtcgtcatagctcgtcgatgatcttcatcaggtacgagcccggctccaagttttattgtgcgtatgattgttgacggtcgttagcgatcagttccgaccgtcaatatcaccaaaatagagaactagttatgcttgcaatgcatatccatgttagaataataatattgcactagtgtttggttcactaaccttttgcagagaataaccataaagtggaggagatttgacatcaactcagacgataaatcaatcggacgatgttaggaaccagacttgtgcatgaatgggccaagaactcagaattgacacgatgaattgggcgaaaattcacaagtctccgaagaaaagcagcagaggaggcccccagccaaaacttgggctggttgggccgacccttggttcgaccgaatcccccagcgccgttgatgcagggttgcgactgaacgctgtggattagctcccaatgacggttggagggtattttcgaccattccaaccgtcattgggaggctatataaacccctccctctcttcacttcaacacacacctcaagcaaagctctctcctattctctcaagtttagtttagtgttcccaagctagtggaatgggaatagagtagaaatcagagggtttggctctagtagctcttctcttctcttgtgtaagctttgcactttatttagaatactctcctttatacatttatggtattgaaatactttccgagtatatgaatgccaactttacattatgtttatgttatactgattatactgctagcttatctgggagatgcatcggtacaggtataatgtttgcttatacaattactctatgtcatgatgatattatagtagtatctggtagtttaggcgtggcgtctaggttacgggatatcattatttgaggttatatgctgcggatgagaggtgggccgctgatggtgacagctcagtacgggtattcctctgcgcgtgtatatagtcctaagttaatttcctccctttcctagggagggtactcatccgtatttagccccggttatatggtcatgacgggttgtcgtaaggaactcggctgtcaggggtgacttctcaaagtaccaggagggcattggatagagggtattagttagtatgtcagataactaggatgtatgtatactagaagtataggaattgattctctttctcttttctttccacttagcttagatattttagtatgagaataagtagctccctgcttgtgtgtcactctactgttggattatcttaacccctgcttagactatgattattacaagcaacatataaattattagtccggttatctctactatgatcttcccacgggattaaataaatacgatacccttggaatactctcgggtgaaatgctacaatggtatatccgtgcgcttgcggatgaactctgtaaccataatatattaggagtatttctgcgccattgctgggaattatatttctagcaatgtcattaagaaataccaacaataatctggtgtcacaacgaatatgcatgacgtgatgtcgtgttcaacgaggcagcctagtgggactgggaccagaatgacttgcaaggtatgccattgtctgaaaatggtttcccaatgcaatacttgtcaatgcctattgccagattgtccctgccactgtgtcgaacaccttcggtgcaagttggtgcggagccggaggcagtagaacccgatgggccggcacggacgcgagattcgcctcgccgcctcctaacttggaagagaaccttggtgttgatcatgacgatgacacgcccctccgtttccacaccgtcgatagcctactcggtgaggcagcggctccggggttcgcgatccgtgagctcgagatcaccgaggagcttctcctcagtacaccgacgaacccacaagcttcaaggaagcgaagctagatcaatcctggcagaaggccatgttggaggaaatgcgatctatcaatgacaaccacacattggagcttccctctttccctgtcggccaccgtgccattggcctgaaatgggtgttcgaggtgatgaggaatgaacacggagtggtggtgcactacaacgcgaggctagttgcgaagggttacttatagccgccgggaatcaactttgaggaggtcttcgctccgatggcacggatggagtcggtgcacctcttactagcaatgggggaaaacgccggctaggagatgcaccacatggacgtcgagatcggagtcgctcaggtggcatcggggttccaggggcgaattcttatccctggagattagttgaggtagttaggattgcatgtgcacgtttgctttggattcttttccttctatatttgagtccgagctaggcgcgccaccagagcgcgtcgtgcgccacgatcgggggtgtttgggatggcactcacctcaaccggccgtggcgcataagcaggatcgtggcccttaatccacggggtgtaatctagcataataaaaggagaagtaaaccgaaaagtagcaagttgttacacgctccaccaaattctctcttgcattctctgtgttcgtgcgctccaggtgttcgtccgaggttctcgtgcccagtttcgcgtgtgttagttcttgtgctgatcaagtggacgctaacaactaatgctctggcgtggcgagcagggttcactttatcggtttagctcatttgatcggaggtcaccgaaatcctgaatttttggtctgaaatttttaaaattttgaacacaatttagttgaatttgaacaaatattaccaaaattcatgaaaaatttgaaaaatttcggccgaagtaatatcgtatcggagtggaccgaaatttcggaccctgtggcgagcaacaggtgatatatttatcataatatatttttttgcggggaaagagaatgctttattgattactcatcagtgtgattacaatcatttgccagagccccaaagacacaagagggagcctgcatacgccaaacagctgaatggttcgtacacatggcaaaattagctagatcatgggctactctattgcattctcttctaatcttctgaacacggaaatcaggcagagcttggagtaataacttaatactccctccgtattttaatatatgacgccgttgacttttcgaccaacgtttgaccattcgttttattcaagatttttatgcaaatatgaaaatatttatgtcatgcttaaagaacatttgatgatgaaccaaatcacaataaaataaatgataattacataaattttttgaataaaacgaatggtcaaacgttggacaaaaaagtcaacggtgtcatacattaaaatatggaggtagtataatactctggaggacatggcaaagctgcgctccatatactgaccatgatatgctatcaaggtctgattcagttccaatatatatagagggacggtcgacggagattcagtgcccgtgttggtagcaagaacgtaccaccaccgctgcgcgtcgacgcggcgcggcaggcggcgatccaaaataggggtcgttttatcttgcagttttgagttttgagacgaaattgcaaaaatactatcagtactaaaatctctgatccggagaaattaaattcgtatatggaacatgcaaagctttctcgtttctcgttagggatggatcaaatcactttggcaataaaactcccaataaaactttcgattctgaacagtgaggccgtgggtggggttcggagaagaaaactccaaactcccaaggatatcttgggccgtttgatgcggcccagacgactcacactgtaatatccttggggaatccgagaaaggctgtacggttgggcttgagccggaaagtttactactccctccgtttcagaatgtaagtcattctagcatttctcacattcatatttatgctaataaatctatatgtctagatttattagcatcaatatgaatgtgtgaaatgctagaatgacttacattgtgaaacggagaaagtacaagcaaatgcattgatgtcaaattcaattggtgtgtgactggacatggctaatgaggcatatgcctgtaacgttcttctcttcttcagggagcagggttgcagcttaattggaatcttctgcacatcagcacatccacctcattgtcaaattaaattcgacttcaggtttctcaaagaaacgtagatggaccttagaatatcattacagggcatacgcatatactttattcaagcttattaattattactccctcgctcatgcagatcgtatgaagagcatactgagatacaagatggaggaaacatgaaggactacagtacatagacatgcagaaaagagaaagacaatacagactcgatggtgatcacactacactacaactgaatgattgaatccaatgaagcttaggaacggtaagatatacatgtccaaatctgaatttgatgaagaaactaaactaattaaccgatcacatcaaggagtagtaggggacgagggattaattgttccgtccagcgtatcctgcggggctgtggcgaacgccagaagcgagccggtcgatcgtgtatatatatactaatataaaatatgatagtcataagaaaatttggaagtttaaaatacccctgaagataaaaatctttctctggctcatgctaaagggtaaaatcttgactaaagacaacttgtttaagagaggatggaggaaaggtgacactaagtgtcaattctgtgatcaacaagaatccattcagcatctctttttttattgtgttatggcaaggctgatctggaacattatttcctgtgctttggatttgaaacctgtttctgatagcaaccagctgtttagttcctggatttctgcttttgggaagaaacttaaaaaacttgttgtcactggtgtggctgctgtgctttgggccatttggaaatctagaaacaaagcctgttttgaaaataaactacctaatgacccaactgatgtgattttttcggtttgttattggttggaatcttgggttccattgcagagactggaggaagatcaaagaaagctgctcttgggggccaaactcataaaacaggtggcaagtgaaatctttaactccaagtatggatggagggccgctacaagaaggattggatgctgaagatgtctctcttgctttaggtctggatgtcagatgcaactacaaaaattaggttttgggtgatgatcgctgtatctctgaatcaccagctggttatgtttcagggttttagtccttagagctatatgctgttattttgttttgtgtgatgtcatctacaaatccagctatcttggtagcttgtctaagactgctctgtatctgaacctgaactttgtagttcttcatttctagtaatggaaatgggggcatgatgcccttgatcaaaaaaaaaaaaatatgatagtcgtgtgccaccatcaccaccaactatcatatgagattcacgaacggtgagattaaattttacttgtttttgggtccttatatacatacatacatacatacatacatacatacatacatacatacatacatacatacatacatacatacatacatatatatatatatatatatatatatatatatatagacacacacacacacacatttatatatatatacacatatacatatatatatatatacatatatatatatatacatatatatatatatacatatacatatatatatacatatacatacatatatacatatacatatatatatacatatacatacatatatatatatatatatacatatatatatatatatatatatatatatatatatatatatatcatagaacccgtcgaaagaaaaatatgataatagaataatatggaatttttttttatctttacgaaatggtagcaaaattagcacaatgataatttattacttcctccgtttcatactataagactttttagcattacccaaattcatatatatgttaatgaatctagacatatatttgtccctagattcattaacatttatatgaatatggacaatgctagaaagtcttataaactgaaacagaggtagtagataattaggaaaaaataccagagcgcctcggaagagaaggatatggctcatggctataggtcaacgtcactggactttcgggtaattgggtttgatcgatcacttgctttcttctacaaggttttgcgatattttttttgcaaattatcaaggggaaagagagagacagctatggaacaagctagtctagattatggatatgtacttcacttaagtcaattttggtgatgatgataggtaggagtgcaatgcagacatgcagtagctagctaaatgactgaagctggatatgtaaaaaaatatcaggaggtgccaataaacgggattatcgaaaatatcgaaattctatcggtgataaggaaaaaaaattggacaaaatttattaaaatttggctaaatctatgcaggaaatcaaatagattatagaccagttggtataaaaaataacatatataatttgcaaaatgaccacggtaagtgcagagtatcatgcatgtagacggtcaaagattataatgtcactcacgcatacagattttaaaaaaggctaatattttaagacaatactcattgataggggtgggcagaaaaaaccgagaccgagaaattcggtgctaggcagtgaaagaccgaattttattcggtcaattcggttagtctcctcggttaacccaatagaccgaaaataccaaattatcaaaaaatgtctaaatgcaacctacaatccactatgtttaataggattaaactcgaattttcacatccctacttctaagcatgcttacgaatttttttgtgatttttgtcttgaaaatttccattatttctttacatatatgaaaatgttgttgaatttcggtcaggactaagaccgagaccgaaagaccgattctgaatttgtcggtcctgacatttttacgttgaaattcggtcttcacttttcaaagacctaaaagaccgaaagaccgaagactgagaccgaaatgtttggttagaccgaatgtccacccctacccattgagaaacctgaaatttagaaatatcggaccatgtttcagtgacaatttgagccacctggatctgttattcgtgaatgatttaactagcctctctgcttctccagccaatcaatcatcttttgctggccggtcgctcccgtccaacaacgccttattgtgaatgtgggttggtgctgaagcctcagctgacgactgtcacactgatgtgtgctctaccttatgcataaattcccctgctgctcgcagtcttagccagatctaggttcgtagcgtccagcttctcaggcggtgacaccacaagttggctgttgtaatgtatggaaagcaaaacaaacaatataaagagtattcatttatttaaaacacatcacaaattaagtactattcaatgagattggctctgctggtacctcatcttctgattctgattataagtaaacgccgacgcaatatccaaacaagacggtgaggactataataccaagccaaaccacaacgatcccaacaacattaccgaaaacatggtatcataccacaccgatcctaacaacatcaccgacaacaatcctaacaacatcaccgaaaataccagcgaaaaacaagggtaaaactgtgatgaaggcgaacacgacgaggaaaacgtgaaatccacgtaccaataagagctcatcgcagcaggtgacgcgtgaccaaagtcgtcgagaagaagagataagccatggtgtaggaaaatcacgcaggatatcctccacatggtaaccatcatcatcaacattagtggcgacggtggagtgcggccataaaatcatccaagcaacatataatgtcgggacaagcaatgtcatggagatcaccgccgccgatgagatgatcacggcgcgcgtgtactaaatatatatagttctaaggagagctcaaaccattacatagaacattcaacttttagtaatgttatggtgtgtcctaatgttgtactagtcataagatgaagctagtacacacaatcatgtgcacatcagtttaaatgtaaacacaattgtcttatcattatttatgtctttgtgaatttttgaaaatataaaataattaatctaagctattagtaggatatgagatgaggaaaactaaaggatatatagtcttgtacaagtcacaaaaacaattgcagaacatgagtaatcactgttaatattatatacaaatcatttgattatggaataggagccaatgcaatttcatataaaaataagaatcaaagactgcagatcaataagataaagttttttcaattccataaactaaactaaggctctatctaatacagtaacagcaatatgtattttcatctcttaagaatatctctcgttttcatattgccattcaaatagtcactaagcaacatgaaaaaatttaaactaaattgcgtctacactacataaacttggtaggtgggtgcgatctagtgcaaaaacttgaaaattgagcatataggtgcaacaacttggctagtgcgtacattttggttaaaagattaatattccacaccatactttttatgccatataaaaaaagccacccatgtcatctcaataaggatctacatatattatgtattgcttttaattaatttgttagttataataataaaatgatctatcgatttgaaaccgaaagttatttggttatcaaaagtaagtacatggaaataacataaatttccgagcgattcaattaatcaacatattcattatcttgggttatgaatatggcaaaacacgaaattaaatccataaaccaatgatctagaagttaagcttataataccatgattaatcaaaggtatgtatcaatgtttttgactaaaatgcacgtgattgtcaattttatgtaccaatctactcatttttcaagttcttgcactaaatcacatgcacctatcaagttcttgtaccatgggtgcaatttactaaaaaatttaataagatagattaatatatgatatatcactttaaaaatacacaatttcaattcaatatatatacaaattgtaacaaaaagaacaaatatgactatgaatatgcaggagactttctcttgccatgctattactatctagctctaatgctcatgctcacattctcatagcatggcaagagaaaacctcctctatttataggcctccgtagccattggatctttgacaaggactaagacacttattctgatctagagttttcacttcttgctaaaatgtgaggatgatcatcgtggcctcccggtccctgcggtccctccccgggtcctcgctgagcttgctcacctcggcgcggcggaggaggtcgctggtgtagtgcccgtgctcctcctcagccgccgccgccgccggtgctcgtgtcacatccccgatccggtgatcagcgtcgacgaggctcgccttctcgcctaggtcggagtgcgggatctcggtggagatgacggagtggtcgtcgatggcggcgaccagggattcggccatgtcggtggtgcacgacgagattagggttttgagcgaggtgagtgttggggatattggagggaagcttcatggctgtttcgcttcgactgccctctcctccttttcggccgttggccgcgataaatgaggccctgttgagtttccaaaacaaaatttttcacgctgtcacatcaaatatttggacacatgcatggagtattaaatgtagaaaaaaaacaattacaaaaattgcatgtaaattacaagacgaattttttaagcctaattacgccatgatttgacaatgtggtgctactgtaaacatttgctaataacggattaattaggtttaaaaaatttgtctcgcagtttcctggcggaatctgtaatttgttttgttattagacaacgtttattacttcaaatgaaatgtgtgtccgtatatccgatgtgacatcccaaaacaattttttttgccaactaaaccaggcctgagttgggttctgcgcttccaccgcgggcaggacacaattaaaacagttttgcccccattaaaataggacacggtcaaacctagccggcggggtgggcgtcggcgagcgagcggcggcggcggcaacggaaagtgggctaggcgcaacccctccctcaagccattttcaccgcaggcttccgcttccgagctcgaaggtgagcgccaccgcgaggaggggaggaggaagcgggggcaagggtttggtgggttggggattgtcgcgtcacgggggacgggattatggagtaccatatgaaatctgtgtgcgatttgaagcatttgaggttgggcttcaaattttctgcaatgtccaattgtgtccaatctatctattatctattattattttattaaaatagctttgaaaggatgcaccacatctgctgtgagagctagaaattcccacattaatcggagaaaaagaaaaaaagaaaaagagtgtccaagtagaagtacaatttaaaaatagctggaattcggaaataaaaataagcaatattgaaagaagtttccatataagaacccaatacgagattaatcaaaattcgaaataaaaataaaataaaatccaaaattagaaaaggaaagaagagtccaagtagaaatacaatttaaaaatagctgaaattcagaattaaaaataagtaatattgaaagaagtttccatataataacccaatacaggattaatcaaaattcaaaaaaaaaataaaatccaaaattagaaaagaaaatgagagaccaagtaggaatacaatttaaaaatagctgaaattcggaataaaagtaaataaatccaaaattagcaaaagaaaataaaagaagagtccaagtaggaatacaatttaaaattagctgaaattcgaaattaaaaataagaaatattgaaagaagaatccatataagaacccaatacgagattaattaaaatttagaataaaaataaaataatatctaaaattagaaaaactaacatagagttcaagtagaaatacaattttgaaacaactgaaattgaaaataaaaaataaaaacattaaaataacacaatacgatattaactaaatttttttaaaaaaaattatgaaattagaaaaagaaaaataagatttcaattaggaatacaatctataaataactaaaatttgtgataaaaataaagattattgaaagaatagaccatctaaaacacatgacgagataaattaagttacatgcctataatggagtagagtggtggcggtttatacgagatataaaaattgttaataaaacaccaaatagaatcctaatgacgattaaaaggagggacgtcaggcaggccgtgaagcaaacgagtaaggcggttgccgagagttctagaaagtaagaaaaaaacaaatcccattgataagcatattcaatttttaaaatctcaatgacaataaaaaggagaagcagtgggcggggtgtataagagtatagttgtagagccgctgacggttgacgggacttctagaaaataaaaaatgaattccaacaatagttatatgttcgatttttagaatcacaatgacaataaagagttggcggtggacgggctgtagaggggcttcccgggaggagacggcgaagggacgcgcgtccgcgggaggtccgggatgggatggcgaggtgatgcccgcgacatcggatggacggcgacgggacaggggatgacgagggtgatgtggcgccgtgtttcctggaaggaaaccggagcgagagcggcttggcgcgatgcggttttgggacggcgcgtgtgttggcgcgaggagcggtacacgggaaggtggctcggtgtattgcggctcggtcacgaggcgaaagtggtgcgacgctgggtgagacatttcgtcgaacaccttgcgtgcgtgagctggctggcctgaggaggaagacaaacagtggctgggctgagctgggccggcctgctaatgggaggagaagagaggagaggatggaggggagttgggccaggaaagaaagagaggaggaggcccaaattgtactgtgatatttcacaattatctcaaggatttggggtttgaaatttggggagatttttgggaggatttgaatttgaatctgccctagggtttcatggaaatttgaaggaaattctaagagaggattgagatctaatttggcacaaaaacaattaagaaccaaactaaactccaaattttaaatgacaaacttttaaataaaagcacataaaatatgggtgctacaaacctacccccttaaagaatctcggaattaaaaataagaaatattaaaagaagagtccatataagaacccaatacgaaattaattaaaattcggaataaaaataaataaatccaaaatcagcaaaagaaaataaaagaagagttcatgtaggaatgcaatttaaaattagctgaaattcggaattaaaaataagcaatattgaaagaagaatccataaaagattaattaaaatttagaataaaaataaaataatgtccaaaattagaaaaattaaaagagagttcaagtaggaatacaattttaaaacaactgaaattgaaaataaaaataaaaacattaaaataacacaatactgtattaactaattttttaaaaaaattctaaaattataaaaagaaaaataagatttcaattaggaataataagtacaatttttgataaaaataaagattattgaaagaaaagaccatctaaaacacatgacgagataaattaagtaacatgcctataaagtagtagagtggtggcggttgatacgacatataaaaattgttaataaaacaccaaatagaatcctaatgacgattaaaaggagggacgtcaggcaggccgtgaatcaaacgagcaaggcggttgccgaggcttctataaagtaaataaaacaaaccctattgataatcatatttgatttttaaaatctcaatgacaataaaaaggagaagcagcgggcggggtgtataagagtatagttgcagagccgccgacggttgacgggacttctagaaaataaaaaatgaattccgacgatagttatgttcgacttttagaatcacaatgacaataaagagtaggcggtggacgagctgtagagggcataatggcatcgtttgatgggacttctaaaaattataaaaaataaaactacatgtccaatttttaaaggttcggaactactaaaaagtaaaaaaaaacaatgataatcatattcgattttaaaatctcaatgacaataaagaagggaggcagcaggcgagccgtagaggagtgcactagcaaagccgctgacagtttggcgggacttctagaaagtaaaaatgaacccgaacgataattatgttcgatttttaaaatctcaatgacaataaagagaagacacagtggacgggccatagaggagtataatggcaacctttgacgggacatctagaaattataaaaatgaaatccaacgtgataataaactttaaaaactataaaatttaatttttaaaggttccaagaagaatgaatagaaatagtggtagatcgagcaagcaaataaagaaggagatgacataatgggtagcaacaggtgtgacttttataaactatataattagaaacacaaagatgataaggtttggtctttcaaggtcttaagacaatgagatagttatttaataaattttaagtaaaatcataaaaaaatatatgattttgtttgggtgctagccgcgcaattgcgcgggccactcagctagttgtttacattgttccgtggatgtcaaatttactgctaatgtacaacgttgcattatatagacgttttagctttctggtgaactcttgttatttctaggtccacatgagaattctgaactttctgttccggctaatgggggaaaaacataattaataaataaatatgggaaatggtatatatgtcctatttaacactgttaactcctacatttaaaataggggtaaaagtatctttcggttaaaaaagtggaaataggagaaaaatcaatattagagatagtgaggaaaaaggaaattgtctctaagaataactgtttgaggtcaaacacacgtataataaattctggggctgagcaagaaggaaggccttgaagtctggctgatctcggccagtcgcgcacaaacgggccatctgcacttggccggacaagactgaagatcacgtacctcgatcgtcgccatctgcagctgaagacggacgccacgtactcgtcgaatccgcatcgagccgagcgtgttcctctttctccatctccatgatgaataacacgacgattcgaacatggaccagattgtctcagcctcggcgagagctccggcgccgtgtcgtaaatacatcgagtaccggtatcaatggcgcgcggcggcgccggcgggcagatagatatacacagttccttccatctcgttcactgttctagtgttctcagagcactggagcctccttccttgtcgtcgccggcgcggcgatgatagagtggtatgggcaggacatcgtgaagtatcagatgttacggcggcggcggcggcggcgcggcgctccggcaactcgacgaggcacgacatgaggccgcggtggcgctcttgggggttcggagtttcaaactccgactccccgttgggctatctgcgaccgtttgatcaggcgcgtgcggcctagataagtgggaaaatatgtagtgcaaaccacatgcagtggaaacttggaaac

SEQ ID NO: 6021 - DNA, 12060 bp, Oryza sativa
ctgtataagggactgttttttggttgatttttattttatcttgggatgagttgtttatgatttggtagataattgctgcttgattaatgtttcattttttaagataagtttactgatgatctcattgttgccatgttaggtgtaatggataatttggatgtactttgtatccggtttcactttggtggggaatttgattatgatggatattctgtggtttataatggtggtcaaactgagatgtcatacatagagagggacaaggtggcattgccagagatcaaaggataccttggagaccatgttttactaagtgaagaagatgaagtgattttccattggttatttccaggtgctgaactaaacaatggcctgaaagcactatcagatgataaggaatgcttatatatggctcaatgcataatcatgggtgatgtaagctgaaatatatgctgaaatactcaagcacaatgaagatgataatgttgtgcttagcaatggtgtcagtgatgacagtgatgttgaagatgacattgaggaagaatatgacagtcatagtgatgctgaagattctagtgaaacagatggtattgctgaagatgatgaggagagatctgaagatgatgaggaagcacaagaaaatagacagcatgccaacaaggttaagaagaatccatgtgccactattactgtaaccagtgacaacgctgttcttgtcagtgacccaccaaataaacaagatgataagggactggatgatgacactgatacaccatttctggactcaagtgaagaagcctcttatgatgatgcagaagatggtgaagcaataagaaggaagagtagatttccaaagtatgatagcaaagcacacacacctaagtttgaaataggcatgacatttgcaggaagagcaaagtttaaggaagcagtaatcaagtatggtcttgtaaccaacaggcatatcagattccccaaggatgaagctaagaagatcagagctagatgttcatggaaagattgtccatggttcatatttgcctcaaatggaacaaactgtgattggtttcaggtgaaaaccttcaatgatgtgcacaattgccctaagagaagagataacagattggttactagccgaagaattgctgataagtacgagcacatcatcaagtctaatccatcatggaaactgcaaagtttgaagaagacagtgaggctggatatgtttgctgatgtgtccatctcgaaagttaagagagctaagggtattgtcatgagaaggatttatgatgcatgcagaggtgagtactctaaagtgtttgagtaccaagcagaaattcttaggagtaatcctggtagcacggtggctatttgtttggatcatgaatacaattggccggttttccagagaatgtatgtatgttttgatgcttgcaagaaaggttttttagctggatgcagaaaagttataggactagatggttgttttttcaaaggtgcttgcaatggtgagctgctatgtgcattaggaagagaccccaacaaccaaatgtatccaatagcatgggcagtagtcgagaaagagaaaagacacttggagttggtttattggactacttcaaaaagatctgaatattgatcctcatggagctggttgggttattatttctgagcaacaaaaggtaatgcatccttgatatctacttatttttatatgatcaacaaaaatacatgaatattgatcctcatgtgttttgtttaccaatgtagggacttgtaagtgcagttgaggaatttttgccacaaattgagcacaggatgtgcactagacacatctatgctaattggaggaagaagtatagggatcaagcattccagaagccattttggaagtgtgccaaggcatcttgtagaccatttttcaacttttgtagagccaagcttgcacagctaactcctgctggtgccaaggacatgatgagcactgaacctatgcactggagtagagcttggtttaggatagggtccaattgtgatagtgtagacaacaatatgtgtgagagcttcaataattggataattgacatcagggcacatccaatcatatctatgtttgagggcataaggaccaaggtttatgtgaggatacaacagaacaagagcaaagcaaaaggatggctaggtaggatatgtccaaatatcttgaagaagttgaacaagtacattgacttatctggaaactgtgaagccatttggaatggaaaagatggatttgaggtcactgataaggataagagatacacaattgaccttgagaagagaacatgttcctgtaggtattggcaattggcaggtattccttgtgcacatgctataactgcattatttgtgagctcaaagcaacctgaagattacatagcagattgctacagtgttgaggtgtataacaaaatatatgaccattgcatgatgccaatggagggtatgatgcagtggccaattactagtcatccaaagccaggaccaccaggttatgtcaagatgccaggaaggccacggaaagagaggaggagggatccattggaagtaaaaaaagggaagaagttatccaaaactgacactaaaggaagatgtagccagtgcaagcaaactacccataacattagaacatgtccgatgaaaggaaattcaggaaaaaagatatcagtacaagagagagcaagagaggcaagtaatttacatgctacatatataagtggttgagtattgacatatgtgattctgatctctacattgaatgcaggttcaggaatgtagcaggccgcagaaaaggtttaggccatctgtagctgcaggaacttcgcagcaaaagttcatgtaagttgcaactacattgcagactatattccatcacaataaaggtgtccaaaatatatgatcttttttttcatgtaaggtgcagactgatttgccatcccagagcagcagcttgtcaataacaaagaagggacaaatgatgaaagttgcaagaacaaacacaacaaagaagtgaagatttggttgcatatggctgtaggaataagtcttggctggttggtcttggtcttgtggtgccttttcctgcttttcagctttctaggacagcatctctactttcagtttggatgctctaggacagttaggacagcagtttgttgagatgctctaggacagtttgttgggatgctctgctctaggacagtttgttgggatgctctaggacagcaccctcttagactagcatggctgcatggctcttagactagcatggctgctacaagcagctataaatatgtatccaatcctctttgggaggatatggcttttgtgctttgtgaatgaagaaaaccagaaaattgccccatctcgagtgccatcctcttctcaatgagagtaaccattgaaattctaacatctggtatcagagccacactttcctgtaggctaaacatctcttgttccaccccttcccaagctcggttgagctctcagccagcagcaccggttgctcctccttcccctttcccttccccctctccacacagcagccccccggaggtgcgccatgtccgacgctcggtctcggcgttcggtcgcctcgagcactcggcgtcagcaggacgccgagctcgccgcagcagaagagcgcaggcgagcaacggctcagaccgctgcagcagcagcgagggcggccagactggcggcagcggagttggcagcagccagggcggaggcggaggcggaggcggcggaagatgcggcacgtgcggcggaggtagaggttgagaccttgcgcagcagcatcaacggctccatcgccggcgacatcaccgccgacagggagcttgaggagctggcaagaggaagggcacgggagcgagcagagcggtgggcagcagcccacctccacggcggcggcggcggcccaagggaccgcgcgcccgccgacgggaacccagacgggcgcgggcgtgccggcggcagcccggagcccgcacgcggccctcgcaggcggcacggctctctctcccctgaccggcgctatggtcaccacggcgtccagacggtggtcagggactttggtcccggcggtgggtggcctaccctcaccaaaaccaactacatcgagtgggccgcggtgatgagggtgaggctccaggtgcggcacatgtgggaggcagtccggtacggcgacgtcgactacgacgaggatcggcgggcactggatgccctcatcgttgcagtcccgcccgagatgcagttctcgctttcccagaagcggactgccaaggaggcctgggacgccatcgctgcggcacgcatcggcagcgaccgcgcccgcaagtccacactgcaggcactccgcaaggagtgggagaacctggccttcaagccaggtgaggatgttgatgactttgctctccgtctcaacactctcttgcagaagatggtgcagtacggcgacgacacctacgacgaggagagagctgtcgagaagctcttccgctgcgtccctgagaagtacagacggatcgctcgctcgatcgaatctctgctggacctctccacgatgtcgatcgaggaggcgttaggtcgcctcaaggtcgtcgatggtgatgagccacagcctctctcggggcccatcaccatcggcgggaagctccacctcactcgggagcagtgggaggcctctcagggtgacgggaggaagggggagtcatcttccccgacaggcggccgtaagccgcgcaaggcgcggggaggtgtccagctacggtgggcgcgaagacgtgccgagggtggcgcccgcagaggcgcccagggcgttgccaccggcaaccacaagccggcacgagacgacacctgccgcaactgtggcaagcttggccattgggccaaagactgtcgacagccacgacgcggccaggcccacgtcgcacgggtggaggaggaagagccggctctgctcctagctcacgcaagcatcgagctacctccagcggcaccggccgcagcggctttcctccaccttgatgagccgaaggtactcgtctccctctgcgacggctccagcaacgacaaggctgatgggtggtacctcgacaccggcgccacccatcacatgaccggccgacgggagttcttcaccgagttcgactccagcgtccgaggctccgtcaagttcggggacacctccggcgtggagatcaagggtgttggctccgtcaccttcaccgccaagtccggtgagcacaggctgctcaccagagtctactacatccccgcgttgaggaattctatcatcagcgtgggacagctggatgagaacggctcacgcgtgttggtcgaggacggactcatgaggatttgggatcgccgccgtcgccttcttgccaaggtaaccagaggcactaatcgactctacatcctcagcgcgcaggtcgcacaaccagtttgcctcgccgctcgtcgggacgacgaggcgtggcagtggcacgagcgcttcgggcacctccacttcgaggccctgaagcagctcagtgccaaggagatggtgcgaggcatgccgtgcctcgaccacgtggagcagctctgcgacgtctgcgtggtgacgaagcagcggcggctcccctttccccagcagacgagcttccgagccaaggagcggctcgagctcgtgcacggggacttgtgtggcccagtgacaccggccacaccaggaggacgacgttacttcctgctgctcgtcgacgacctctcccgctacatgtgggtgatggtcctcggcagcaagggagaggctgcggacgccatcaggcatgcgcaggctgctgcagaggcggagtgcggccgcaagctgcgcgtgctgcgcaccgacaacggcggcgaattcacggcggctgaattcgtgtcgtactgcgctgatgagggcattcagcgccactacaccgcgccgtacagcccacagcagaacggcgtcgtcgagcggcgcaaccagacggttgtggggatggctcgggccctcctcaagcagagggggatgctggccatcttctggggggaggcggtggtgacggccacctacatcctcaaccgctcgcctaccaaggccctcgatggtaggacaccgtacgaggcttggcatggcgcaagccggcggtctcccacctgcgggtcttcggctgcctcgcgttcgccaaggagcttggccacatcggcaagctcgacgacaggagcaccccaggggtgttcatcggctacgcggagggctcgaagacctaccgcatcctcgacccggagacacagcgtgtgcgcattgcgcgcgatgttgtgttcgacgaagggcgagggtgggtatgggacaaggcggtggatgatggttcgactccgacgtacgacgacttcaccatcgagtacgtccacttcgagggagctgggggagtaggcagctcttctcaccgagcgtgcctaccccagtccccgagcctccaccgactccgacaccaacacaccctcgggccacgacttcgactacgacgagctcttcgtcgacaccaccccagccggtgtccccacacgctccagcaccaacagccactcctccgggcacgtctactccgacgccagctcgtgttgagcgcagcccggtggggttcgttactccgctctcccacgacgaggagcgcatcgacgcgtaccatgatggcgagcagctacggtaccgtacgatggaggatcttctcggcgaccagccggtgccgggactggtgcctcgcaacctggaggcgcagttgcaccttgcgtgcgacgacggtgagcctcggtcctttgcaaaggccgagaaacacgcggcatggcgtgccacgatgcagtcggagatggacgcggttcaggagaaccgcacctgggagcttgctgacctccctcgtggtcaccgcgcgatcacccttaagtgggtgttcaagctgaagagggatgaagccggagccatcgtcaagcacaaggctcgcttggtggcacgcggtttcgtgcagcaggaggggatcgactacgacgatgccttcgctcccgtggcacggatggagtctgtgcgactcctccttgcgctggctgctcaggaaggctggggcgtccatcacatggacgtcaagtcggcgttcctaaacggcgacttgaaggaggaggtctacgtgcaccagccgccgggatttgtgattctcggcaaggagggcaaggtgctacgcctgcacaaggccctctacggcttgcggcaggcaccgagggcgtggaatgccaagttggattccacgctcaaggggatgggcttcgagcaaagcccgcacgaggcggccatctaccggcggggcaatggaggaaatgccttgctggtgggtgtctacgtcgacgacttagtgatcaccggcaccaaggatgcagaggtcgcggcattcaaggaggagatgaaggccaccttccagatgagtgatctggggcctctctccttctacctggggatcgaagtgcaccaggacaactccgggatcacgcttcgacagaccgcctacgccaagcgcgtcgttgagctggctgggctcaccgattgcaacccagctctcactccgatggaggagagactgaagctgagccgcgacagcacggcggaggaagtggatgctacacagtaccggcgtcttgtggggagccttcgctacctcacccacacacggccggacttggccttctccgtcggctacgtcagtcggttcatgcagcgaccgacgacggagcaccagcaggctgtgaagaggatcatccgctacgttgcggggactctcgaccacggtctctactacccgaggtgtcctgacaaggcacacttcgtcgggtacagcgacagcgaccacgccggcgacattgacaccagcaagagcacgagcgggattctcttcttcctcggcgagtgcctcgttagctggcagtcaatcaagcagcaagtggtggccctgtccagctgcgaggccgagtacatggcggcatccgccgcttcgacccaggcgctatggcttgctcgactgcttagtgatctcctcggcagagatactggagcggtggagctcagggtggataacaagtccgctctggccctggcaaagaaccccgtttttcacgaacggagcaagcacatccgggtgaggtaccatttcatccgaagctacctggaggaagggagcatcaaggcgagctacatcaacaccaaggaccagcttgcggatttgctcaccaaaccccttgggaggatcaagttccttgagctttgctcccggatcgggatggctcaactttcccacaagacggcgcacaagacttagggggagaatgtaggaataagtcttggttggttggtcttggtcttgtggtgccttttcctgcttttcagctttctaggacagcatctctactttcagtttggatgctctaggacagttaggacagcagtttgttgagatgctctaggacagtttgttgggatgctctgctctaggacagtttgttgggatgctctaggacagcaccctcttagactagcatggctgcatggctcttagactagcatggctgctacaagcagctataaatatgtatccaatcctctttgggaggatatggcttttgtgcttgtagggtataggaaaataccacgagttagaaaaaacaaaaataaaagaggtctaactaatagcacatttttcgagaacatgtgggagccttggttatcatttcactgagagagccttgctgtggtcttcaaaattcaatcattttcgtcattagatatctagtggaactccatggcaaaggttaagccagcaagcaagctgaaccctttgatcatgtaaatcctccaatcggcaagcaagccaattataaaactttaaagaaagaagagcggctacatagataaattaagatcatcatggttgttaaacccatagtgatgacagcatgtgcaacaccatcgcgatttttggctagtaaattccaaccctctccctaactccatcaactttgcaacagaaatgcaaatgtttggccttttgcatatgctttaagtatataatcttcttttctttttaatgactcgggattatgacttccaagtataaaatctcaattcaattgaaaacctatgtgacaaaaggaaaacaaagcaaaacaaagaaagatgcaaccacagtgtttactagttctttaccacacatttcatagttatattcaatttgaaattagtaaatggaattgtatattgcaacagaaataaaaattactgtttacactgcgtaagtttataggtgtaaatataacatatatgatacgacaaaatgaaaaactgaatgaaatgtgcttcttcatttataaataatgcaacatcatagcattagttaaaatagcacaattttttataacaattcatagctcaaagtttcaacattgcaggtatgttgtaatacgattcgatctatgtacaattcaaaatcttaatgtaaacagaatgtgttaacacaaacattaccaacctactaggtgcagcgatttgctgatggtaaccaccaaatccacttcttacctgacaatagagtttaaaggcattactttcaagtcgtaaaatgcaaattcatttgcaacaataatggaaccaattctgagaaaacccaataatgaaaatatcttaagtacgaggtagttcgttaacccattggctcctgtcctttattctgaaatcatgcacatgcgtgcatattgccacttaagcactgagcatatacataatattctccaacaaactatttttggggatcccaacatatatccatatcgggcagaaactcttttgtgtcgagttttttctttttaagattgaaaagtgaatggttttgaaagttcaagattgtatggtgtctgatattaaagtgtggtttgatgtggaagttcaagtccatgagataaaattcttcgtattggaaatcaagctgtgcaaacatttcatcccaaccatgaagactgaagcatgcagcttttgctctttgggactgaaacacaaattaagctcttaccgctgtaaggctggaaactttttcaacgagctcttgaatctccctaaacagataatccatcctctcgttttgttgctgtgtcattcgtagtatctcctggagcatgtatgtctgcttgtcactgtcatgcacacgaagaaaataattaagctcggtttttttcaatactttcttctatggaaactaggtgtatctactgtaatgtgtagtctggtaccctctctaaattattattttgttttcgataaatcaaacgtagattataaattactccctccgtttcacaatgtaagtcattctagtatttcccacattcatatttatcaatatgaatgtaggaaatactagaatgacttatactgtgaaacagagaaagtaccagttttctcaagtggcaactccctacgcacagatgaggggagagagtaagagagaggatttatttgttaactcaaatggtaggcagaacaactaaaggtggcatttcaaatcccaccgagacaagttgctggtcagctcgtctcattagtcgactaattattacagtataatttctctaataacattttctttatttattagaaaaccttttcaagttatttgttagttttataatatataataattaatccatgtattaatcatccggctaatcagctcacccagccattttatcttttagattgggtcaatttcattggtttgcccacaaataattgtcataaattcagtttcatctataaatttctgatttcagactaatcaaggggggagaagaaattatatcaacaagcagcatagcacataaacaaaaggatttgtgaatagatagaagtatagaacaaaatactgcaaaaggtcaaacataaatggatcaagatagtagaagttagctcactcgaaaccacaggagcttcgtggtcgcttcgccggcggtgatccgcgtgatccttcgtcccctttgccatccttctcctcacgatcctgaggccaggccacaggcatcgcccacggagacactgggggagaaggaattaaagaattaatgttgccttccagtgtagtccggaggccggaacaagaatactggagtagactatatgggacctgacgaagatacctttttgtttctttgaatagcgagggcaggaatactcgtgtaatcttccttctgacacacggcttccatagattatttttctttgacaaaacacagcattgatagctctgtttacttttaaatcaatccagtctctattatttttggagagatcagcatagtttcttcataatataagcatgaatgttctgtgaaacttcagtcagttgacatcaggatagcactcccaaatcaacatggagcaggtaggtatagtgtgcgttcgattccctgtgtaatctatggggtcaaaacatggctcctattatttcctaagcaaaagttgaaagaaggaaaactaaagaaaccgagtctaggtactttattgtctaacagatcatttccagatgaagcttccgtttcagcttccaacgaatgcaccaaagtctatctactatcccactggaatccaatgcgtaaccctaatatatttccaatgatcttggtgggttcagaacttacgattttgctggtgcagatcaagcatatgtgcaaacaaaagacgagactgtgtttgggttgtgcgagactttcggatggagacaagacaaccgcatctctgcctttgcggcatttctccgaacacctctgcggcgcttgtctcatctttggactcctcatctcgcatatcaggcgcatcctcaaactggtaagcagagcggtgggaaaacgagacggagttggcggcgagcttgatctcgcgccgaccgttgtcgcacccgccattgctgcgccagcggctgcggcagg

SEQ ID NO: 6022 - DNA, 19270 bp, Oryza sativa
  unsure (1)..(19270): unsure at all n locations
cccccccccccccccccgcccccaacccggcccgcgccttttacatcgttggttccgaccgaggaaaagaacgaacatctcgccatctcgcgtttccgctctccctaggtattaggtttccgccgctacatttttgttgcgtaagggttaggttcaaattcaaggtggagtggagaatttctttttttaatctttattatgtacagtaagggcgccccaatttagaacatcgtggaaaatttggttaggaaacccgtatggaaagagcgagtagtatttcttttgctgaaaaattcacgcgtttcgaacaagtgtaaggagaacacctgaaattagtgtgtgttctagtatttgaatatggggggactggattgggatttagacatttagttactactctgttccttgctgaatccaatcccctttaccaaacaaacaagtgtctccaccggtcgaatcctcatttctcatcctcgcaaaagaaaagaaaaccttcattttcttatccaaatatctaccgagatactgtgtccttgttcgtttgatcctatcaatttgggcatgttgtggtacggatagcaatggacaactgggcatgggcaaaggttaagtacaaacgccgtgacttgattctttcccctcccccagaaaatgcaatggtattatgggttgtagattgtagaattgaagaggaaattatccgattcacctctaggacaatggtgtttactgttttaccatttccctcctttatctagtattgctcaagatttacccctaaagcctttatgtgatcttttatggataatataagcctaaatttattaattcttcgattcctcgaaaaaaaaactattattcttctaaatcatttcatctgcctaattaaaaggatgtagctatattattttgttacattcagtaagtacaaaaatggattctgatgcttgattaattccacgttaatcaggtattctgatgcatcaaacaagaactgttgccagaaaaataccttcatcatacttccatgattattaaatattacttcataatatgatgatgtgctaggagctccctccatcacaatcaaactgcttgcttgctgttctgttctcagtgctgatgtggatgaaatatcaccacgagttttatctatttgcttgatagtttcagtgagaaagttcaggaatctcttctgttactagtcaactatgtctagttttatcttctgcagaactttgatttgttctctctatccatactagagtggtatatgtcgtcagtttcggtcaaaatatggatctgtatctcccgtgtgctttatttcactttacttttttgacctctctttgttgatatttgaaatgaaaagttcactttccagtttccaattaccatctcttagggcttaattcctaactctgttttttgtgcaatatctaaccgatacagtcaagcttagccaaaaacgattagatgtatcctgtattcctgtatatgcggttggtgccctgagatgccttagatatttggtgaatgctccatctcaaaacaaaaggcaataagatccatgccactagttgctagtgaaagggaagaggaatgcactgagaatgagaaagagcttccttatttatgctctcttgattcacaaaataatagggaaacttttctgtgagtttgttgtacttatatcacccaaccacaatggtgtacctatcagtatcaggcaatgttcctatattccctacaactatcattcgagttactgatcaccgatagctcatggtttagtgagaagataggccgtgctggaaagatatgattctcatggttaaagcaacagtaaattctttgtcactgcttttcttttcatccagaatgatctggagggctgtaagaataatggatatttaaaagctgagtgaacaccatcaccttcacctctgctgaaattccaaccggatacaatgatagcccatcactaagatacatcattaagaaaatggcaccgagatccaagtggaatataaaagacttgaactccagttcattattatactactatgatactatctggccagtggacacacttaatcagggttccatcttttattttgtaatgaaacgagctttgttttcagtcaacataggctggttagacagcagttatatgtcatgatggaacgaaaataggaatatatatgttccaccattttggtgctacttcatagtaaacaactaaacccccaattcgtcacctaaacccctaaagcattgttgctactgtgattgttggccaaggtaccctagaattatctatatacagttatacacatactcatttcatctcatcactgctctttgcttacttcaaaaacttaaagctactgagcaagtaccaacaatatatatctgctatccggaaattacaaagcaaaactttaaaaagctaaggtacttgatcaattttaagtcgcaaacaacacactattattcataacacagattgtctagaactactcccactggatcgatgttattgctactcagtaagtccccatatatatgcctataagatagcgtctcatgagtcccatcagaaccatggaacagtaccatagctaccgtcagatagagctgcagtggagaacatctggtccacttcgatctgcacatctgatctcttggcgaaacggcccttgatccggggtcgtgcctctgcatacgcctttcttgtttcataacgtattgtcttctcaaacttcctggccttcttcttctccctgtacctgagcaccctggcctccctgtccatggagctgaagtgaagggacatctgaagcgagggacctgagaagagattgattgctccagcaggtgtcaggattctggaatttggcatatctatcaccgtgctgtctggtactatacccgcctccattgatgagaaagatatctgagatggaatcggcaaatggtcactgaaatatgcgaatcataaggagattgcaggtgtcagagaccctgcaatgatatatagatgggcttaatttaattttacatacataagaaaaacttccaatatcttttttactgtcgcaaaagtaagatattttaaatttatgcactgggataaaatatgaattacacttacacttatcctacttttcatgaggtctttcgtgtggtgattgctgtgtacataaaaggttaacaaactcacttcttttcaattagtgagttagcatggatcgtatatgcttagaaatacaggaagtagtcaactggtctgcctaaagatcaattgtgtacttttctttaaagtattttttttatcggttccatttaatcagcctaaagatcgcagcttggaagtagaaaagtatctttgttttcttgttgagatctgtttatttatcccttcattttgttagacagtagcttttgtttggagaatgtttttccactcaaaagtactagtatgaactctaaaacattgacaacgtggcatgtagtaacaactaactaacaacagtaatagatgttcattctctgaaaaaaaaatagttgcagctagtaatagatgaactcacgctgttgctgatggaatctgtgtaagcactgacgccggcggtcatggaggcggcctggtctgctcccacaactccataaccactatgctgctgctcactcagcattgtgatctgtgaaggtaccacacactcgctcccttccttctctgcaaactccttttgcatctcctgctgctgctgctgctgctcttgctgttcatgcatcccatactgccgatcttggttgttttcgatgcggttgtcgtagtacgaattgtacccgacaagatcaaagtactcatcgacttcaccaaaatacatgccgttgttgctgctgttgctgttgttgttgtcgttattgtcgttgtcgttgttgttgttattgttgttgttgttgtcggaatctttggagaggagaagccaagagtccacctcctcgtccttgtcgccgaggacggtggcggtggccaccaccgcctcagcgaggacggaggtggccgggatggtgatggccgggagcgggttcgcggagtgcacctgcacgtcgcacgccacgcacagcgcggcggcgtcggcgcggcacgcgagcgcggccggggcgcgctcgcaggcctcgcacacccgcacgcgctcgtggcgggacgccacgcggttggccgcgtgcacccgcgcgtcgcacgacgcgcacaggtacgccgcgtccgcgcggcagtacaccacgctcggcgccgccggcacccgtcgcacggccgcgcccatgggcagccgctcccctctcctcctcctcctccttcgcctccaactccaacctcctggtcgaacacgttgccaccaaaattataattcatgaacgaagtagccttgcttgtggtagtagtagctttagcttgcaccacatggacaagtctatcgatccaagctattgtgtttgtcctctctctctatgtgtcgtgtgtgtatgcgtcttctcctgttcctctacctcgcatggctcttgtggaattttgtgagtgttttttggaaggagctagggaggggaaagtcacggtgtttttgtcctggggagtttgagtgtagagtatactaatagtaagggggtgtcaagtcgaatccagcgattgacacttggcgcgatccccgggggggnggggggggggggcgagcggcggctgcaatgcctgtcttgtggttgcctttggatgtttgctgcttcagcgtttctcttctcaccccctgatgccaatcctcaatggaggggtcgttttcagataaagattttgtgcactttggcgggtcctatggagaattggcgcccttgagctaaatctaagtatctaacctgaactgatgtcaataccttttaagccaaagcaatcgcgcttttgcgcaaaaaagctttgcattttagtgatgagtacactgattctcttttgtcgtaatcatgttccattttaacttaggactgtccctaaagagattttacagggatcaatagaatcctcccatatgcattcctaggattgtccctaaacaattcaatggacatctcttagatggaactaagcccaaagggggagaattggaagccactgtgatgatgtacaaataaagggaaaaacaaaaaagagcagaggaaagatgctgcctctctctctttatgcacattcttttgcaaaagagaaagggagggttgggttctctgggattccaaagcatgcggttttgtgccagtcattggcactcccccttagccgttccgcctttacgaacctccggtgtgaggtagccagtgcagatacatgagaaaagttccaaagcggcctgccatgtcactaaatagtttctttgccggcctccctcatccaaaaatatctattctagtggagaagtcaaattattaccaatgtgttttttttcttctgttatatgatttctcaactgctgaaggaactattatttccttgcataccttttttttgtttgtttgcaaggcctatctatatatgacatgggtcctttatgggttatttgttgcttatcattttctttgagccatctgtttcttattatagccctgctataacgttaaatatgcctctccatagagaatctacttttttttttgcaataaatttgtaaggagaacagtccacctctgttcatctttgcttttgttgttatctagtattttggtagaatctagctacatggtttgatatatgtcttgttagtaccaagttcaatgcaaccatatatctatcgtgttgatgaattgagtttgttatgctgtggttgaattaagtgttatgaaaaacataggagtaactaacaaaaagaagtggtgctattagagcaattctcctttaacactatgccatgctacacaaattttatcaacaaacttgtactacactaaacaaacttccttggtaaattggcatattgacatcatttgtttttactgtatgttcaaaattgatcttcttacccacaagtggttctttatttactagtgaaagcacaagaaatatttttctcctgcagtcctctttattccatttgatgagtgcgtatatatacagcagttccgtagaggcagtgactggtgagcttatggcagcctatgtgactgaagagtgggccccacggcccaggaattgttgaagatggtgacaactaaagttaactcgtcaggtaaggactgtgactgagatgccatatttggctttcacacctggcatatacatcttccagaattattggcttttactatattctaaaggaagaaatgcccttgtttcttcaaacagttcgatggacacgtggagttaaatgcacaaaatgtcttcgttggaagctgacctaacaacaagaggctttgcagtaccacgagccaaaatgtaagttcttagttcgaaattgtgaggtgcagagtatggtacaacgttttgaaatgctgcagtgtgctccaccccaaccgtcgtcggcgccctagccaatggcacccactctcctccgccacccacagccctaggcgcctccctccgctgcttctggccaccgaccgcctccccatcagccaacacggtgaacccaagccacggtaagttttgggaggactcgccgcctcctccaccacctagatctggagcgccccgaccgatggctagtgtcacccacgtctctgcgaccccgaagccaccgctgccacgaccccttttgtcgcttgcgaggctcccccgtcgccgatttcaattcgaaaattgctcaaccaccgctgctcccaaaattgaagtgtgcaattaccatgccgtcgccatgacgcgacgcctactggcacgcctatgagccgagagcaaggggatggataacgtctcctctaggcgtacgatgccacatcgtgccttcaagctgcctgagccaggttatctagtcgcgtcggttccatcgcccttgccactaacacaccgccaacaagggcctgagtcccttccgcctctgctataggccacgggcgttatggcgcaacttggagatctgaaaacaaggccagtggagggcgtcgtcttcatctcgacgtcacacatcattgatggggagctacgcgaaatggaaagtacagttgttgtcacctgggcgatgcgcgccccgccgtcggtcacggcaaaggacgtcgagtgtgctattgcctatgagttcggtctatgcatcagcgagctgacggtgtcgctgcacttcccggaggctttcctcctcaagtacaagcaccgccgccattgcgaggagacggtgaagcagggcttcgctaaaggccacgggatcgaggtccacttcatccaatgttgtagcttgaaaaatgccaccggctcggccctcatgtacagagtcaagctctgtctcgacggcgtgccgatgcacctgtgggcactggacattaacattcaagagagtaattggatacgggacattgacattctccgaatcacaacggtggaacatatccaacaatttgtgcatttatggtcaatgatcagaagaatgaaccagctgaatgatgaacaagacggcgtatggttgaacctaacagcaaacaggcaatacttggcaagatcggcctacagactccaattcctcggggcggcgagatccgctttcaatcaattgatctagaaagagtgggcgctgccgaaatgtaaattcttctcttggcttatttcccagaatagagtttggacggcgaatagattagagcaaagaggatggcaaaaccagaagatctgctgtcatgaggggacttaggtacgaaagacggtgcaacaggccacggcagcaacaaccttaagaggaatagtaatatagttggttttgatttagaattttttattagatcttatctctttgagtttgttaggattacatctctgtaagagctacttaagcagattagcggcaaagcaatagaatcatgcaattgagatcaatctagtctattttcccctgccgcgttcgtgcgttgcctatcacagctccgccgcgccgacgaggtccagggccgcgtcctgccaccgccttcaaatataatcttcgacgtattcctccttccaattctctagtctgtgacatctgcccgctatgctatgtacaggatgagacagtggtccacctattggcgaaatgtagagtcacaaagaggatatgggccgagatccagagatggaccagcagtgacttacaaatgaacaaatgggacgactgccactctactgtgctttggtggaatctcgtgcttgaagcccccaataacccccatcgaccactccaaacgatggtgatcctagtttcatgggaaatatgatgcgagtgtaacgtaagaatcttccgcaataccatctcaatgatagcatcaatcttagctaagattaagaaggaagcaagagcatgggtaagagcaggagcaataaagctccatgagtttggaattttgggagatatcacctagttttgttctcttccaagtgtgtcgttgttgactagccctgtacatattgttgtataattttctccatctctatctctactatctattatattattaaaggaatggaaaaaggagcctccacgttcgctctcatggcctagaaattctcatattaatcggagaaaaagaaaaggcagagtccatatagaaatacaatttagaaatagttgaaattcggaattaaaaaaaaaggaatattagaagaggagactagagtccatatagaaatacaattaggaaataactaaaattcggaattaaaaataaggaatattagaagtagagtatagagtccatatagaaatacaattagaaaataactgaaattcggaattaaaaataaggaatattagaagtagagtatatagtccatataaaaatacaattaggaaataactagaaattttatcaatatgaaacaaagtctactcaatacatgatagaaaagttacccctaatctttcacgtacataatgagcatacatgtatgttggatttctaatagtactatttggtcaaggatgttttccgattgggtgtggaataaaaggaaaaaaaaacagatgcacagtccatggaagagtccatctggactcaagttcacttagcccaaataatcttgccgtcccgctaaagccacgtgcattaattcatcttgatatcaacacctacacgacatattactgggaaaaaaagaaataatcagagaaaaagaaaagaagagtccatgtagaaatacaatttaaaaataactgaaattcaaaattaaaaaaaagcactattaaaagaagagtccttataataacctaatacgagattaattaatattcagaataataaaataaaataaaataaaatatgaaattagcaaaaaaaggaaaaagaagagttcgagtagaaatacaatttaaaaataactaaaattcggaattaaaattaagcaatattgaaagaagagtccatataaaacccaatacaagattattaaaattcggaataaaaaataaaacaaatcaaaattaggaaaaaaacagaaaagaagagttcaagtaataatacaatttaaaattaactgaaattcagaattaagtacaagcaatattgaaataaaagtacatataaaaacccaatacgagattaattaaaattcagaataaaataaaatccaaaattagacaaattaaaaagagagttcaagtaggaatacaattttgaaaaactgaaattgaaaacaaaaataaaaaattaaaagaacccaaacgatagtagttaaaattcgaaaaataagtaaataaaatctgaaattagaaaaagaaaaataagatttcaactaggaatacaatttatatataactaaaattggtgtaaaaaaataaagactattgaaagaaaagaccatctaaaacacatgacaagattaattaagtaacaggcttataaaggagtagagtggtggcggttgatgggacatctaaaaactattaataaaataccaaatagaatcctaaagacgattaaaaggaaggacgacgggcaggtcgtgaaacaatcggtcaaggcggttcccgggacttttagaaagtaaaagaaaaaccaatgataatcatattcaatttttaaaatctcaatgacagtaaaaattagaggtaacgggcggatcgtataggagtacaatggcagcgccgtcgatggttggtgagacttctagaaagtaaaaaatgaattttttttttgaagcaaaagacggcaggagctctgccggatatattagaaggagaagcagttacagaggtcaagaaagagcagaccactaggtgacattttcagttttcattttcagagatttacatatatgatgctatcaactagagctaagcacaagcctttatgtatggcgcaaaatctgaatggcatctatatttcctttactaagaaagctacttgggtggcacttagttgcttttgatggaaaattcttcgattgcgctcaagccacacctgccaccaggttataagaagtgcccctatcagttttcttcttctccttccataagttgaatgtatgattgaggtccaccattctaaaatgtttgtatcctgtagttgatttggggtctgcatgatgtccagccagctacaaacttgggaccaaaccgtgttagtgaaactgcactcctttgccaaatggtttgcgtcctcaaaagcatctgtacataagctgcaaatccaatcgcatggccaatgtcttaaaaggaggttttcagctgtgagagttctttgatgtaaaattaaccagccaaagaaccgatgcttaggttccgcttcagctctccaaagtggcataaaatttgtgttggcaactgatcctacaaactacatttcataagcgctttttgcatagtattcaccatgattagtccacttccacgtgatactatccaaagaattggggtgtaatatgatctcatgcagcttactgcctaggtgcaccagctcattgatctcatttattgaagtgattgttcttagggaagtgatccagtgattattgtgcagctcaaaggctacgcagtttgtttcctctttcctcttttaaaaaaatgaattccaacgacagttatgttcgactttgacaatcctaatgacaataaagagtaggcggcggatgggtcatagaggagtatagtggcagcgtttgacgggatttctcaaattatataaaatgaaacccaacgagacaataaactttaaaaactataatgtccaatttttaaaggttcgagcttctaaaaagtgaaaagataaacaccaacgataatcatttttattttaaaatctcaatgataataacaaagagaggcagcaggcgagccgcagaggagtacaatgacaaagtcgctgacgttttagcggaacttctaaaaagtaaaaaaaataaacctaaacgataattatgttcgatttttaaaatatcaatgaaaagagaagaggcagtggacgaccatagaggagtataatggtagtatttgatgggacttctagaaattataaaaacaaaaccaaggataataaactctaaaaactataagatcaaaattttaaaggttccaagaagaataaatagaaacaatagtagaccgagcaagcaaataaataaggatatgacagaagtaaggggtagtagctggtgtaactttttaaactataaaattagaattacaaggatggtaaggtttggtctttcaaagtcttaagacaatgagataaatatttaataaattttaagtaaaatcatattaaaaaaatatataattttgtatgggtgctagccgcgcaattgcgcgggccacccagctagttataaaaattgaagatgtttttgccggaattttggtacgtcatcagtatttaagtcggtttttaagctcgttcgtttttggaaatacaaatccatgtttgagtcggattttaagttcgtttgcttttggaaatataaaaaggagtcgcataagaaatttctttaaaaaaactcacatgctaacttgagatggaagtcggactcctaattgtagctcatgattttataaaaaaatatccaagcgaattcccacagcgaatttcatcgtagctaatccacataacaataataagattaaaataacattcacccattgcagcgcacgggtattttttctagttaatatacaaagcaaagcttttgcgctcctttttttaaaaaaaactataggttcttaagctgcaatttctgggtccgtgactcagtgttgaaggtctgaatttctctgccaaagacagcaccaggaacgtccagaaacgattaataaaatgcatgggagaagaataatttgatgcacctgatcttctctgaacatttttccaagattggtgaacctgaagccaccaaacactgctactactgcagagagagagagagagagagcctttgacccattagtttccatatcataatactctttactttctgcttgcttactctaccaaccacatcagagttagttcatctcctccttgaccgcgtttccatcactgatcaccatggaggcctcgcctcactttgctataaagcccatgcagagtgtgagaatctacccacaacaacatctggatcatccaaagaaaggaacagctgcaacttttttggtcagaaaatggctacaggtgttctgtgctccagggaatttgctctctgcctggcttgtgtgctcctggccgtgccattgctagtggctcaggacccttcaagcctgagcttggagcactactcaaagacctgcccgaattatgagcatgtcgtccggactgagatggaatgtgctgtgcgtgcggattcccgcaatgcagctctgatgcttcgtcttcatttccatgactgtttcgttcaggttagcattcaatccattttctctcttttactttgcacagatgctaatcttgttcatctgaacttcaatgtgcgtagtgggagttgcagagttttctctgaaaaaatgtgaatatatctgttgcagggttgcgatggatcagtgctgcttgacgacactgcgaccctgattggagagaagaaggcagaacagaatgtcaactcgctgaaggggttcgagctggttgacaagatcaagcagaagctggaagctgagtgccctggaacagtttcctgtgcagacttgcttgccattgcagcgagggacgcagttgtgctggtaaacctaacgatacctatgttcagaattgtgattcataagcagtaacttatgtcagacagagtttgtcatgtgttgtgcaacacattagctcattttcgctactatcaggttcatattagacattctattcaagaaaacatgaacaggcagacatacatttcaggaataactcaatacaccatcgagaaattcaagcacccgtttcacaataactatctattacctcataaaatcattgtctccattagcatattgttttgcctgcaatcatgccagcatgtagaacttgcaagcaatcaaagaacggtgcgtattccacatcaatgttattacagaatggaaatttgtgttgcaggttggtgggccttactgggatgtcccagttggaagattggactccaagaaggcaagcctggacctagcaaacagggacattcccactgctcaacagggccttgtcaccctcattgccaagttctgggagaagggcctcgatgccactgacatggtagcccttgtcggtatgttcttcttctctcttcaatgctacaattctatcattagttcaattcaaattagcacctgccagtggccttatacatgaaaaatactttcgaaaagttgacattatatccagggtttttttttaaaggagggcaaaagctttgcctcgtatattaatagagaggaaacaaagtacacagctgtatatacagggctagtctaaaaaaacgacatgcccgcaacagaaaagagctaagtgatatccagggtgaaatttgatcatataccctcctatcccctccttttagattgaaatggagaattcaccctcctgacttacatgccagtgaaattagatgacccccaagtatgaatcaaatcctcaaattgtgaactgaaaccttgttgaatttgtgaatttgatcgaaggatcccacacaatcggattcgcccggtgcgccaacttccgggacaggatctacggcgactacgagatgacgaccaagtacagcccgatctcccagccctacctgagcaagctcaaggacatctgccccctggacggcggcgacgacaacatcagcgccatggacagccacaccgccgccgccttcgacaacgcctacttcgggaccctcgtcaacggcgagggcctcctcaactccgaccaggagatgtggtccagcgtcctcggctactccacggccgacaccgtcagcaagtactgggccgacgccgacgccttcttcaagcagttctccgactccatggtcaagatgggcaacatcaccaaccctgcaggtggtgaggtcaggaagaactgcagatttgtcaacacatgatcatatgcatgctcaatcaaaaggactgcacatttgttctttttaatttgatggctggcttgtcctagatagaaataagaaatgctttgatgatgaggcccttgtactggtacatataatacgcgttgttgtcattttgtcatcactctacaagtatgttacatggagatacacatgataaggtactcctggcttttgcacaaactttttatttatatacatgatgaggaatggattatgaattgtgatgaggttttagcaacatctttggttggtgcaccaactattgtgtacgttgacaagaaaaaaaaacactaatcttcaagcaagctggatagtactatatattactcctagatggttaaggttgtcatctcttctattgtttaatataaacttgtcatgttttagaaaagagtgaaatatatggtgagtcccatatcttgtgtggtagtgtcacttaggttcatgaacttaaaaattgcacgtttagatccgtaaacttggtttaatatatcaccctagtctactttgactatgtttgaccgccaatgtggcataccacgtaggcaacacttttgctctcagccccctcgacatcacaacatatcgcatatatctccttgtagctatataatgacaccagaatcccaaaaaaattctcaaatcgttcttcactcttattcttctccttgcatgtatggaaaaatgtgatcccgattagaaattgacattgctctgcgctccaaagtgatcttatccttgcgcaacgggcacttaatcaacaacgccttctttcggtgacttcaagacaaggacgagcttggagaatccatggggatgcctagcgtgcaagccgtgttgcgttgcctcccgccgcaaatccggccgcactgtgccaccgctaaccccgctacactgcgttgcctcctgccgttaatctcaccgtcgaggccgccacagccatgtgcgaaggtatatgtggaggaggctaagcacaaaagtgttgcctacgtggcatgccgcgttggcggtcaaacgtggtcgaaggacaattggactgtgggtggtacattaaaccaagttcacggacctaaacatgtaatttttaagtttatagacctaagtgacaccacctcacaagtttaaggactgtccatgtatttcgctctttagaaaaataaaaaggactactagagtatggaatgccatccggacgagacacttaatgaatctaattcccacccccatctccgcacattcgagctcccatgcatgtggaagtagcagcaattccttagctccttgtgctcgttggttacagcagcaagaagaggaggcaccggcggtacgtggctccttggtcggccaaacaacaacaacgtggtccctacctctgtgccttgatctagtacttgatagttgatatctgcatgtaccagaccaggtacttgatgctagacatctcatactcacaagtattagagctcccccttcccatgccttgacccggtaactaatatcaggcattaatttgatactcacaagtacttgttatcttatattcgatacctatgggtatcggccggtaccattgtaccaagcctggtacccatgtaacagaccctaaagctgatacctattagttatgacatacatgcatacaacactagcaagcatagcgatgggctagcaaggagcatgacagctttcagcgtcaccggtgtgataatctcaaggtttgcacaaagaactcgacgactctcctatccacttcgtcaactccgagccctccacgccaagaccggccgcctccaccttctagttggtgccccggaccttgtctccctccgcttcgccacctccctttccttcctcctcgcacatgacaacaccgatctcaccaccatagttgactccttccttgccgacccactgattctgatgatccccgatgccctcgccagtctccactctctcttatgcccttaaatttgggttagtatgggagaaagatgataggggatgccaccgatgttgggaagatggttgaggagtcgagagagggaggaggaagacgccggttggtcctctagtgattagggaggaggatgatggagtggatggttggcttggtggtgaacatgaagggaatcggtgggagagaaacagatctagagataaacagatctaagtcacttaaatagtgttcacccttaatttatcatgtgcctccgaggggatcctgtcttctagattttctatataaaaggaagattgaagaagaattcagtaatacatacctgcaggagaaaaatcctcaaaagcttcaagaggtggaagcttgttactgcatctcacttacaatcagtcatatatattgtttcaactaataactaaacctacaataataacactctactattattaacatcaagtatatatggagacacggaaaagtacaagtccttgtcctctcctcttgtgtttgtacagttcatctaaaatgatataaatatatacgcatcactaattagtaattaccttagtaaaatataattattactacctccatttcaggttataaaactttctagcattgcccacattcattcatatagatgttaataaatctaggcatacatatatatctagatttattaacatatatatatgaatgtatgggtaatgctaaaaagttttataatatgaaacagggaagtatttcccaacctagctagctacattaatattcagacagaaagacagagagctccatgcaagcatgctgtacaagaagagccacacaccacagctactcgatcatggtggtgttatctggggccggagagctcgacggcctggacgaggagggaggagtcgtcggtgaggtcggagaagcagcggccgaaggcggcggcgaagtcggcggcgggcggcgccgggtctgaggtgcggtgggagtgggagagggagtcggcggcggcggtggagtggccggaggccttctcccagcggtcggcgaggccgtcgccctcgagcatgcggacgacgtcggacatgcgggggcggtgggcggggaggtactgggtgcagaggagagccacctgcaccatctcctccacctccacccggtcgtaccctccgcctaaccccttgtccaccagcacctccaccttcttctccgactgcatcttcttcacctgcattttttttctttgcatcatcgtcacagtttctctacattatgccctcaacaacacacaatcacatttggtggtgttcggattaagatgtagattttactttcatttttgttagcacatttttaaaactgttaaatggtaggtttcgtgtgaaaattatatatatattagttattttaaaatatcaaataaatctattttttaagtttgtaataactgaaacttaattaatcaggagtaaatggttttttatttcgtgtaccgtaacttcatcttttatcttcgatagaaaagcacaccgctgatcttagttttgtgattgatcggtttacatggggattattcgaatagttatgaaaaatttcagtgaatattatttttacaaatttccctataaaaatgagtaaaacaatctaaaaaaattaagtacatatattgtggtgctgaacttcactctaaaaaatgtattgaaaatgcgaggctaaaattcaatctgagagaaaaaaacaaaatcaagttgcgaatagttccgcgtttttcctagccgagattttatttttctccatgcctagattgaatttaatgttgcagcatctagaatgaaataaggtataatacttgaatagttacatttgaaagttttttaacaaaaagaacttgtgacaatcttttagcaatttcctaatatatcacacattctcaattttttttagaattttggaaagtattagtgtcatcttctaactcttaattacttcatccgttttgtattataagtcgctttaactctttttctagtcaaattttgttaagtttgattaaattaatagaaaaaattagcaacatctaaaataccaaatcaattttattaaatctaacattaaatacaatttgacaaatatatttgtgcagtgttcaaaatgctactttgtttttacataaacttgatcaaattgaagttcgacttaaaaaagatcaaatcaattcataatataaaatggagggagtaatcttaaggtgtttctaccgattagaattatactactccagattgcacaagctaatcgatcaaacgaattaacggatcgaattgaaatcagtagcacatatatttacccagtccagcatggcgcccttaaatttgaaggtgtttctaccgattagaattatactactccctccatcacataatacaagggattttaagtttttgtttgtattgtttgaccactcatcttattcaaaaaatttatgcaaatataaaaagcaaaaagttatgcttaaagtacttgggataataaagtaagtaaaaaaaatattcccaaatttattgaataagacgagtggtcaaacagtgcaa

SEQ ID NO: 6023 - DNA, 27904 bp, Oryza sativa
tatgcttaaagtacttgggataataaagtaagtaaaaaaaataattccaaaatttattgaataagacgagtggtcaaacagtgcaaacaaaaacttaaaatcccttgtattatgggacagagggagtactcgagattgcacaagctaatcaatcaatcaatcaaacgaattgacgaatgaattaataatagtataaaataatacttacccagtccagcatggcgcccttgtggttggacgacttgccgaactcgagcgccgtctggccggtgacgagctccagcagcaggatgccgaagccgaagacgtcggtccggtccgacgactgccccgtggacaggtactccggcgcgatgtggccgacggtgccccgcaccgccgtggtgacgtgcgactcccggtggtccagcagcttggccagcccgaagtcgccgacgacggcctcgcacgcctcgtccagcagcacgttggcggccttgacgtcgcggtggatgatcttggggtcgcactgctcgtgcaggtacaccaggcccctcgccgcccccaccgcgatcctcctcctcgtcccccactccaacgccggcttcgctgcatgcgattttatagtagcatgtttcattaatctgcccaggttagtttttggaaccgcgtcgtcagttcatcatcgtcatcattcatcatttggtcagagtttcagagtttcagagtgagtgagggagtgaaaggtataaggtaaagatttttggtgttggtttgtgtctaattgggtatcacactctacttcagggattgaaaccggcggtttttcgggctccgtcgtggtagcttaagttaggttagctgttggtgtggtgttgtagctgtggttttcgctcagttttccctaattaactgagcattgtaaggtttgatcctgttttctccttaaaatgggatatcttcttcttaatataaaacgttggcaacggtccgaccgttcgaaaaaaaaaaaaaagaaaccagcagtttcgctgttcaggcgccgatcaccatcatttggtcagagaaattcagagtttcagattgagggagtgattcggacagaaaggtataaaggaaagaacttttttgtgtttgtttgtgtctgattgagaatcacattctacttcagggattgaaaccggcggcttcgctgttcatgcaccgatcaccgtcatttggtcagagaattcagagtttcagagttcggacaggaaggaataaaccaaagatttttcttttttttttggttgtatctaattgagaatcacatcctagctccctcagcgaacggaagcacatcaatggcgtctgtcgtcgtcacaatttgtttgcaagttaattttgaaagggaaaccacatcaattcatcatcatcatttggtcagagattcaaagtgggtgagtgcagtcggaaaggaaggaataaagctggagttttttttgtgtctgattgggaatcacattctcctcttcttctcttctcgtcgtgatagataaatttagtctcctttttttaattatctttcagggcaatggaatccaattccgagctcttatcatgctccacttgtttctttgccggcctgaactgaaagcttcagtctttcgattctgcacctctcttttaggtccggtatgatatgaaaaatccagcaaagaacatatgctgctgctgctgttccactcagatttctgctgtcatatcgagtaaagaacattcgagctgcagcagattggaggaattctaccggactttctccgtggtcattgtctgaatcttgtactgcctctctctcaaaatgagttattttactgttcttaatgagatattgagatgtactatatttttcagtgtaaaatttggtatatatacctaggagttacggaaatttgcaataaattttggtacattttcatacctctcaaaaatggtaaaatttatctcttaaaatatagaattctagtagtagatgtgatatatcataatacttcaaatctgaacataatgtctgtttcaatttatagtattataatgtatcgcatctcgtactattttactttgttttaaaatagagagagtaaaatatagcaacttagtactgagatgagacatatcctaacatcacgaatctaaacagaaaatctgtttgaattcatattattatgatgtatctcatctcgtactggattgttatatattttaggataaaaaagagcaattcataatcttaagaagaaaaatagatacagtactagaaatattaatttacgaatttggtttggttacctttgaggcgggaggcgacgctgccgttggacatgaaggggtagactaggaggcgctcggtggcggtcatgcagaagccgtagaggcggaggaggttgcggtggagggcgaggctgatcatctccacctccgtctggaactgggcctcgccgccggccgcgttgccgtccttgagccgcttcaccgccaccagcgtcccgtcggggagctgccccctgtacacgttcccgaaccctcctttccccaggatgttcttcccgctgaacccctccgtcgccgcctgcagctccctgaagctgaacctcttcacgttccccaggttcacgttctcaatctgctgctctgcaattttttattttttttcccaaccaaaaccaacaacactagtctattaacattaatactcaaatttattagagatgtaataccccttgtctgaattcaaaattggagtgatttaatttatggtcctttggaaggtaccactagcgtgaatgttggtgggtttttattattcagatgtcatgagatatcaaattttatattaaaatgttgtgtacaccctatttgaaatacgatttttgcgtgaattattgaggcagattttttatacttatttaacacaataaatcaatattttgagaaataaacttcacaatagtttagaacaggtgaatatgacagcagaagttttttttaaaaaaaaatctaagaagcatggagcgaataatccgtaccaaaaatcttagacaaaagctgacaataatttctcttggaattaatgacgaaatgcaggttgttttggaaaaagattgaggttaccatcgacttcgaagtatggatgaaaacggagcggatacggatggataatgttcataccatattcgttttcatattttttaccggatacgaaaacgaatacggaaacaaatacggattatctcgaatacgaataagaatcgaatatgatcggacacgaatacggaaacaaatttttctcggaacacgaaaaccaactcaacttctaatagaaataaatatcaacatatataattagctcattttatataaaatgaggtataatttataaatattttttaaaatttaaataatattaatagtatggactagtgttaagagataaactactattaaaatctataaaggtatattgaaggttatagagttagaaagaaatagggtatgtctcatgggtcctgcggatatccgaatagcactgttcaccggatatccgaattattatccgtatccggcggaaacctgataccatattcgtattcgtatccgggagaaaatatccgtattcgtatccgtatccgaaatatccgagaattatccgatccgaaaggtatccgtatccgtttttgtccggagcggacggaaactatccgctccattttcatccctacttcgaagaaggccctagcgtaaaattaaggtattacaaggtaccaaaaagcttagaataaatagtcttttttttacgaaaaatcgtttttttaaagaagcgtggagcaaataatccacaataaaactctagacaaaggcctgaaaataatttctctaagaattatggatgatgaaatgcaggtaggttagctgcgagaaaagactgaggtttaccgtcgacgtcaaagaggatctgccggttgcggcggtggcgccaccagaagaggaaaccggcggcgaggaggaggaggcccatgcagccggcggtggagccgaacgcgacggcgaacttgtgccccctgtccctcgccgccggcggcagcgcgccgccccgcgagccgttcaggctgtagctcatcggcatcggcgccgtcccgtagcaatcctgctccctgttggcgtcgcagatgaggggattccccactatgctgcaagaaaaaaaaaaccatgcaattgttgatgaaccaaaaaaaattggaagattttttttcttcttgttggaagaattgatgaacttgaaactgcagccttacttgtaagttcttgccaatgattctggaatcgggccactcaggttgttatatgacaaatctctgaagaagaacacgagtgtatgcagagtgatgagacaaaccaaactgaatagtacacttaaaagaataagttaatatagctcaagaaagagcagggcaagacaaagcatctctgaataaatgacacaagtaagcaggttgagacaaaatcgaactgtttaattgcaacaacccaaaactgagatgaatttactcacaggaaaacaaggtgtgacaggttagctgatgcagaagggaatggaccagacagggtgttgttgttgagcctcctgatcaaatttcacagcaacagagttaactcaaacttaattaacatggcaacaaaaaaacggagaacaaccacaataactatgtgtagatatgatatgatactgctacatatctagatatcataatcaagaacagtgtgcttataattatctttactacaaaataaatggaacagtattcagaggctttgaacagtggagctctcgactcacaagtactggaggctctcgaggtggcccacagagctggggatttcgccatagaagctgttgctggagagatcaagcgtcttgaggttctccagcctgccaatctctgctgggattggcccggttatgttgttgttctgcaggagactgcacccaccagcacatcaaagaaaagagacactctgtttaagtacaagaactgaccatgataaggctatggattgatgtgaagtagaagaagaagaaagaacactactgacacagtctcaagattggtcaggttgccgatgcttggtgagagcaggccagagagatgctggcttggagcttccctgaaaaaacattcagagtattcagacaagcagcagagaagagaagagaggtgagattgagattgatactgtgaagcaatggaaggtgagagctaacatacaggccagtgacgaggaaatccggggagcaggtgatcatggcccagctgcaggggtcgacggagttctggtcccagctcttgagcacgccatgggggtccttgagcaggttcttgatcacaatcagagcttgcactgccaatcaaccagccaatcaatcaatcagcacacgcccaaatgcaagaaacgatcagaggaaacaagagagaggaagggatgaactgaactgaaccttaccttcgttgttgacgcccttggcggagaggagggcggcggaaggggaggaggaggagaccacgagcagcagcaggaggaggaagaagggcggctccattgctgagctcaggtaggaggagacgacgaagctagcaagcaaaccagcaactacaacctcaggtggtcaggtcaggtgagctctttcctgggagaagaggaggaagaagaagcagtggctgcgtctgcgcgtgcaatgtgtgattgtgtgtgtgcgctcgaactaacatggaacaagcgtgaggccaaggaaagcaaagcagcatgcagcttggcattggcattagcagtggcaggttgcctctcactctctctctctagagactagagtctagtctctctctctctctctctctctgtgtgtcttggccgcgcgcgcgcgcagtcacaccacacgcgggggcaaagccaaaatggcagagggccggggggatggggccgtgtcagagggggggcaaatgacacaaaaggcagagaaggggagagagatgctgatgctcggcttcgctcgcgcgcgaaatggagggatggaacaaacatgcctcctgcgatgcgatgccatgccacccgagctgagcgagacctgactgctgtagcctactggagtagcagcaaacgggatcagtaaaccatgggtgtttttcttctactcttcttttttttttctctctgtctctctctatcctcttttctatcctgggagcttggccgtttgtgtgatgaagtcacaaggtctgttagattttttgtacgcgatattattttttcttttgcgattatacaatagacatgcatacatcactacacttgtaataccactcatacactcgtgaatgtgccttcgctcaaagaggcgaaaaccactggatttttgtgctgacatcttttttttcaataaaatctttttttaaaaacagtagacggtaggagatctaccggatatattagaagaagagagttgaccctgtttataaggaaaaccgggcccaaaaatcatataactgcacagtttgctaaaggaaaaccggcaaaaccttacacagaagacacgaaaagcctgcgacaaaactacaaaccacagaagtgaccaaagaaagagcaagaccttcaaagcgaagcctccaaggaggtgaacaatgacagaagccgttgccgacgctcgcccaaaggattgggcttttcacccgaagggggagagagtccacaatgcaacacctctaaggaggaaacagcgcccgcaggcctcgatgttgccgatcctggaagaccagataaggctttcgcctaagactccctcaaaggggtagaacctcttagaaaccagagccagagtgataagtgttatcgtttcccggctcatcggctggacccaatgcagcaggtccgactccgccttaacacaaaaactctagcaacatagaagacaagcaccatgctcaaaactcggcactacgacaggttcacacagacacaggacacttgaagcaccggcgagacccaagagccctaacaacagacagactgaaccacgagcacggctgaacacttctcctcaactaccgaaaggctccacggccgggtggaggcggccaaaagaagggaggagcccaaaggagtgaaaggagccgtggccgccatgaggaggacgtgagagctgaagtcaggggcaacaaggaccacgttgtcttccatgattccggcgaggaactccggctattgcaggacatttcttacgactgcagcaaccaccaccaactttaccaccagtgcagagagggggacactggggtgagcagaagagcaactaaggagtgttggcgagaggaagggaggaagggatgtggggagggggaggaaggaaatgggggagcgggattcaacagctaccggcgaagggtggccggaggaagagagacaacacagagaggaacagagaaaggaggagggcaccaaggaagaagaaaaggtggttgtaggggcggcgtctgcagatgccggcgacggggagaggtgaccggaggccagactcgccgactcccagcgagagccccggaggaccgaccaccaaagccgactggcgccgctacgccgccacgcggacatcggcaatccgccgcccacgcaccggcgcccgcaccaccgcgcgtgtctgccgccttgcacggctgcgcaagccgcctttgcgacggccccgccgcctcacaagccaccagacgccgcagcggtcgcctccagccgcgcctcctccgcttcgcaccgccccacgacaccaccgccgcaggcgcactgcccagatccggtgacggcggtgccagatctgccgccgcctggccgggatccctcgccgtcgccactcctggccgccggcgaaaatctccacctcccctacgcctgagaggggggcaccaccgcggagaaagccccgccgccgccttcctagctcgccagccagctttgccggcggtgaggtgaggggagacgaggggggtcggtgccagcggtggggttcgccccctatgtcgcctgcgtgtgggcgacgcgggggtttgcacaccttagtcaactagattttgatccaatggccgaattgtcattttctacttccagctaggtgaaggcaaagagatggtgaggaggactcaccagcgatattgacagcaacttcctcggcaagcccgatgcagagacgtctttcacagtaatggcgacatgttgtatctctgtcaaggaccgccagattaggttttcgggtttaggaggaggtaggagggggtaggggatggtgagggagggtttagagggaaggccagggtagtagtgggaagcggagatgggagggcggagaggcggcaacgtatgagctgtgcggatggacgacactgggtggggtcgatagtatgggcgagagagtacatgtggttagaaggtaggggcagtcgttgaagatgacgaagtaaatgtggagcaggggaaacacacacaggagctaataaagacggagcaatggcttcgacgcaaaggaggaaaggcagaggaagggcaaggccaatgggcatcattggtgctggcaacgcggagacaatgcacggagggtcagggagtggagtacatgcggtgtttcgtagtcgcaaactcatgacgcagctaggggatttgtttagggtgaaagaagatgtgagcattatggttatgcgctagcatgaattgtgaagtaatgcaagccgtccaaaatatgcagatagttagccaaaaataaggtgattgattgatagacaatcccttgtatatataattttaggttgtttattccttttttactatctattgatcgttttgaagattctatatatcgattttagattcgtgcagcttttcaaaactctattttgtcccatactctctccccggcgcggttttcctcctagctggtacggccactcgtcaaaccttgtattctaccttttgccacccatgaacccctgtcaatctagtggtgaagccaggatttaagtacgagggacaattttgtaagtgattctgattaaaaaatgccgtaaaaagtatatgtgaattccaaggttcccaataggtaatatatcatatcaacggaaaaaacacatggtaatttaaaagatcaaccggtatatttattcactttaatttacccttatgagcaaacagataataagcagcgataataccattcgaggtaaaagcagacaaaccacaaaatacacaaaaagctagattacggcaaaatgagcaacaaactatctatcttttgcaagtattaactagtattttagatattcaaatttttaaattgaaatgttagccacctaatgatgtataaaaattaaatacacatgattatcaaataaaactcagtattctataaggaaaagaaaagtgtagttgatatgggcttatggctacggtaacaaccctttgctgcttttgatcagggattagttgccatattcttgctaaacatatgttcatgtcatctgaaactaacctagcttaaccaactaatcaattggcagaatttttttttcgcatgatcagtaccacatttgttagtttaactttggtgaaaccaaattataaggatttgtccttctaatcatattactcccatgttaattttttcacacgaaacgagaacgaaagtgtaaatgggtccacccatcgaataggccgggttgtgcagttcgggaggacgtgttgttacactcagccccttcttcttttcatttacctccatggtgacatctccgtaattcatctccgctggtgatagatgcctgatccactggccgccacctgaccacatagtcctctacattcttgcctacggcttcacatgttgccctcatctagatatacggcttcacatgttgccctcgtcttgttacccatcccctttccttctaccgaaagtatcaacaaataaaaaaaatatccactttaacaaatttgactacaaaggattttttttagataatggactacaaaggaattacgtatgtgatcctctctcttattaagacaggtagttacataaattatacgacgaagtgattagatcccaagagacaaagtgtttgtggtggtggttcgaacgacgaccgactcacttaactctgttttaattgtaggttttcattaagagatttgtaaatcacttatatatatggagcatcctataataactcaccttgtctatgagatcgaactaccaaatctgctgtgcaagatcaaactgatctaccatatagtggtatctttagtcacgaccgagatgaaaagttggcggaccatatcatttctcgttaatttggccaaaagtaattaacacgagttgaccgcacgcataaagaccttatttggtagcccaggatggcaatataattttcccccgtattaaaatcaaaaccaccatttgcccccataaaaaaacaaaatttgctagaagacgtctaaaatttgtgcagtttgctgctggacaccttgaaaattgataatttattggaggacactttcgggcgaattaaaatgagaaaagtttcaaatatatgagaataccctggggccacgtgcttctaacatggtgttgtagtgaaaatttagaaactatacaattataaaatctaccattacctaaagtacatcgctaacatgcatcatattccatgttctcgtcagccttaggttaaaagatattttagccctaaggatattctcatcttttcttttaagaatttttctttttaatcaggctaaaatatatactctagcaaattatcagttttttaacatattattcaactataacatgtttttacgatgtccaccggtaaattattcaaaattctcaaaagtgtcttgtagcaaaacttatcaaaaagaaaaaaggcacaactttattggattgtgcatgtagccatgcccacgtaccgtttgaagccctataattgagggttctctttgcaacaaaaggatcgccaaaggtgagtcgctgttgagacacttgcctcgagaaaaagcttgacacaaactcgatcacagtttctacggaaatggagggggccaggaagaaaagccatcatccatcatcaaagggtgaagcgaaaagcgtctttttagagggccggccggcatggatgatgactgccgctggccccggcggcctcaccctgagaactcaacaaagcccaaatggagaaagatatcaaggggagaattttggtctgtgtatttggttactactccctctgtaatattggtttgatcattcatccttttttaaaaaaaattatgtaattattttctattttattttgatttgatttatcatcgaatattctttaaatatgacttaatttttttatatttacacaaaatttttaaataaaacgaatggtaaaacagtgtcatatattaaaaaatgaaagtagtagatgtgttcctagtggatggagaatccgagcaagaaaggccttgtaatcatctccaatagagaaaaatgcccagctctcaagaaaaaagaaacgatctcgccacgtaattgttgcatatggtgctatttgaaataggattgtatatatttgttgtatacctcatcgacaggcctttagcttataagccgcagccaaattcttaagctgctcttcttcttcttcttcttcttcttcttcttcttcttcttctttccattttcccattttctaggtttttttaagattgttaagactacaagttaaacgtcttaccctaaaatccttttttttttggcctagaagccgtatcctaatttctgaacacgcattgtactttctagatgtttgtagctagctattgatctactagtatttcgttgcagtttgatcccattctctgtttgtggtgataagctgaaaatgactgctggtttgtgggatgagaatcgtgcactcgtttgtacaaactcttttgtttgcaacttggctccttatcctcccatgatcctgcttctcacccctctttgatagacacctgccgccctattgcaggcactagtacctgcaaaaaatatgttaaaagtttttgtgaagcatataatgatttgtccacatgctacgcactttgagttggtggttttgctttttttttttttctgattctccatgcgagctccccgaatttgattctgcgaggtcaagtcttgttcatctttttgtaaaaaaagaactggattttttttttaaccaaagtgcccgtagccattgtgagttgtctccgaatcgcgaaatagaacggaataatcgtaaaggaggtagctcaattctcgtagacgcaatattaccaaacttacgcatttcacaatggttcttattaaagtttagaggcaataatcatggtgatggggttttaaaagacttctttttggatgcaggattttaaaaggaataaaacatagtagaatgtcataccgtgtgccggtttgttaaaaaaatagaaagggaatatctatatttatggcgccatattattcaccaaaaaatagtcggcatgtatttacattgtaagttcctaaattacatatgtaattttagtgtatttgcaatgtaagtcttgaaattacatatgtaagtatctaaattacatatgtaatatatcatattattaaaggaatagaaaaaggagcctccacgttcgctctcatagcctagaaattctcacattaatcggagaaaaagaaaaggcagagtccatgcaggaatataatttagtaatagctaaaattcggaattaaaaaataaggaatattataagaggagactagagtccatatagaaatacaatttagaaatagttgaaattcggaattaaaaaataaggaatattaaaagaggagactagagtccatatagaatttcaattaggaaataactgaaattcggaattaaaaataagaaatattagaagtagagtatagagtccatatagaaataaaatttggaaataatagaaattcggaattaaaaatgaggaatattagaagtagagtatagagtccatatagaaatacaattaagaaaaaaaatagaaattcggaattaaaaattaaggaatattagaagtagagtatagagtccatataggaatttaaaactaactaaaattcagaataaacataataaaattaaaagtagagtttagagtccgtataaaaatacaatttataaataactaaaatttaaaattaagaaaaacatgggaagaagagtttaaagtcaatataggaatagaatttagaagtaactgaaatttgaaattaaaaattaaagaatattgaaagatgagtttatatagaaatacaatttagaaatagctgaaattcggaattaaaaaataaggaatattagaagagaagactagagtccatatagaaatacaatttagaaatagctgcaattcagaataaaaaaaataaggaatattagaagatgaggctagagtccatatagaaatacaatttagaaatagctgaaattcggaattaaaaaaaaggaatattagaagtagagactagagtccatatagaaatacaattaggaaataatagaaattcggaattaaaaataaggaatattcgaagtagagtacagagtccatatagaaatacaattaagaaaaaaatagaaatttagaattaaaaaataaataatattagaagtagagtatggagttcatataggaatttaaaactaactaaaatttggaataaatataataaaattaaatgtagtgtttagagtccgtataaaaatacaatttacaaataactaaaattcgaaattaagaaaaatatgggaagaagcgttcaaagtcaatataggaatacaatttagaagtaactgaaatttgaaattaaaaattaaagaatattgaaagatgagtttagagtccacattgaaatacaattagaaataataaaaattcagaattaaaaaaaataaaagatgagtctagagtccatataggaatatataatttacaaataactaaaatttgatattaaacataattaataactaacacgtatataaaatacaatatgaatattacatattagtagtttcgtaaagttattgcaaaatttaaaattatgttgtcattttaatatattagaataatataatgagaaaacatatatgctattatatgaaagaaaatataatgatgctagccgcgcaatctgcgcgggccactatgctagttttactgtatttacgatgtaagtcttgaaattacatatgtaagtatctaaattacaaatgtaattttagtgtatttacaatgtaagtaccaaaattacatatctaagtcctaaattacacatgcgtaattactgtgtaaatagagtaattacattcgttgatgaccaacacgtttcatgcaaagcaaaaaggagtcgggagcaagttgttcgatcagcttatcagatgtactttgcacgaatcatgaagaagattagatggcagatcgtcaaactggctgtatttagcccagaaatatgtcggcataattttagcaaagccgaaatagaaaacacatgctccaaatagccatttcgatggcacacacgaaaaacatataaatctgggcatagaagagaaaaagaaacatgagacatgaccacatgtttgtctctccaaaattcctattgaatgtccattctgtaatatttttaaaggaatttttagagcaaattctttcttttaaagggctctaaggaattttatctatatgattcaagtcctccagaaacccttcaatttttctttgttccaaagtcaaggaaagcccttctttttttacccgccaaaggcctcaaataaaccaatatcaaattttgcgcttttagttttcttaggttatgctctttccagcgagtttccaacgcacctctctcgttttccacgcacacgcttttcaaattttgcaaaaaaaaaaattatatataaaagttgctttaaaaatcatattagtccatttttaaaaaataaatacttaattaatcataagaaaatatgtcgctccattttacgtgcgagggaggtgagttcccaatctcaccttccgaaaacagccaaggccacttgctgcaacagttgaccaaattggattagggtgaccataatctggaacttcatgtattcctcttctagaaccataacctgaacatatgcactcaaagttgtccttattccattaattattttaaaacatgcaaaaaatgaaactttgttgaatcgattactagtaataacttcactcacaaagattgattctgaattgattttaatattttcagcctttctttttttggggtgggggaggggagggtctttttccacctctcacttcctctatcaattttgctcatctctcttttgcccctattcaattctcttttgccattaccataataccattggtcaaagttagttcaccataagagtagcccaaaaaggctattatacccttaatccgttatgtaactaaaattataagaaattccaaaaaaaatatcaaggaaaatgtaattatatatttagtttttaaaggttgagtaaacaatttatgatggaccatttcagttagttcaaaatatttataattacagctaaaaaactatttaaatataaattatttttgcttatccacatgtaatgtaagcatggcatacctcacaatatttggaacaaaaaatgaaatagcgatgcacatcccaagtacaattatttcgtgaaacatttaagaaacatatcaatcccaagatgcatttttaaagaggtaataaatataattttcctttttagttattttttctgaaaatttaatacattttaagttcccataatttattttttttatgttttgcgttcacgaaaaaattttcatgctgttttatggtatttgctaaaatttgaagtgtttttttttttggaacaatccttcgggcctagtaaataaaccagactgggctgatggttgaacccgaaaaaaccagaaccaccatccttgtggggtcggtttgctacaaagactagacatgcaatttgactgctgcgaatcgtgtgaaccgaaccaagcaccgctaccaaccagctagcttgctcatgccaaaaaggggatatatgcattgtcggtgatatgggaccgggagtatcgtgactagaggcttaaggcagacacaatcgcccacgtggcctggcaccttcggggacgtcgggcccgagggtgaggtgtccgccctcctcctgatttccccgagggggggggtagggtgactccagcctcgcccccgagggccgaggcgccccgacccctcgcgttttttactccacgtgtatgggttaggtgagcacagcagggctcacctaaccgcatttattgcgcctcggctaagcgtgtcacgccgcacgaagtgcagtgcagtgcactcgattatccggtctgtgaccagtcacagaccggtcaaatcgcgggttaggtggcgacaggcggtcagacgcatgcttcgccccatcctgtctagacgagagcttctaggcactcgtccccggctggagctagcgtgttacatcccagagatgacacgttagccccgatcgatatatgccaggcttcatcctaaccattacaagcaagatgttgtttgaagaagggcaaacatgcacgttgctgagccgacgtgtggtggacaagaatgaccgatttgtgaccggtctgacactgctcatgtcgtcagtacacagccaccttcccacgacgtgcccgcctcaggcagaagtggaggtaggtatgtgccgtcccgtcaggaggatgttcggaggacgaccgtgcaaatctccgtccatttatgaaaagaagaaaagtccagtttggaaagggaggggtgcatgtggtatccccttgaagtataaaaggaggaccttgcccatagagaagtgggttggttgattctttccagattcagagcctagaacgagggagaggtcggctcacactttgtagttccttcatacacagatccaccaaaacacaggagtagggtattacgcttttcagcggcccgaacctgtatacatcgcccgtgtctcgcgtttcttcctagctggcgatctttccacataccgagagagcttgagatttcaccctaagcccccggccgaaccggcaaaggggggcctgtgcggtctcccggtgaggagccacgagctccgtcatctggcgcgccaggtagggggctcagtgtgtgttttctgagctctcgtactcctccgtgtgcgccaagtttttcttgttcagcctaatggccgagcaagcaaaggtgcacgacctctctccgagtgcgagcggcgacgacggggagccaaacccacgccgtcgagctcgtactcccccacctcctccacaccaagatcctaagcagggggaggcgctcgagagggtcgaaaaatccgcagcatcgccagtcgcgggtggtgcaggagaacggcgagatggggagcgtcgcctcctcgtctacggcaacggcagcacgcctcagggcgcgcttcaggctgttggcgcgctcctacgtcacccgcccgtcgtccctgacccggagtctccagcccagcgatggctggacgacgtggccaacttggtcatgacggcacagcagcgcctgggtgctggtggacggtccgccaccaccaagacctccggcgccgccactaccggctccgtgtcgtcaagacggagggcgcggcgagcggcggctgttgcacaccattcggctgccactccctcgtcggcacctccgactcgggaggatcagcatggagagccggatgcccgcctcgacatcgagcgccggcgtaatagccggcgtactccccgcgcaacggagggcgcctcttcgtccagagtgtcacctcgacatggacgtgggaatcagccctccgtgcccccggttggtggtgttggctgtagagccttcgtggcgagtcttcggaatgtccgttggcccccaaggttccggcccgccatcgccgaaaaatatgatggcagcgtcaaccccgccgagtttctccaggtctacacgaccgggattgaggccgccgggggtgacgacagggtcatggcgaatttctttcccatggccctgaaggggcaagcacggggttggctaatgaacttgccacccgcgtctgtccactcctgggaggatttgtgccagcagttcaccatgaacttccaaggcacgtatccgcgccccgttgaggaagcggacttgcacgctgtacagcgaagggacgatgagtcgcttcgatcgtacattcagcggttttgtcaagtccgcaataccataccatgcatccctgcacacgcagtaatctacgcgttcagggggggtgtgcggcacaaccgcatgctcgaaaagatcgcctccaaagagccccagactaccgcagagctttttcagctcgcggaccgagtggctcgcaaggaggaggcctggacttggaacccctccggttccggagtggcagcttcggccgcccccggatccgccgctcagtcagggcggcgtgacaggaggaggaagaagaggtcagtccgttccgacgacgagggtcatgtcctcgccgtcgagggcacttcacgggccacccgaaaggggaggcctgcgagcgacaaaaagaaggaggccagcgttcccagcagggagcgccctaccggcaagtggtgcaccgtccacaacacctccctccatgaccttgcggactgtcgcgcagtcaaaagcttggctgagcggacaaggaagtgggaggaggagaggaggcaggagcgccgggaaggcaagtccccggcggttccttccggccgtcggcgaagtgaggccaagcagaaggcccccgccgaggacatcgatgatggcgataatgacctaggtttccaagaacctggggccaccattgccactgtcgatgggggagcgtgtgctcacgtctctcgccggagcctcaaggccatgaagcgagagcttctggccgcggcccctactcatgaggcgacgcgccgggcgcggtggtcggaggttgccctcactttcgaccggaccgaccacccaccgtgcgtcgcccggggagggcagattgcgatggtggtttcccccaccatctgcaacgtgaagttggggcgtgtcctcatagatgggggagcggccctcaacatcatttcccccgcagcttttgatgccatcaaggccccggggatggtgctccagccgtcccaaccgattatcggtgtgacgccggggcacacatggccgttgggtcacatcgacctaccggtcacctttggtggatcagccaacttccgcacggagcgggtgaacttcgatgtggcggacctcagtctgccctacaacgcggtcctggggaggcccgcgttggtgaagttcatggcggcggtccactacgcctacctccagatgaagatgccgggccccggtggccccatctctgtccatggcgacctgaaagtcgcgctcgcttgcatggagcagcgcgcggaccacctcgctgctgcgtccaagcccgagggtggtgacgagaggcctggcacctccgcccccaccgccccgaggcagcggattgtcacatgcgccgaggtcccggtcaaggaggttgccctgggcgacggcccatccaagaccacacggatcggtggtcttctggatggcaaataggaagacgcgctcgtctccttcctgcgggcaaacgctgacgtcttcgcatggagaccggcggatatgcccggggtccccagggaggtgattgagcaccgtctcgccgtgcgaccgggcgcaaggccggtccggcagaaagtgcggcgccaggccccggaacgtcaagccttcatccgcgaggaggtggcgcgacttctggaggccggattcatccgcgaggtcatccacccggagtggctggcgaacccggtggtcgttcccaaggcgaacggcaagcttcggatgtgcatcgactacaccgaccttaacaaggcatgtcctaaggatccttaccccttgcctcgcatagatcagattgtcgactccacagcggggtgcgaccttttgtgttttctagatgcatattctggttaccatcagattcgcatggctagggaagatgaggaaaaaactgcgttcattactcccataggaacttattgttatacgacaatgccctttgggttaaagaatgcaggtcctacttttcaacgtactactcgaatttctttgggtagccaaatagggcgtaatgttgaggcttatgtcgatgacttggttgtaaagacgcgcaaccaagagactttactcttagatctagcggaaacttttggaaatctccgctccgcccgcataaaactgaaccccgataagtgcgtgtttggtgtacctgcgggcaagcttctcgggttcttggtctctgcccgaggcatcgaggccaaccccgagaagatacgagctatagagcggatgcgcccccctagcaaacttagggatgtgcaatgcgtcaccggttgcattgccgccctaagtcgtttcatatcgaggctgggagagaaggcgctacccttatttaagctcctcaagcgctcggggccgtttacttggacggaggaagctgaacgtgccctcactcagttgaaggcatatctcagctctcccccagttctagtcgccccggggccaaatgagcccctactactctacttagcggcgaccccccaagtggttagtgcagcgttggttgtggagcgcgatgagggcaatcctcattccgcgcacccccaccctgtgctgacttggcccgggagcgagcagggaggagaggcccccgagccgaacggtggcctaaggcccctggcgaccggagtcggccctctccccgctcgtcagatggtgctgggcgcccccgaccctcaggaaggccccgaggccactgcgggaaggctgcacctatcgccctctgaccccgaggctaaccctgtaccgattcgacccgggaaggagcagggagaagaggcccccgagccgaacggtggcctaaggcccctgacgaccagagttggccctttgcccgcttgtccgacgacgccaggagcccccgacccccaggacggccccgaggccactgtgggaaggccgcccctgtcgtcctccgaccccgaggtcatcggcacagaagacgagtgcgccccgaggggccacttggacgaggaacgccccggggatatggcccttagcgaagggaatcggccccaccgaagggtgcagcggcctgtctactttgttagcgaggccctccgggacgccaagacccgataccctcaggcccagaagatgctttacgctattctgatggcctcgaggaaactgcgccattatttccaggcgcatcgggtcactgtggttacgtcttaccccctcggtcaaatcttgcataatcgagagggtacaggacgagtggtaaaatgggcaatcgagctttctgagttcgatctgcactttgaaccacgccacgctatcaagagccaggccctcgccgattttgtggcagagtggaccccggctccagagaccgtctcaatccccgaggccagcacggacccctctcagctgcctcacaccgcccactgggtgatgcagttcgacggttctctgtctctccagggcgccggtgcgggggtcatgttgacctctccgaacggagacgtcctcagatacttggtccgtctcgactttcgagcgactaataatatggcagagtacgagggactccttgccggactcagagtggcagctggactggggatccgccgcctcttggtgttaggcgactcccagctggtcgttaaccaggtctgtaaggagtaccggtgctctgacccacagatggacgcttacgtacgccaagtgcggcgtatggagcgccattttgacgggatagagcttcggcatgtacccagacgggataacatggttgccgacgaactctcacggctcgcgtcctcgcgagcccagaccccaccgggcgcctttgaagaaaggcttacccagccgtcggcgcgacccgaccccttaggggagacggatgcgcctgaccggcccccgaggcccgtcggagtccaggcctcgggacccgaagggagcgctccaagctcccttagattgattgcttggatctctgagatccaagcatacctcacagataagactctacctgaggaccgtgaagggagtgaacgcgtccaacgcatttccaaacgctacgtgctggtagaagggaccctctatcggcgcgcggctaacggaatcctcctgaagtgcattcctcgggaacaaggcgttgagcttcttgccgatatccatgaaggcgagtgcggagcccattctgcctcgcgcaccctggttggcaaggcctttcgtcaaggattctattggccgactgccctcaatgacgcggtcgacctggttcggcgatgcagagcgtgtcagttccacgccaagcaaatccatcagccggcccaggcactgcagaccataccactttcatggccatttgctgtctgggggctcgatatcctgggaccgtttaggcgggccccgggcgggtttgagtacctgtatgtcgcgatcgacaagttcaccaagtggcccgaggcttatccggtcatcaagatcgataagcactccgcacttaaattcattaagggcatcacggcccggtttggagtgcctaaccgtattattacggataacggcacccaattcactagtgaactcttcggcgactactgcgaagacatgggcatcaagctctgcttcgctcacctgcccaccccagaagcaatggtcaagtggagcgcgccaatgcagaaatcctcaaaggccttaaaaccaagaccttcaacattctcaagaagcacggcgattcatggatcgaggagttgccagcggtgctctgggcgaaccgaaccacaccaagccgagcaaccggggaaacgcctttcttcctcgtctacggcgcagaagcggttctcccatccgagctcaccctgaggtctcctcgggccaccatgtactgcgaggctgatcaagatcagcttcgcagagatgacctcgactacttggaagaacgaaggcggcgtgcggccctccgagccgcacgctaccagcagagcctgcggcgctaccatcaacgccacgtccgggcctgatcactctgcgtcgacgacctcgtcttacgccgcgtccaaacgcgtgctggattgagcaagctctcaccaatgtgggagggtccgtatcgagtgatcggtgtcccccggccgggctccatacggctggccacgggcgacggcactgagctgcctaacccgtggaacatcgaacaccttcgtcgcttctacccctgaggggggggtcgagtgtcaggttttggctcgggccaaccccgcacccccctcgggcgtgcagggttggccgggggctaccacgcatgcacattcttatttctcttatttcagcatttcaataaaagcagtttcaatttcctaaaggttgtgtctgtgccgttttttccttttgaagaatcttgacttgaaataaggtcactcgtgctcagccttgccctcgggggctcggttcggtcagctaaaatcgccaaacggggcccagaaccgagctgtgccccggggcgtggtgaactccgggggggaatcggcaaaaacccacaatcgggtcacccataaccctcggtcaccacgttcccggcctggccagtctcgacatgtggatctccccaggcactagccccgacccgagccattagaggactgggacttgggcacgagcccttaaatcaagctaagacacaaaaagaggatcacggcacagatcatcctcatctcattcgcatagcaaaataaaattaacacaaagaattttttcatcattttttattgcagattataagttgatttatacaaaaaagaggcatgaaggccttagaagaaagaaaaagaaaaaactggagtctggagggggcctgggggctcagtccgatgcgcccgggtcgccggcctcgtcgtcacgatcgtctgcaccgctggcatcgccctcctcgtcggagttgggggcgaacgcgagccgaggggccgacccctcgaaactgtggacgatgtggtcggcggcatcccggacccgcgcgcgcgcgtcgtcctcggtcccgggagggaactcttccagcgccacccatggagagaagttggggtccctggcctggtaactcgctagtacgagttcaaccgctccttgggcgaggtccctcgaggatgacttgatggtcttctcgagctcctcggggagttgttggagagcccaggccatcttcgtgaggtgcggagcgaggccttccaggttggtggggtgtgtcattgactggcctttccagaggcccgcttgccgaccggcgcgatccaggcgggagactgcatcccaaagcatgccgggccctatctcgcccgccaaacggagggcctcggcttccccggcggatgagtctagcgcgcgctgcatgtcggcgacggtgtgttcggcatctgcgaggcgggcggctaagtcgctttcgcccgcagccgccccgccgatgcacgccctcgcgtccagctctttttcccgcgcctcgagatcggcagcccgctgctccagtgcggctctctcggcgcggacggattccaaattgcggcgggcctgctccgtcagcgctgcctcacggagggacagggagtccgccaaccgttgcgcttcggcctcgacctcttcgagagctcgctcccgctcggcaagcgcgtcttcgcggaggcggagtgcggactcctcttcggcgcaggcagactcgtgcgccgccagcgttgcctctcgggaggtgacggcggcctcgcggtccgccaggactttctccgcgacgcaggcgcgctcctccagcgccatggcgcgcgcctcgagggcctcttcacgccgccggagcgccgcttcggtctccgtcgctcgctgctctcgggcagcggcggcatcaagaaccccctgggcggcgtcgagctttttcttcagctccgcctcccagttcccgtgctgaaggcggagggagtcctgcgcctcgatcatcacagtggtggcgatgagggcagccccccgctcctcctccacctctcgagcgatctccgccagtgccgtcttgcgggcctcaagatctgagacgtgccggcggtgagccttgcggcccgcttctaccatggcctccaccgagcgccgcccctcctcgacacgcgcccatgcggcgtcgagctccgcacgctccgcctgcagggcctccacttgggcgctgaacccatctagcaccgcggtgtttgcggcggccaaggcctgcagaaggggctcggcgctcagcggggcgacagaagacgaggggaagagctgccttgaagaagacgccgcgcggctcggcccgccaatggacgcgccggcctcatcacgggccacccccggacctgtttggtcctgggcgtcgcccgaaggggtgggcccaagcgaggcgtccgcggcctcgtcgtgaactgcctcggaagccgccatcgcctcagcccgggcggcctcctcccgagcggcttcctcggcttggcgggcccgggcggcctcctcccgagcggtatcctcagcctggcgagcccgggcggcttcccgggcggcctcttcagcttcccgtaggcggtctgcggcctctcgccggtcagattcccgcctccgtgcctctgcggccgccggatcttcggcctcggactggccggacttgggatggtgggaggaacgcgatgggatatcactgaagcagaaagaaaaaccagaaggcaaacaagatgggtaagagaaaacttgcttttgggatagaagaaaagacggtcgcaatgagcgtgggacgaacctgcgagggggtcggttaaatgaccaccttggaggggaaattagttttccccgggatggttctgtctcccccatcttgcgcagccgcttcttcttgcgctccccctcgggctgcgatgttggcgcggccccctccgggcgcctgctgctggcacgcaccgccccgccccctcggggaggagatgggggaggtgttcctcccagtttcctcttcccccgggcgtcggtagggcggttgctccccgagcccccgacgcggggcccagaagcacgaccccctccgggggtagattgatccccccggcggctcccacctgcgccgtcatggcccttaggagcctgctcctctgaggccccgaccgccgtcataatggtcaagatggaggcgcgatctgggtcgctgcagagggggaggataccgtgggggatgagggacgcctccacggagttgagatttagcacccgttggaccagtatcttgaagtcctcgggggcccaatcccatctgactccctggtgggtccgcatgtagtcttcggacccggtgtactcccaggcggcccgagcgcgccgctggagcggcgcaatccgacgacggaggtagtcgccgtacaccatggccccggtgagcccctgggatcgcaggcccgcgaggcggtcgaggacggcgtcatagccatcccccagatctaccggcgcccgccagctggaggcctgcgccgggggctggctcgggagtcggagatgcgcttcgtcggcgaggggggtgtagaaccagtcgctcttccagtcatcccactttttacggaggacgcaggggatgtagcggttcaacaccggcccccgcggcaggaaatagcagccgccgaccactgacggtggcgataccgactgcacggtaaagaaccactggaacagccggagagatgggcgcaccccaatgaacatctcgcacaggtgtgcgaagatgcccaatgtcatcactgcgttgggggtaaggtgcgccatctggagatcgtagaactccaggacatccatgaagaaagaagaaaatggcggaaccagccctgccattgcgaaggggagaaagaagacggaccgccccgggtagtctggcgccgggcgtccctcacccagcattactatctcacggccagtggcagattccggcatgaagcggcgcggcaacccggcctgcttctcgctcacaatgcgagaaggcggcagcacgctaccatcaagcagtgcggagccccgtgccatggcgccggacgaagagaagatgaagagcgagcgcgtgtggcgaaagaagggcgcggggaagaaggagttaggacgcaagcggcgaaggcaagggaaatgatggcgaaaggaaggagacaaatcccatcctcagtgcctttatacccttgccaacgctgtgcccggctcctcgtttctcgcacccattatttcgccccctcgtttctcgcgcccacgcttccactaatcccattcgcccgcttgcggcgcgtgagatggatatgcggttgcggcagtcgagatagatcgtatcgtgcgcgcgttaattacgctcgccgaccgaagcgacattaccgtatctccaggcgaggcaaatcggctcgcccagattcgtgcgccgctcaggtgatgtggcagtcttgaagagaccgccccattattgacagccaaattaccattaccggtgtgcatggtttgagaccgttgggtttttgcccaaccatggagaccggtcccacctgtcac

SEQ ID NO: 6024 - DNA, 66405 bp, Oryza sativa
gggggggggggcgctgcggcgtacctcttctccggcgcggacgaagaagcgatcgaggagcggcgcggcggagagcggagacgcgcgtgagccacctcgaacaccaagccgccggcgagcggactgtccgccggccgcaatttgaccgcattgccgcaccacacgtcggatcggcggcgatatttcacatcgttatggacgccgcccgctaggggtgaaaaacggtcgaaaacgtcgggatcagtagcatgaaacgacgatcatttaaactactccctccgtcattaaaaaatatttagaactggatacgatatattctaatacaatgaatttagatggaggtatatctaattttataattttataggacggagggagttctcatcggtatcaaaaggtaccaatactaagcagaaagaaaaataaaaaaaattaaatttatactccgtgaccactttatataaaaatgatgagagatggaaatgataacttttatatagaaatggctctcgatccacggggaaattccgtgaccattttcacccttacgaggaatgcggctacgtcctgaaatgcaaagtactagggaaattttatgttctttttgacctgtttcctagagctctaacccctaaacctaattccatgagcctcaaatttaacagtttgccactcttacggatagccactcttcaaatgtcattcttctagacgtatttaattttttttccactgtaacaatttgaaatatctcttttgcccgtccgatcaccttcttctctctcccctctctcctagagaaagataagttggacgacagcatagctcggtgccgacagaggtggagctcaggacccacaatggtggcagtggtggagtgggggcccttcctatcactgctccaatctcattgccctttcctttcgcaaacttaatgttggtatttcttacaatcacatataaattcgtaagcgcatgaatactgctgtaacatttcatccaggagtattccaaatgtatcgtatttatatttctatagggaagacgacgaagattcatctaataatggtacactaggcagtggagaagaattatagaaagctaagattcatatattcttctatattgctaatgtttactgtacacttagcacatacatgtttacaatgctaggacttagttctatatacccagatactaccgagagaccactccctgttggtccgccagtatggttatgacattttacgaactctttcatcataccagacttggaggagtataaaggacagacagggctgtcaccacctaccgcctatctcattttctgtgggacatacccgcatccaactacatttaactaacctaagcatcatacttatgttaataaataatatcactaattcccctttgaaacccttcggatgaacaagttagaactagtgcagcccattaagatcattagatcgttatcgtaacgtaaatcgactagtctaatcaagtgaatttgtattaatgaagtataatctatttctggaacacataactagtgaactagtatataaactacgaacacaatataataaaggagataattcttttattgcaactatagtaaagtttgactaagtttatagaaaaaattaggagtaaattgcattggtagtacacaaacttaataggtgggtacaatttaatacataaacttgtaaaatactcgttttggtacacgaacttgtctagtttgtgcgaatgaggactaaaatagcttcacaatgttaattttgcaaagctggtgttgattaggatatgatgtgcatacgtgtaatgagtatgcataagacatgtaatatttataaatttgatctatactttatccttcatcacggaagtgatgaatttcatatatttataacccttatatcattgctcggtttttttttatcattttctacgatcaccatatcccattctatttttattgaagatgtgtttatctaatagcaaccttattagatatatgtttacatagtattctgatgagcccctaagtcagtaagattagccatgttatttccttttcgccttcctccgcacgcaccagacaagtttatgcaccaaaacgagcattttacaagttcgtgtactagattgcacccacctaccaagttcgtgtatcggcgatgcaatttactaaaaaattagcaacatctcaattatcaaattagttaaactaaatctagcattgaatatagtttgataataagtttgttttgtgttaaaaatgctactagatttttctataaatttagtcaaacttaaataagtttgactaggaaaaaaagtcaaaacgtcttatagtatgaaacggaggaagtcctatatagtcgatttgtgatttgtgtgtgtgtgttttatgtgtatgatttttttatttagaacttatcagggagggagtatatattttacaaaaatacttataaacactaatttcatattatgaaagtgtattgcataagtttactaaaaatttcctagttctgttggagtgtttatcctggagaaaaaatggtgacgttcttttccaatgaattgaacataaaggtagaatatggaaaacaaaaaaaatgctattagcacataatttattaaatttaattattgtaaattttaaaaatgtatttatttgataggttgaagcaacttcttttactggacgcgtgctggtcatatacttaatactaagaattgaaataacatcacagccatcagagtggcgcagcggaagcgtggtgggcccataacccacaggtcccaggatcgaaacctggctctgatatttttatttttcctactttcgttttggatgcagatgggtcgtctttttccatttttttctatagcaataagatcattttgggtccctttattccttacttttgttttggatgcagatgggtcgtctttttccattttctattggaataagtttattgtcggtccttctcttcatccttgaactgaaaaatatgtcacaaccaatcccccaacttacaaaactagtgcaatataggtatcaaagcgatttggacagtggttttagctaacataacacctacgtggctaatttgactcagtccatctaacgagccattgacgtggcacatgaagcaaattttaacaattaaaaaattaaaacaaaatatgtgggcccatatatcaatgaaacaataagattaaaaaatagtgggatccatgtcaatgggtccacttcctccacctcatcctccctcttctctatctcctcccttctccttctcccctcttcccctcctccttccccacagcaatggaggatagattggaggagctaacccaagcagcggatgaacgctagatgcgcatgtccccaacctctctcgcccccgcgcacggctgtggtggactggtggtggccgtcggtggctgctgttggcgactggcgaggaaggggctccaatgtcgacgaccgctgcttcaaggaggagcgacctctttgcatgttgtattgccaatcacccgctgagcctgcttcatctccttctttagtgacagggcgggaaaaggagcggggtgcggcgaccgtcgggggtggagcggctggtccgagcgagaggagagggaggacgcggggaggccgacgagcaggcgggcaggccagcaagcgcgcacggagagggaggcggtgatgaggccgacgagtgcgcagagagggaggaggttaggaggccagtgagtacgtgcgaagaaggagggttgtcgagttctctatcggatctagcaacgatggccacacaaagggcattgacgtcaccatgcctagcggcagtgcactctctagcggatccagccctagctacagcggcggcagggaaggttgctacggcggaggggaagaggggtcacgctgctcgacgcctgcaacaccatcaccgctcaccttgaccggctccaccaccgccgctcgttgtgccagttcgtggtccacctcctctcatcattgccttccttggtctgtcgcccgcatgccgtgcttgcggcttgccgaccatgacgagcgggccttagtgtcaccttcctcgccgctcccttcgaccagccccgcgaccgagtctccggcgccgcgagcttacttctcgccgtcaacgttctctcctcgctcgcagtggcagccgcaggcgctgtcctagctctacggtgacgaagacaaggaaagggggagagagaaagaggggagagaagaggggaaagagaggggtggccatgggtcccactgtcattcttttatttttaaccaaacactcgatgacatgtgggttccacaatttttgttttaattttaatttttacattttgcttccagtgccatgtcgtcgccacgtatgacaaggatcaagtcaaactagccatgtagatgtcatatcgaccgaaaccaccttgggaccttattagcaccgattttgtcagttgaggaacctattgtatttgatatagggcgaaagcaacaaactattgacaggctccaacttcgacgggaccaaaggggaggaggggcgtggtaggaggcagatctatcggccgcccaccaccacggccgattgtcattgccgttggctgcaacagggtcgagagacgagttgccgagaaaaagagttttggaactggaaaaggaaaagagagaaaggaagaaggtgaggatggagggaggtcgtgatgggagggaggcgccgccggcggcaccgccagcggtggcgaggtggtgtgcgcgtagggggagcgggcctcagcaacggtcacctcccaagcgacacgggagtcttcataatatgtcctcaagcgaactagctggcggatacattatactagtttttcggttgagggatgcgattcgaccaagggaaaagatgatggagataaaataaacttattccttttggtttggttttggttgcacgtggccagtctttctttagtaagtccactttgactcccttaaccagtggccgaatcttattcgtatctctcaaccataataccggatatctcgatccccgaactattaaaaccagtgcaatttgactctcatgacggttttgctgatgtgtcggtgttgaccatgtcttcatcccacgtggcattgacgtaacgcttatgtggcattagaattatgggacccatttgtcattcctacaaaaaaaaattgtgtggaggatgtggcggtgttgacctagttttcatcccacgtggcacttatgtagcattagaattagaattatgggacacaatttttttatgttgacctggtcttcatcccatgtggtgttgatgtgacaggacccatttgtcattcacacacaaaaaaattacgtcagcaaaaccaccgtccaaaaccaccaagggagttaaattgcaccggtttcaatagttcgaggatcgagatatctgaaaattgtggttcaggaatacaaatcagtttcggtcactagttaagggagtcaaagtggactcgagtccccctaccccgctagatcaccattgatagaagaggagatgaaaggggaagaataagaagaaaatgaagagtatgggaactacagaaggaagaaggagatgaatccccccttaaatcttattctggatccgtccctggttagcgggcaaaacttctttacacatgaagagttagggaaggatactatactccttggaggaggcgataacgaggtgaaactttgcgaccatggtactttacacataaaccttttcataccatatattttacaaaattcataaattcatttcgcaagaacccttacagtatgaatggttggttcagattgctaacataccaaaatggtaatgccaagacattcataaggtagcaaaagtaaacaccctttcaagattcttatcaatattttggtaacaccaatccatccagctcagaaatcatctggcattgaaccaagcaccaacaatagatacaggggcgggtggcgagtggcctagccccctcccacaacttttttcacccataaccactaaattaattaggcaaataacctctaaaactcttaggcccctttcatatcaaaatcctggctccaccactaccaagtactttattttcaatctaaagtattagcactatcaacacatttggttaggtaccattggtttgaccacaagttagcttaatccaagctctactaccattaaagttgtgaatcaatcgggaaaaagttcatttgagcttaactttacaccgaatcccattttcgtctttgaacccaaaaaccagatacaaccggtccttgagctgtcaaaattggtgcaaaagaggtccctcggtggtttgaatgacggttttggttgacgtggtgccaacgtggctggtttgacttggtcgtcgtcccatgtgacatttgaagtggcgcttacatggcaattcgatcccaaaaaaataataaaaaccatggccccacatgtcagctacacacaaaaaaataattaaaaatagtggggcccacatgggccccacatatcagcctcacctcccctcttccctctcccccctctctctccttcctcatcctcactctctttttctctctcccctctcttcatcttcttcccgatggcagacgggcgtggccgttcttcttgatgtggtggtagaggaagtcgaataggccgccagcgacgtggaggtagaagtcctccaccgggatgaggcggcggatctagattttttttttgagtctgagcaagaataatattatcgctaataattttgattttaaagctagggcctgtttggtacagctccaactcctaaatataactccagaagttgagtctagagtggagttgtggagttgccaaatcccagctccacaactctagtacattttgtgagagagctccacccaactccactcccagttttggtggagctgaaactgtttggctgagctccagctccacccctcctgtagctggagctggagttgcattttgatcgtaatacttcattcgatatatttttatagctagcgatgacaatgtcaagagctcagttctaagattgtttgcgcgcaggcaccactactattctttcttttcttgttatgcatccggtcctataaatcttttttttctgaccagaggaagagaaaaagagagaaatgtcgataagttaattcctgtggatgtctacttgccgggctgcccacctaaaccggaggcggttatagatgccctaacaaaacttcataagaagatatcgcgagaaatagttgaggatcgaactcctttcttttctatttcttctattggctggtctggggaaagcggatcacacgaagatctatagtgtttaagtccatctttctcttcctgcaatctactgagatatgcctcagctgcaggtgctttgtatctctggtcaagagttggcaagggatacttaacccatgccatccctttcaaccttggaaagtgttatcctagaatctatcattctccaaaaatccctaaaggccccccgggcttgacaagttcagcaaaaccgtagagaaagcaggttacacctagcttagcctatccaatatccgattcaaaaagagcttggattgctgcctcccgggggacaaagcaaagtcaaagcgcttgatcctttgccccatacttttagatcttcctccccaacaagcaacgggttgagcccggaagaagcagggattgaaccagggcttgttgacagagcagatatcaaaagcctatgttatctcattttcagggaccgagcaagggatgagcgccctctgatctaacgaccaaacaagcaactgcctcaggttttgaataaatcactgatggacggaagggagcgggggccagctcccttcctatgaaagacccgagcttactgggatgatacccctttacatactaatgggtgtaaacaaatagtacgcccctctactaaagtgggttggaaagcctgtatgcctaatctatgcagggtaggtgcgccgctacttatttctttctcactcactacttttttctattttcttttgtctatcgaaacagcctaggattcaatttgatttatcctagtggtgacagcttatgcttgtccttggaaccgggcgcggccctctttccgctattatgagcgggttttgggttagccagagcgggccaatagggataaacaaagtatggaagtagttgtgaggtaatcagatggctcaagataagttggagacgtacttgagatagataatttatgtatttcgctatttcgaatacctaaactcaagcggtgctaatttgctaatccaagccttatcaataataccaacacgccgtctgatccaagattagcaacctctctttctctcatagagggaacctcactgacgcattcagggctctgcagttgaagcgttccttcggaatacaccacaaatacactggtggatgtactgatggacacgacgagtacttcttctggggggccttccgtgaatcagtcggcgcgtgttagcgcattcggaaccacacatttttatacgattttcggatcatttgattttcgttttgaaaactttaaaaccttatcagagaggggccaccccaacatgatcaataggctgatggccttaccaaaccgctctgctcttgagctttctttcctcccttatggcggcgcattggggcactagaaatcaaagaaatctgctatgttatgtgttatgagtttgggacccagctgctgatgttagagctcttttcgaaagagcagcttatccaagtagttagtttccagaacagagcgagaaagaagagaaagagaggtacgcactgtgaaagaagcccacgttcccactcttctttcccccgttgatcgggttgttaaaagggttagtcctgttgttaggaagagttagcggtgtttacaccggtgtcatgtgtacggggatacgtgtattaagaaaaaaggcccagaaggcatgttttcgaagcttcccccgaagaatcgtcaccaaagacattcttccatgggttttttacatgggggggggggctcggttttgcacgcaccctcctttcgttattccaccttgagcctagtgtagttggggagaggagacccctggggtcaaggttgaatcaatagatcacagtcttggatcaaagggataagccagatgtcagtgggaaggcggattttgcatttggaggctttcttgcataccttttcgaattctttttgtatagcttagttacttcttcagcgtagcaggcatgcccacgggaggcaccctccaaatcactaaaagcagcactataccaccacaagtagaggcttcgcagtgacaaccttgatcgaatgtgtaggataggtgggaggtggtgacacacaacgaccaatcctgaaagaccactctttcgtctaaggatgcctaaccgccgcaccctggatccattctgacctaattggatgaatgaagaagagggcgagcagatacgacggatggtccaactacagaacttcttctttttcattacttccatggtcgtgccccgtggcacggaacggctgtttggagttgaagccggactagaattgggagcaaattccggcaacgaatggatgtcctcttttcttcttgtacggccctggtctgcatcgggagaatgggaataacgatcttttatatgatacggaaagcgaagagaatagactgctacatactaagttggttattcgtagatttttaatcgattagttaacatggtggttaaccgtattatgaaagacggaaaaaaatcattggcttatcaaattctctatcgagccatgaaaaattttttcaacaaaaatgtgaattaggaaggattggtcgacgaaatatgaatcgaagactgaatcttgatatacctcataacagcaccttcttgttaccgcgaaatgcaataggcaatcggctagatggcacatccaacctgttcacagttttatgctgctggcacttcagaaaccagagctgggattggtagcggttccacttctcaagtttgcatattctgatcacacaatggaattcaggtggaccagggtttgggacactaatctttaaattatagatgcattataacatgtcaagggaggcgccgagatatgatatgaccaaaggccttgttgttgttgcgaccactgagtatctagggtcattccctttaccaaacattggagttgctgctcgctcgaaagcttttgctttcttcggtactggtacttcggtcaaagtacctaaacctcactaaacctatgctctagcttcgaaaacaggccttctgggtcttttttctcaatacacgtatccccgtacacgtgacaccggtgtaaacaccgctaactctccctaacaacagggtatggggaggggagagaagagtgggtatgagggcttctctcgccatccatagccccctttctttaaaatgcaaagtggacgttcccgcacgaacggcgtgaactctgattcgatccgggtattcaatcccaccgctgagatgctcagttgactccattatcgaatggggcagacactcccatgagctatttcaaccacttactaacacagggacaccaccattttaaagctgaactatgatcttctttcgtgcacatctcgctttttttttcatttatgcgaatgaattgcagaaccaaactaaaatgggttgatcggagctattctctagaatttcaaacttgagatgacttgcttgaagcggctgaggctcttcctaatggaagaaaggacatccaatgttaggatggatctaattcaagaatttctagctctatacgcgaggaacggatgctgttttgacttttttcttcttgctttaatccagtcgctcgataggacttcccgtaacccgaaaaggttggttcttcccctacaacccctacccctccaaggcagtactcttcatcggcaaatccgaatgtctcgatccgagttgagacccacctacagaaattgatccatcaaagaatttcctgctgctatcatataatactcatctctatttggtgataaataaaccacctgtctctctttttttttctttgctttctcagatattttagattgaaagccatagtactaatacctaaagcagtgaaccaaatccctactacaggccaagcagccaagaagaagtgtaaagaacgagagtttttaaaactagcatattggaagattaatcggccaaaataaccactttttcaaaacctatcattaagggcgtgacgacgatatacgagaggaataaaaaaaaactcgtgattggtgtggaggggaagatctgcttatgaaattgttcaagaaagagtcgtctcatttccttatattgaattccttctatggttccacatgagaaaccagtacgaatataacctacatgtccaatcgaattatgagctagaggtcttttgactttcgttagattatcttgaacataggtgcgagtaagttgtattgtttggtctttatagctacagtttgatggtttggtcgttgcttcctcgttttctatttattcatctaattaatctccattataacctacgagacaaagtgattaactatatgattaacgagtaatatgctgcatatgcattggagcattgtggtgttgtacgcatggagcccgggcaattgcccatggtggccaggcgctgcatccgccaccaacagtcgacgtcgcggctgatgagcgtggcgtggagcgcaatgcggccggctctccggcccatgagcttggtgaggccgacgccgttcactgcgccctcggtctccacgtgcccggtggcgatggcatgctgcgccgcgtccaccgccgtgtggaacccgaacgagccgccgctgctggacctcacggtggattgtcgccgcgccgcgcatcatgtcgtccccaccgccgttggggtgggacggaggaggagcagaggcggcgcagggggacgaggatgcaggaggtgggccagcgagggaggagcctggaaggtgaggtaccggtggcggtgagggcggggagaggaaggcagcggctcgaaggtggagtgcggtggtggcgcgcaaggtcgcctcctactgcccacctcgctcacctgcgggaagagaagatgaagagaggcgggagggtagaagagagaagtgaggatgaagaagcagagagagaagggagagggaagaagggaggtgaggttgacatgtggggtccatgtgtgcctcatcatttttaattattttttaactgacatgtggggctatgatttttattatttttccgggatcaaattgtcacgtaaacgccacgtgggatgacgaccaacctaccacgtggcgccacgtcaatcaaaattaccttctaacccgccgagggaacttgtttgcaccggttttgacagttcagggatcggttgtatctttttgggttaaggacaaaaatcggattcggtgtaaagttaaggacgtcaaatgaacttattccaatcaattggtatgtctcatattttggcgcagaaaacccaaacttaggcccatattttggtacctcgggaatgggccgggtacagtgtgaacacgttccagccatatataaccccttcgtctccagtccccatcccccccttccctttcctccacccacgccgcgacgacgagtcgccgccgcggcctcgccggcgaccaggtctccggcggccccgccgcccgccgtgacggggctccggccttccgccctcctccccgcaccgcccgctatctcggctccccgactcctgcattcccccgactctcccccggccgccgccgccgccatttctgactctttctccgcggcgcgtctctcctccgagagcacgccgaccgcctcccgaagcggcgtcgcggccgcggcggccgccgccttctcccgcccctgatggctggcgattcccgaaatgaggcgggttctttctcctttgcctttttttactgctcggatgaaatttgaatctgtgtatgcttgtggttgtgatgaaatttagcttgttctgtccccgcagccgatgttttgcgaggaagggagcagtgaatcgggctatgttctatgtgttattgattcgctgaagaagaaaatcacatcggaccgctttgtttacatccaggtgatttgatttgatttgattgtttggagctgcaaatctcggtcattttcttgtattttctttatttaccagctgattagttttgttccccgtgatctttttttccagaaaagggtagaggagaatagcattaagcttagcccgattacactgcactctcacaatttgtcaaaaaataggcaaactagtacatccaacagtacagatttagtctcgaatttgctcacaaagaggaaagaagatgccctgtgtgctgtgaatagtcgtgagtcatctcctgatgaaagtgaaggtgccaattgccaagatgagtgttcatcgactgttattgtgggtggaaatctatccgcgaggaattctgtccgtccgattagactaccagaagtggcaacactccctccatatacaacttggatatttttggacaggtgcattttcttgacatccctaagatccctgcttaaattacatagttatcatggaaagttatagcgtatacactttattatccattagcaacaacatagcaatactatttcatttctcttgctaaacagtaaacacacgctcatttgtggtctttagttttttgtgcaacaatctattcagtcaaacatagtttttccgacctaatgctttatgtctctggtgattttttttctcttcatgtgtaaatgtgtaatggagatattgcctttcgttcttactataagcttgggaaatggtatagtataaaaatggaacaagtccttatgcggccccttgctacgtgccccacctctctcttaatcacatgcagttgcagacttgcaggctgggagtgtgtgttaaaacaagagcagcaaatgccacattgactgccttgaattcatcttcttggctttggtagcaaagctattgtgccagaaccattggctttgcctgctgcagtgtttcttttgcttttgctgtttcatccgctttatgcttcttagtgttctctttgctattgcgtgattttgtggagcagcaagcaaaaaatcagactgaaacatgtttttgatgaattgtttgttgatatgaatttaacagtatatctcatatgacaaacttctatttttctaaataagtaatgcaaaacatgcatggtcacagttacaatccagcatacttttagtttggagaggtagggcatcttaaggtttgttgaaatataagattttacaatctttcgtgcaggaaccagcggatgcaagaagaccaatctgtacttggtcgtcgaaggatttactatgatacaaactgtggcgaagctttaatttgcagtgatagtgaagatgaagctgttgaggacgaggaagagaaaaaggagttcaaggattctgaagattgcataattcggtaaatatgctttggacatgcatttgttttcttttgccttgaacattcactaaggatgctcaacttgtttgaccgttacaggctcatgggaccaagatacaggtgcagttaccatagcacctggagcttgggctcagtccatagaataacagatctgatgactctgtagtaatagtttcatggagaaatgctttcttctgtaagcattttgtcatattctctgtttttcttttgactgggaaaactaccaggactttgcctagtagtgtaatttcattaaagaataaaaaatagtaatattctctttttgaagtcacaatataacatagtacagaagcaatagagaaatgatattaaatatactggtcaagtaacatttggtatgaaatattcccaagagattatttagtaaaactacattattaaaaacttgtaagaaaaagggtttggttttggggcatatgtcttatatcattaaatgaaatggtcattaccagttttatctacattgttccaggggaaaaccttgagctggtcacactgcatatttgacctggttttgttttgtgcaacccttgcacaagcaagaaaagtatggttacagcattaatctgagttgtttgtggattaatttagaccttaaacatcatagatcacaataatttggtttctcctgtatggaattcttccacttaagggtgattttgtgcaatgattgccaggatgaccattcaagaatgtggcatgtctgatgctgtgcttgaaactctagctcgagatatcgaaagggctcctgatgatataaaggttcatacaacatttattcaatctcacgtcacatttgcatttgatccatttgggattttcctcttccaacttattgtttcatttctgaaaaattaaattacgtgtctattttccaggccaggtatgagatcctacaaggggagaaacctgagggttcttccaagaaagtgtctgaacttaatgtcaaaatggaagacgtgtacggtgataaagatctggatgcagcattggattcctttgacaatctcttttgtcgccgatgtttggtacgttttctgttaattgtcatgtgtgttttacataatatctctggtttactgatgaaacattctgctcattttgatgttggaaggtttttgattgcaagctacatgggtgttctcaagatttagtatttccggtaattttcaaaccaatgagttatttcctaaacttgtgtgttgttctaattagtgtccttttcgtatagactgaaaagcaggcaccattgtgcagctcggatgagggtacaccatgtggtattcactgttacaaactggtctgtattttataggcatatgactgtggaaaagcagctcttcttttatgatgatttagatatccgaaacataagcatatgccgttttgctgatctttacctcatttataatctttttgtcaggtctctaaaccagatgctatcatggagattgattctcatttgcttgttgatgttgaggagccaacatcggacaatctaaaggatcagatagggtcaaataagaaaaagcttggttctagtgggcagaaaacaaaatctcaacaaagtgaaagttcttcaactgcaagggtttcctcagaaagcagtgagtctgaagtacaactgttaagcaataaatccccgcaacactctcctggcctctcaaaaaataagcttggcgcaaaaggtggaatcaagaaaagtactaacagaagaattgctgagagaattctaatgagtgtgaaaaaggggcaacaggaaatgtcaccggactctaattctattgttaatggatgccattggcctagggatatgaagcttagatctgatactaggagtggaattaaggattctgttgtatcctcacagtgtaattctccaagcacaaggagttttagaaagaagggcacacttcaaatggagaataactcatcttttgtggatgctcagagtgattcaatggaggatacaaataatgaacattcagcaacagatggttgtgatagttcaaggaaagaggaatgtgttgatgagagtatatgcaggcaagaagctcatggcaggtcctggaaagtgattgagcaagggcttctattgaaaggattagagatttttggaaagaacaggttggtcccttgaaatgatcagcttcatatgaattatttcactaccttctacttcatcttaatatttgtatactattgcacaactaactgctgtatctgttcaggacagagtaaacgttaatgtgtctaatccctccgtcccaaaatataaggcgtgctttgacttttaattgtcaatttctcacaagtatactgtctatactctatagtggaaccaacatcatatgaaagtacattcaaatatgaatctgacaataccatttttatatcactaaacctatatattgtcagactagttgtgagtcaagatttgtaaaatttgaattttaaaatgcgtgcacaccttatattttggggtggagggattaacctttcagttcagcacaagaaactgactatgctttcttttaatatatctgtattactaaaagtattcaacacaaatgtctatatttaaagcaaatgctcttgcatcataattagacatccccgaaactatattcttatactactacatttcaagtaaaagctgtaacatgaagatacaatctacaatttgtcatgcataacgtattggaatgcggaattaactggaatttctaatgtttgcatcatttagtatctagttgtgttagttatagcgtttcatgtacaagaaattctgatgtatgttcatttcaaatgccttaaaaactcattcctgttttctttggatgtcttgcaagcatattggaaatgttctttatcctttctataatgagtagaataccttgttttccctaatttgaatagtcatactgagcccttgtttttcctatgttgaagttgtttaattgctcggaaccttctgggtgggatgaaaacatgcacagatgtttttcagtatatgaattacattgaaaacagcagtgcatctggagctcttagtggtgttgattctcttgttaaaggatatatgaaggtaggattcatcataaagctcatttacttgtattttcccaaggtttcatcttactttaatgcttgaactcccagggtaatgaattacggacaagatcaagatttgtgagaaggcgaggaagggtccgccgtttgaagtacacctggaaaactgcaggctaccattttataaggaaaaggattacagaaaggaaggatcagccttgtcgacaatacactccttgtggttgccagtctgcatgtgggaagcaatgtccatgtctcacaaatggtacctgctgtgagaaatactgtgggtgagctacttcaattattcatattgcagactccgagaacattttttcttctagatattaataatgttgcttatgaaaacaaaactgtgtagatgtatacaatttcaatattgtttggttagtgccgaccaattatgtcgtatgatcacatcttagttttgcaatcattgctgcttactgaaaaggaaaggaaaataaaacctaggaggaactaggcaccctttcaattaagaggaaaacaggcaccaaatttctagttgaagaggacttgaaccttgatggtgggagagtgagggtgtaaactccgcatttctcacccaaatggtgaatcaaacacatgcttctcttttgttctgtgtgctcttttggctattagctattacttattttgataatttataattttaattggaataaatgatgcaaacacatggagtgcaaatgtttgctgtccgcatcctgctgatgcaagttgaagtaatcctttctgcgttgcaggtgcccgaaaatgtgcaagaatcgcttccgaggttgccattgcgcaaagagtcagtgtcgcagccggcagtgtccatgctttgctgctgacagggaatgtgatcctgatgtgtgtagaaactgctgggtagggtatgtattttaaattctgatgaccctttgaatgattttgctagttaatgcacatttgtatatcttagagaaaggcaccaactataatgtgcttttcattctttgcacttctccaaccttacatctaccttgaaagttgagaaattaccacctatgcctgcacttgaaggatggaattttgatggatgatggatttatccttaagtgcaggaagaatcttgcatatgtatattccagtatctgaagatacggagttctgcagtaaaatatcttaatggtagaattgaatttaattaatataatcatatcaattgcttgcccaacagtcccaataggcaatagctacattccacaattaaaaaaatggtgcaataataataatttgacatttccttctcataccatttgctagcatacttgatagtgtgtgccagcacattgacaattgatattctatatctaaattatttataacaatatctgagttttataggagtgtttaccaggagttaatccatgaaaaatgtatcaatgatgggggagtttaatttgaatttgttatgaacgagcttctaatggtaggaaatgaaattttagatactgtaagttgttaggcaaacaccaaagatgagtatattatccggccagtgtgtaaatccaatcatgatcctttttcactccatggaaccttaaatatgctttctgttattcattgttgaaatagtctgttattcaatttcaattactgtttcttcatccctaatttttctagaacaaagcgccagtacattgaacttctatttttctacctgtactttctattgtgcaggtgcggtgatggtacattgggagtccctaaccaaagaggtgataattatgaatgccggaacatgaaactgctgcttaaacagcaacaaagggtaaaccttttgcactttgatttattcatgctattgcaccttggttataatttcgtcaagcctatcgattttttatgcctgcttggcccttccatttgcctttattcgatgctttgatatttttgtgtgaggaggcttgaggtctaagttaattacccagcagtacttctcaatagttttattctttttttttaatatttttcacgtgagttcaaattccagttgtctaaatacaaaagatcttaagtttaataccaaagaaactagttagagtaactatattccaaaacaggcaatgaactatgaaccaaaaaacttcccattagcaggaaaataattgcataaagtatctatcgattatgttggtgaatttatgaaacaccagggggtgttacttcattttctattacaggtcctattccatctctaaatatctgtaaatagtattgacttgctatgtgcactcttcaggtcttacttgggagatctgatgtttctggctggggagctttcctcaaggtaagatttctctattgacccttttcctccctcataggacgtaccctcatctaactagtccttttcctaaatcttcagaatagtgttgggaagcacgagtatcttggcgagtacactggggagcttatctcccataaagaagctgacaagcgtggaaagatatatgaccgtgagaattcatcgttccttttcaacttgaacaatgaggtgagtgcaaagacaccccgcaaattacggtctgcaagcattcaggattgcatactgtactgatttgactagcctaatgtcatccttttgcgtgaaccgagttgtttacatccccaacccactgttgttcaatatcgcgcgatttatgatccgctgcagtgttttcgctgttttcgccagtaccggatgctcactcactcactttaccctctcgatgaatgcagtacgttcttgatgcctacagaatgggcgacaagctgaagttcgccaaccattcccctgatccaaactgctacgccaaggtcatcatggtagcaggcgatcacagggtggggatcttcgccaaagagcggatcagcgcgggcgaggagctgttctacgactaccgctacgagcccgaccgggccccggcgtgggctcgcaagcccgaggggcccggtgccaaggacgacgcccagccttccaccgggagagcaaagaagctcgcccactgaagaagaagaagaagaagaagatcagccgttgattcttttgttgtcttggttgattctttcgttattggtgagggggaccgagaactctgacggtgattagcgccgtaaggaaaactttcctgccattcgttggccccctcgattcgattcgttgattttccctgaattctgtaactgctgcacctgtcgccagttcaacttcaaaagatttttctgattctggatcagttgttgtgttcttatgtgttacttttcgaaaatacaatcaccatctaaaatgcatgcatgacactgttgacttttcggataactttggcccattcatcttatataaatatataaaagtataaatagttttttattgataaaacaaatcataacaaaataaatgatatttatattttttaataaaataaatgatcaaatgttttgaataaggttaacggaggagattaccgagttgtttccttcgtgaaaagtcggcgagagctggaagccagcgatggctgggaatggcgtggtggcgttgttgccaagggcccacataccatacaccgtgcgaacgccgcggcaaagcttgatgcgaggcttgtttatctcgtctagcagtagcaggcatgggtagggtcaatgggctaatctgcgtccggcctatcctgaggcgttgtttcaaaagatctatacaacaaaactaacactccgttttgtattataaaacgctttgatttttttcaaacctttttaagtttgatctttgtaaaaaattaacatcttaatatcaaattagtttaattaaatttaacattaaatagattttgatagtatgattattttatgtttaaaatattataatgttttttataaactttgtcaaacttcacgaagtgacttaaattaaagttaaatcgtcttataatataaaatggaaggaataaagagtatattacatttgttgtacacaaatttatttaggtgggtataattctatatatgaacttattatgaaacattcgctgtaatacacgaactcgacatggtcagggtggcgaggagctccgagtgatggcagatggactctccatagatcgaccccctgtgatggtgcgggaaggtgcaagggtgagcagccacaccgtacgccggtgaaggagctccttttcctcttcctcctcctcttcttcttcctcctcctcctcctctctctgcccttcccttctcgatgaacaaaggagccgaagttgcagcctgtgagttatatccctccttccccgaccactactactttctgtccctccatccccagctccctccctccctccgctcccttgacatggattggagaaggagcaaggtgctcgcagcggacgcagggctcaagctcctccacgtgcaactagcctcggtaggtgaaacctctctcactttatcgatgctcagctcctccttgcccccaacccttctcactaccgctcagtcgacgttgaccgcctcctttgcttccgaatagaccacctcttctgccaccaacctccatcttatttagatctcattggcttcgacatagcctaggcagagctcctagatgtcgaggcaacaaagctcggggctcgcgaggaaggcggagcttggtggcagtctgacgagatcccatggagagcgaacccgttgagttctggtgagatccgttacccttgaagccttatggagctttgcctcttgttggcgccgtccttgaagccttgccaaggcctgcctctcaccaacaccgccattgaagcctcatcgagctctcttaccaacgccgatctaaagcttcacctctatcggcttcggctcagcgacggaggccacaccatggggaagagggaaagaggggacacaaagcagaaagaagatgtaagtagcaatgacaggtggaccctctctcttatgcaaccaatgtggatctattgtataggtcaataggtggcatccacgtgtagtacaatcaccgtaaaatagctcgaaggtggtaaatcatcttatactaatagttggcgtatcatatctggttttataatttctaagtatattttagaccaccatacgatttcaagagagtaaaatggataatcccccataataaatctcactagttgtgtgatatagcggcgtatggacactaacaaaacattaatgcagccaaagcaaccccccatcatatctctcttggccccccatgatatatgaacagaagttacagaacagtagcagtgggggtacaccctataccctccctgggggacctctgaatacttcgatcagagtaacggtgcggtgccaaactgatcagatcacacacttcagactacagtcaaacagagcccttgcttgctttgcttgtgtcttcaacttcagagaccccctcctaccctcaaaaaatttcccctttcttttcctccgtttcttgcagcgacaagagaaatactaatactcctcctcctactactgctactgtgcaaggggaaggacacgacgacgaattggagagcggcgtcctctctgatccttttttttcctttattgcatctctctctctctctcgccatttttcttctaggttggtctctggatcaggccattgagggggaaagaaaaggtgcgggttttggggggaggttgttcttgcgggaggccgttgatttcgccgtgtgatcggaggtgaggttcccagaaaaaaggtttacaatccttcttgtgtttttctagcctagtagttcttggttcttggatgctagtacgcgtgtccgtcatcttcttgttctttgtgtgcgccttccgaggatttttattttccttccctttgttatttaatggtgtcagtggattaggtttatgtgtatctgtgttagtcatctcagctcagctcagctcagccttgttgctttcactgactgactgtacttacatttgtttaagtgagattaggtcgaataaattagtaggattccctcaaaagaaccatcttttgtggagttaggtggatttggtgctcatccgtgctactttctcaccctagaagcttttgttcaccacccagattttggtcttcagggagtgaaaaggagatgaatgagaaggacgccactgatttggaggagaggagtgaggccagtgagcacggccaagctctgagtttccatggtggtgccatgttcttgcaagaggctcagattgcttctcctgcagctgcaaataatgcattgacctccatggcgaatcctttccctatccctcctgggttgtggaatccaccttcacacaacatgggtttaggcgaaaccagtttttcatccttgttggggatgctgtcggccggcgcgccgccaccgtttgtggctactcccgggtttgtagattccacggcggggtttccttgctacaatggaggcaatcttggagccatgatcaatcaccctttccctggtatccaccagcctttgggtgatttccaaaacggcgtcgagccatgtagggagattgaggatattgagattgaaggatccaagaatgtgtcacaaactggtgagaagcagcaaggggatggtgagacaacgcatgccgtcgattcctcctccaaggagctaagcatgccagggcgcaatggtggcgctggccatgatgaggggactagggtgtcttgttccaagaagaggaaaagatcaggacaggtatttgcttgatgtacacatatttacagagctgaatctccgcatatttaggtggagctaagaatatgaaattttcttgattcttgaaggatggtggggtgaagcatgcagaaggtggtgagcaattagcaactgtcggttcagcgcagaagaatgaggatgatgaaaagggtgaaccaaagaggtcttctgtggcgtccgggaaatccagtgggaagcaaataaaggataatgcaggttcaccaaaggaagactatatacatgtaagagcacggcgcggtcaggctacaaacagccatagtcttgccgaaagggtaggtcctttttttcttctctctaatgatctcttcataaaatggtgtatctagccatctggtttgactgttattgttcgggatgcaggttaggagggagaagatcagtgaaaggatgaaatatcttcaggatcttgttcctggttgtagtaaagtaagtgcttcctaactgtcccctgcctccatactgaatgactgttaatctgttatgacatcaattgtgaaatgtaatctaggtaactggtaaggctgttatgctggatgagataattaactatgttcaatcattacagaggcaggttgaggtatgatgtttgtaaaacttgtagggccattttcagttttacttgcatagtcctgctgcgatgtaatctggtatacccaatgtgtgcatgttgggcagtttttgtcgatgaagctagcaagtgtcaatccaacactggacttcaacatagaacgcattttatctaaagatgtaagatagttctcacctggtctttatagattttgaccctttagatttgtctttctcatgatgattgtttcatccacacagatttttcaatgtcgaggcactactgcatcatctgcctttggcttcttcccagacattgttcatccccgattacacccaccaaaatatacacaagttgggatgcccagcattgtgaaccccactgatgcatttggaagagtaatccatgctccattaggaactaacagtgcattcaaagaacctaaacatcaggtttgtaccatcacttgcatttggctaaatggccattttcatttcatgctctttataccaaatactgtgttcatgaaaaataggacaagtttctgcaagatgttccaagacctaatttagtgttatatggcttggtgtttcgagaatactgctccacagatagtcgttgaaaagaatgtccacataatattttaaaccaagaaaagctagtcccctttatatccttttgctgggtcttgcttcactacccatctttccaaaaagttcgtgggtcttaaaagcaaagcaaactagataacataactaaactgagacattttagacaacaaacaaaattcctactatctgtttttcataactagccagattgtgcctgattcttttggccatgcaagctgtttgaacctagtccatcaatcagtctctttagcttctgactcattaaccctcttcaacctgattttagtgggaagagcattgttgatgttaaccgacattgtaacctcagtagcactaaccatttcactagtaaaccaactaaaaatgtacaaatgcagcttgttatatatctaattgtatcttcatcactacatatttgccttcacagttatctaaaacatatgctttcatattcataaacatttttttggaaagcggagtaccaaagcactgttttagtattttgcaatcctcttattacttgtgcattggacagatgcccaacaatttgaatggagagttccaggacgtcattgagatgccttttactcatgaccatcatggatcaaatgatcaaccctgagattgattccacaactgaagcaagagatcaatatgtgccatgggctttcagcaaaactgtgatatatgagcatgttgatatcatggtactagctcacagctgatcactgaagtataagcatccaaaatgcttagttagtgctatttttctcatgttcatagcagcaattgacctcctgtggaagcctctctttggatgttccatttgctgttatagaaagttgggagataaaaaaaaaaggatgttcacatggagatctcaagcaatttgttctccactgaagtagtctacagtcttgaaatggcgagaagcttcattttgcaagaaggtgatttttctgtggtctcgtcaaccccaggattattacatacactagctagcattgtgaggctacagaaattgttctttgttgtacttgcttagcccatgttccatctgacaagcaacataggcagaaatgcagtcactgattttgtatttgttgaaaaaaaaaataaatgggcttggcctgatgtagcaagcatttgaattttgcaacgggtgcatattggcacagatgtttttattccagcaaagctgtgaattctgaaagagaagaaaagagaactgtgatctagtgttactggtgaccttgtgtccttgttaagacataattcactacacactggtattggtgaccttgtgaagcgataatcatctgatctgaagctgatggtcatggcaaaagcagccaaggaaattaatctcatgaaactcttgctcattgtttcactgaatctgataaaacatgacatggcacgtttctgaagcaatctgaggtctgaacactacatttttgctgcatctatatgcaaatatttctttctccaagcaaaaacaccaatccacaaaagacaatttctgaaacaaattatacatacatgaagaaaaagaaactactacctatgtcaaagagcatataatcttcccctgctataacaacatgtactagctacattgcatctgcagtgttctttcttttcttcttctcttttccctgtgaacttgttcagtatagttacaagaccaaaccaaatacaccaagcccatatgatgtagttctagtagttacagccaagaacatggcaagaaactatggagatgaagatgaagatgatatgctacaactcgacggagacgtaggtggcggagtagtccggcatccggtgcaggctccggagcacgctctcggcgacctgcttcgtcgcggcgtcgcccttgtggaacgcgctcaccagcgcgctcggcagcgcgcggtccgccgtcacgtcgcgcacgcaccgctcgccgccgtgcgccaggaacctctccacggcccagaagcagcgccgcgacaccgcgccggcggtgtcgccgccgacgtcacggtgctgccgcagcgcgcgcaggacgtgccgcgcggcgtcgtgctcggcgagcacggccacgccgcgttccacgtcgacggcgtcgtccatgagcgtgcagagcgcgcccagcacggcgtcgaccacgcggccgttctcgttgctctcgaggacgccgacgagggcctccaccgcgccggcctccgccaggcagaacgtggtggccggggagcacacgccgcggtgcaccgggcagaggcgtccctgcgccggcggcggtggcggcttccggttgttgtcgtgcacccgcccggtgtgcgcgtcgcgcaggcgccggaggatgttcttcttcttggggcgccgttgctcctctgatggcggctgcgagaggttcaccgactggtggctaaggttctcgaggccgaccgccgcgagccgctgcacctcgtcgctgcccgctgaccgcacgagcagatcggtgagcaccgccgtgaagttgtgatccatggccgccaggagcacgtcggggtcgtacagcgtcatcgtcatccggacgagcgcgccgacgaggccctccatgtacgtcttggcatggcggctcactcgcatttcgccgcgctgcatctcctctatcttggccagcaacgtcggcactgctccctgctccagcagcgccaggttgagcgtgatgttctggtacggcagcctcgccagcagcgtcgccgccacggcgtgccgttcggtgacacgcccgggctggccgatgctcttcaccagccttcccggctgccctggcgccttgcagagcttctcggcaatggtgtgccccatctgaggagacaatgcaatgagcagcctcgtcgcgctgatgcctaacgcctccgtcttcgagcccatgaactcgatcacggtcaggctgctgtcctgctccttcatgacggacaccaccgtcatgagcggctttgggagcgcagtgagcgcgagcagcacacgtatgatgctcaggttgagatcatcaggcatggagcacttgagcatgtgggtgaagttgtacaccgaatactttgaagtgatgacatggccttccttgttgacgacgatggtgtcgggatcgagaccggactcgacgatgttggcgagcactgcagcagcctctgtcttggaccccataggctcgtcgtcgatcttgcggatgaagagctcctccaccatgaccggaacagcaccggcgtcgacgagagtcttgctgttggggccatctgaggagatctggacaaggacatcaagggccgccttgcggatcacagtgttgccgctatgcaccatcttgatgaggatctctgaagcactcccagcaatgttgatggtcatttcctgcttctggaccagctcgccgaggtagctcaccatctccatttgaacatcttcagaccctgttttatatggtgtttcatgtcaggtaatggactaatggtagtgtcatggtgttaagttcacgctagcgaatttcatattagtcatcagagcaatattactatatctagttataactgcttgttctttgttaatgttcaccctgtactgaagtacatgtattcagaaattgattgatctaatgttaagcacactatttacacaaataaataagttctctattaatagtccacgatgttgacttttggcaatataaacttccttatttgatattatatatgataattaacacatcaaagaaagtcgtgtatctttctgcataggcaaaatttttaccttccactaaatgtctttggagaggatccaggtaaccactttcagccatgtacttaatgttctttgggcagttctccaggttcttgagaacctccccagccttctctgcagcaaccggatcatctgaatcattgaatttcattgtggtaagcatcaatatgcttccagaagttgatccgatgttttccaacaatagctccgatttcgaaagctctagcaagaaagagatggctgcatgtctttcatcaggactattactagaaagcagctttattgttcttgtaatggctctggtatttgctatgacttcctgtacgtcatgaaggcatgaagaagaatttcagttttgaacaaacacgcagggtaattgtttcagcatttaaataagtttcacacaaccaggccagcgaaaacattgaacatgataagggtcaaaacgtttcaggcttccttacctttcctgtttcatcctcagccaataagcaaaggagatccagcgaatcacagcgtatcagaccatccttgtgctccaacaaacgagggaggaacttagttatcccgattttgtgcatctgttccctgttctttctccttatcttggccagcagcttcagctcttgtatggcctcaagcaacattgcctctgtggaagccatggagagcgcggttcgtgcaatcctgacccttgtggcttcatttctcataatccattctgcaattgtgctcttcagtggaacattgctcctcagtgccttgctttgcatcgacatctttgtcacagggcataccacaggttcagaaccatcagcaaatttctcaaagtactcctcaatggctttcctatcatatgtcacaccactttctgttgtcactggatcaaccatgaccttgtttgtcaatggacagaagaacgaatcatataatggctcgacatattctgcaacttcagggagcgaattgaatgaatgtgcaccgatatcatgtgattcatggtacattccctgcaggaagtccaccagccttggcatgtcactattgtgcaatgttcttctccggggcctgctgtttgccgggattatcgacatatcggcctcagagtaaccatcgcaggaattctggtcacaataacgcggccgatgtcctgcaatctgaaggtttgcatctgctctgccatctggaaacctgctgctaccaaatgttgaagcaggtatcctgctgagctcatgcccaatgttctttatgacactgtcaaggtcctcggtcatgcccaggaggtcatcgttcttgagctcccgcgcaacggcgctgcacctcatgacgaggtccttggcgaggtcgacattggcagccagatactccatgacgtgcatcacattaaccgtcgaattctgcactctctgcagctccatcgtgaccaggggtgcatggtagaggtggctgcctacatccatgaagttctcatgctcggcatcggctgccgcctctggcggcatgagctcagagatcgcggcctctatggactcaacgagtgacgccttcctcgcctgcgctccgcttcgctgaacaagagtacatgtcaatcaggcacccaagcaaaagcatccaaaaacacagataacacacagactgttctgttgtgatgacaactacagtccaaaattcatacagtccaattataaagcaataatacaggctcccttggctgcaatcaatctgaggttgacccaaggggttgagttctacacaagcaaattgacttcccccaattccaaatttttaacagtttgttccaagaactactagcatcttatctactgtacagtgaaaaaatcaccaggaaaattgaatagaggacacaaataacacaagggggggggggggagtacatcaagaacagcttgatgcacattctacctggaaatcaacatcgtttctccgttccatctaaccaaagtggcaaaacgtactaccaccaccataaatttgctcacttcaagcagggttcgccatctctagcgcaaagaccccccatgaatccatgattcctcgccttaccaaatcacgaaatacaaacagaaatggcacaagaaccgaggaatttgcgaatcacagcctcactacccacctttacaaaaaaaaaatccatgaaatctaccgaaatttatggcagcactacgaattagcagcaagcgaacaagccagcttcgtccccccaaaagagagatgcagcaaacagcaagctcaactcccccacgcttacctgcatccaagaactccaagaacttgaccgcgccgctgcttctcctcctcaccttccgctccaagctcctcctcctcctcccgagactgagaggacggagacgctacgactggggtagcattctcccctcctccaccaccgcccccgccatggcctccccactcctcaaacttacagcgccaccaccaccccaccaccgctcgagccgaggaataataccacctcgctcgcgtagggaggaagagacgagaacaaaagagggagagagggagagggaaaaaaaatacggaggaattacggaagaacgcgcagtggcagcgcagcacggagactcagtcaagtgaaggtcagtttgttaatcgttataagcaacctctccctaatctttttttgttttttttttcttgaaaaatgtaaacctcctgttttagactttagagatcggtaataaagcgacgttttctttttggatggataaaccgataaagcgacctttcttttaacaaccacctttctaatggcgttttaccttgggagatgttgactttttctttttcttttttttcttttttgtttttacagtgatggtgcttagcttagctgcaggagtcaagacttgcagtgcacaccaatgtatgtgtcaaaccacagactaggcgtttaaatttttttaaacttggcccaaagattgttttttacggcaagcttaagcagatgttttgtttaaagaaggtggttagctatgtgccaactgtcataaatttttttaaagtataaactgatggtttcttccctatttccaaacagtttctagctggtatgcaatattcggtcaaaattcggctgagtttggttagactggaggatgtaaaatatatttttggttgctgtattagattttgagcctgggctactgtttagggttaggggactcccatgcgaaggttaggctgagtgtttgggaggcctctctcccacacgcaaaacagtgtatgcattaactactttctccatctacttttgatacttatattttatcttggcacacagaccaacgataagtaattatacttatcatccatttaaacatgctagtcattcctcgtaaacaagcgattcattaatatttacatttctcgatgcccatatagccaatcttgtgtggaagaatggagagtcacgtattaaatccgagaaagatattaagaggataggttgttggattgaaatatgcctatcaaaaataaatttttcagatttggaaatatgactatcaaaagtatatggagggagtaattaattaaatattatttattttgtaaaaaaataggactaatatgattgtttaaaataatttttgtatatttttttaaaaaatacactgtttagcagcttgaaaagcgtgcgtagaaaattagataaatgagttgaaaaggtggagaaaagagctcagccttacaagatatttctggtagaagattttgtttgattaattggttatataaattttgagtttatttatctctttatttgaatggtgcggttactcctacacctccaatagatataaatatatatatccacaacactcgaaatataatgtgagatagtgtggtctatttgcactgaacaagtactccttccagtcacaaatgtatgagacagtgtggatcatgatatggttaccaatatacggagtagtattttataagagctactatgggaaagttataatattttgaaactatttttaagataaatctaaccatatcactttcaaaagttagatcgaaatatttaaagagaataatgattcaaatttaaccatgtttaccgcacacattccaaatcgtcacttatttgtgaccggagggggaaagcctaaatatcacaaggtcaccctcatcatttccatcgcccttcgttgcaatcaccattgagctggtcaatgcgttcttaccacgagtccaagggtaggggtgggcattcagaataaccgagaaattcggttcagttcctcaatcttttggaaaattcggtcttcagaatcacaataccgatcggttttcatgaaaactcaagaacgagcactttggtcttcggttagttcggttcgttctcggtcatagaccgaactaactataacaaaagttttaaaagcaaaaaaaaataaatactccatacaagatcaatgaatcaaagcaactcgcatgaaaaagtacatgatgccactagaaaatagagcacgattcagaaaaaaaaaggaagaatatcaaagcaaatcgatattgccatgacttggatcctgtcgctttcatccccgaccggcctccatcatcgaggtctccggcacagcctctttcgccatcgtggtgcggatagccatgagcgtcaggttacagcagggtcgccggaaggagcacgatctcttccgccacaccaggcgaaagggcggctcggcgcaatgaaggtcgtcgctagtggcgccgttgcatcgtgaggaggcggagggcggaggcggtgccgacacggtggagcctggaagcggcgagatggagacggaggctgagcgcgaatgcacgatggatggatgcggcgctgaagatgagataaggatgcgggagatagggtggctaatttacagggtttagcgttttactgggcttattggtcctcctagatctattgggccacaattcggttttctcgattaaatttggtcttttgatggctgggactgaactactaactaaatttctcagtcttggtcttttcaattcggtctaatgctgcccgcccctacccaaggcaactaaatcttttcaacgtcaagcttcttactgtttaagaagttacatactttctctgtcaaagaaacaattcttgaattgatttgttttatttttaggacagatggagtacgcgtgaactatatagttgtgtttgctacatacattttaaatcgttatttatttgtgaccgttatggctactgatcggtcgtaggtcttgcttctgttgggcctagagtcggtcaaggtaatgctgcaggggtggttgcataagacagttggtttgatgcaactatgggtatgtttagttccacgtcaaaattggaaatttgattgaaattggaacgatgtgatggaaaaattgaaagtttgtatgtgtagaaaagttagatgtgacattttagggttcaaagtttggaactaaaccgggcctatatttgggagagaattttaagaatcatatatgggctgtgtttagttcatactgaagtttggaagtttggatgaaattggaacgatgtgactgaaaagttgtgtgtgtatgaaagatttgatgtgatggaaagttggaagtttggaaaaaaaaacgttggaactaaacggggccatggtcatagtacctacatggtctctcaaaaagtgggaaatgattgaataacaaacgatttattgaaattttgtaactccatgcaggaaatggtccacgttttctttgaaattgagagccgacacttccctttctatgaaatttatgcaagatgtcatgcaccaaaacagcatgataactgtttgcacattattcatcattagctctacccttggcctgatcaaaatatgatggaggttgaaggaaaacattattcatcattagctctacccttgacctgatcaaaatatgatggaggttgaaggaaaaggctagctactactactagagatcgagtagagacaaaattatagcagtagtattttttgagttgtcactcaccctgattgttcatgagttcttcaatatcacgtctcggtcttttaattctgctccatttccctcatcatgaaggcgtctaggcattgatggcctcaggctgctgctaaatcactttgggaaaaaaaaaaagccaggtatgttcccttcaaacttctaaaaattccattacattaaatatttggacacacgtgcatagagcattaaatatggatgaaaaaaatcaattgcacagtttatatgtaaattgcgagacgaatcttttgtgtctaattacgccatgatttgacaatgtgatgctacagtaaacatttgctaataacggattaattaggcttaataaattcatctcgcagtttacatacggaatctgtaatttgttttgttattagtctatgtttaacacttcaaatatatgtccgtatatttaaaaaaaattggcatacgaaataaacacggccaccatcaagaactggtccagtggaagctcattaataagttttctgatctcggtctgaattttgttaggtggtactactactcctaattaagaaagccagtgatcaagggcaccttggtagtaccagtttgttagggcaacaaaatgttgctgagatttcttttgcattgtgttagaattctacgccattaattcttaactaacagtacttcattagctgtacttcttggtagtgttagaagtacaatactaagcatgtaccctagctctcccggttaacgcagagcacgttaaatatgatagtatcaacttgttaattatatctatagtgtctcaatatatatattttttgacttgcaataaaataaatcaacactttttgtataatagaaacattcaggcctctacatccagatgtgtacttgaaaaatccaaaaaaaaaaaacaatagattatttgcatgctatcatgattctttaacacgttataaattaaagaatacttcctctgttcttttcttgtattgaactaaccatcgttatatattaaaagatagagatagtataatatataaagattaacgcgtctatttttattttaactagaatatgagcaaattacaaataaaaatgacatattcgctccttaccattacaaatgactactatgttctttaaaaatataactactgttgacagttagatttggtacaaatttagggtgtgtttagttcacgctaaaattaaaagtttagttgaaattagaacgatgggatgaaaaagtgaagtttgtgtgtgtaggaaagttttaatgtgatgaaaaaaattgaaagtttgaagaaaaattttaaaactaaactctgccttagaaaggagtcagagccttttcgcaaaggtcggtcggacaacaattcataccacggtctgactggatgccttgtgatttttttttgtggggatctgaccagttgcctactgcagttgaccaagggtttgtttagtttccaacttttttcttcaaatttttaatttttccgtcacatcaaactttcctatacacacaaactctcgatttttctgtcacatcgttttaatttttttaaacttttatttttggcgtggaactaaacacagcccaatatggtttaaccagcagccccgagttttaggctaaggccttgcttagattccaacttttttcttcaaacttcaaacttttccgtcacatcgaactttcttacgtacacaaacttctaacttttccgtcacatcgttctaatttcttcaaactttcaattttggcgtggaactaaacacagcctaattgccttttgtttgtgtgtgtgttttctcgcttgggattggatttctcaaatcttaatgtatatctccaagcctaatagagctgtttcaagagcaaaaccggcctccgaaatacaattggcaagcttgatcttgaccctgtctagcaagctcatccattaccatgctagctagaatgcactaaaccttgctctgattgatacaactcagcacagatcattcttagcagcgctggtagaatattcaaaataaaaccgtagaatcattctaatatgtccataaaataaacaaattaaagcataattgcatggtagaatcattcagatttctgtaagcacaaattaatgtgtaagttctcaactcgaaatgcagtgtacacgtactatatataaacttaaacatcatatatcgatggagatagctagctactcctagatacgtacggaggagttaattaatctgattgggggcaaattaaaatcattggcatgattgttcgttgttggaacatgggcaccacatgcaattgatgatctgatagcaatccatataaccgtgtagatatctagctaacaggggtttaatcaaccgcaggccggtacagaatttaaaataaatcaaattagcaatgtggtcatctaatctctggaccctggcaagacatatatttaatgaatcaatggggtcacgaagaaatggagtactgtgcctgtatgtgatcttaaaatgatgtttggggagcacggaaagcatgcatgtttggaacacatgaatatgaatgaatgaatagtagtacaagtaatggccttgtcgccaaaaatgactcaaaccgtaccatttcatctgaaactaatgcaatttaatggtcggtggtttattaactcatcgagcaaattttctgtccaagggcccggagtatatattgttaacatttcaaaacccaatacaaggatttttgcaggactggaactcttgttaattatggcggaataggagatttaatttccatgtaaaatcttgtcgatttctccaaaatttgtgtgtgcaagttcaacaatccagttgaaaattgatctcatatgttgtctatactcttttaaaagtaaataatcgtggtgatgagtggcgaatctatcaccactctcatcgaaaaatgaagctagagggctcacatgtcattgcacgacaaattctttacttttgtggaaaggaaaaatgattgtctgaaattagatggctcacatatcagtaacaaataaatgtcgaaactaagagatgatatatacatatacagaaaatgataaaatgatactaataacggattaatgacctattgtaacacatgtgcaatatggtagtaattttaaaatattactgacaagtcgatttatgctataataaattttggtactgccatttttttaaagtttcctcaactatattaagtcaatactagagatactattgaaattaccaagtgttcactgttccatattttattactagatgttttgggttggtctcaagtcagaaattttaagtttgatcaggcttataattcttttagcagcatttgtaaacaaaaacaaatatactataaaatatattaaatggtggatttaataaaactaatttagtgttatagatattgctatatatactttttatgaatttagtcaaagaagtttgacttaaaattaaaaaacatcttataatataaaatgatggagtatatttttagcaacttatgttttggtgttaaatcaaatcagcattgtgtcaagctctatacgctcataaatatttgacattacgataagatttggtaaaacttttgaagctttggcccattaacaatttcccaaatgcttagtttaattcataaaaaaagatgtatgtatggatttgccttaaaaaaatactaacataatgacataaatttattgtttcattcgtttcaaaatataaattaaaaaatatattagtacataagtatttttaggcacagattctaatacacgagaatctatatattttcagctaaaatgatatgcttaggtaggtaatttaaacaattcaatttgaccactaagtcgattaaaagataacattttttctctatcttagttttttgctaaaaatcatagaaatggttatatttttaacaaagggagtagattttgtaaactcgtttcaatataaaattgatggttaaagctataaaaagtttgactaataaatcggatcattggaagcgaaatatatatattgaagctgaaattcgtttgtcatggatcggagctgaccgttgcaaattctctatctgaaagcgttcattcgaatttgagtagctagaaacagagggaagggtactttattatcaggcttacccaaattaagtcgagacaagaacaggaagtagacggagaagaagatggccggagagtggagacaccgggaaaaatacaaaggacgagctaccgccgccggccagcacagcgccgcaatgtactggaccagcgcgaggcgacgagcacagcgaacgacggcgtaccttttttgtttgggaactcgtcccggattctcttaagatttggagcagctccgtcaaagtttaatagcatagcaactgttgaattaaatttaaaaatatattgttcattcaattttttctcatgaatattcgggatgcaaattttttttataaatataccgtcgatctcgcacaaccgttgcgcgaaaccgagatgggtgtgacgtcatgggcggtatcgcgcgttgaaagtgcgagagcgcacggtctcgcgcggcgaaggcacgagagcacgcggtttcgcgcaatggaagagcgagaccgttcggtctcgcggaatcaaacagcgaaactgttcaccggttccatttaattagtgcttaattacttaattagcaattaactaataatgattagtaactaattatcctaattagcgactaattaattattaattaatagttaatcaagataattagtcgctaatcgaatcagcatggcaccggtctcgctcagtgcttgtgcgagaccgttctgtctggctgtaccattccacgagaccgcgccgtcgtcccgcgagactgcgcggtctcgcgccttcgccgtgcgacaccgcccacaacgtcatttccacgtcattctcgcgcaacgattgcgcgagatcgactatatttacgcaagaaattttacatcccgaatatttgtaagaaaaaattgaataaacagtatattttcaaatttaattcagcaactgtcgacaataaattgtgtgtcatatcattttaaaaatgtacacaaaaatagagcatataatagttaactattaacacaataagggggtgtttgggaactagggactaaatttagtccctctcacaaaagcataagtccctatgtgagagggattaaagtttagccccactttaatccctccaaccaaacaccacctaagcaatacacatattttactaatacattttaaacaaaatctctctttccatacacaatactcaatcccatgacttactatatgtgttactattggatctcactttcttagagctcgtgtgtagttggctactagttttaggctgtgtttgtgttcgggaggaggggttggaacccttcctcttggcacgcaaaacaaaacatctattattgtgtgattaattaagtatttactattttttaaaaaaataaattaatataatttttaagcaacttttgtatagaattttttttacaaaaaccgtaccgtttagtagtttgaaaagggtgcgcgcggaaaacgaggaagggaggttgggaaagtgaggaaacgaacggagccttagttgcccactctctctcctccacatgggcattcaatactacatgacatctggataaaacactatgatagacattagactatagcttagggtatgttcggtagagttctaaggctgaggggctgtttgtttggaggggctaatccataagtccctccactctagtcccttttagcccctaaaataccaaacaagagggactaaaagaggctaaaactacctaggtcataagtccctgcgggaggtgctaattcggactaaaggcctatagcgcacctaccattaaatggatgaagcatgtaggtgctggataaagtgctactagataggtcatttaacgaggttttagtcacttttagtccctccaaacaaacaggatagaactaatgaggacttatgttttagccctggaactaatttttagctctaggacttatggaacaaacatgacctgagttatttcttcaactttcccaactcacattcctcgtgttccgtgcgcacgcgttttaatctgctaaacggtgtgttttttaaaggttgctatacgaaagttgcttaaaaaatcatattgatctatttttaaaaaaatagctaatacttaattaatcacacgctaatgaatcgctccgttttccgtgcgcagaaaatgtcttcccaatacaggctgcagaacacaacctaacttctaaggccgagtttagtttcaaactttttcttcaaacttccaacttttccatcacatcaaaacttttctacacaaacttccaatttttccgtcacatcgtttcaatttcaaccaaacttcctattttagcgtgaactaaacacactctcagggctggccctgactttttggtggcccattgtggatcaaaaaatgaaggcccccattcaccataaaaatacaagataatatttaaaaactcattgtcattaacgaatttcacactaataagtttaaaataccaaaaagaaatttctctagctcatttaaaataatttcttctaacagttctacatgcaaaattagttatgatagtgtcaataataatctcatctatatcttctcaatgcacaaagtagcctatcagggtatatatattttggaggcctctaatttttggaggcccagtacggtcgcactacccgcactgccctagggccggcccttcacactctaaatttaacttgaagatttatgtctggtacgggcgtggcggagcagcctcaagcccactcactttgattcagtttattttaatagcactttactctcctctgttttatttttagatagactctgagacccggtttagatgggactaaaacttttaaatccctatcacatcagatgttcgaacactaattataaatattaaacgtagactattaataaaacacatccataatcttggactaattcgcgagacgaatctattgagcctaattaatccatgattagcctatgtgatgctacagtaaacattatctaattatggattaattaggcttaaaaattttgtctcgcaaattagttttcatttatgtaattcgttttgtaaatagtctatatttaatactctaaattagtgtctagatacagagactaaagttaagtccctacattcaaacaccacctgaaaccagagtctgaagctgaagctataattgtgacaaacagatttcagtagcatgaacacgagggagggatcctgcatgtattacatagtactccctccgtttcaaaatgtttgacaccgttgactttttagcacatgtttgatcgttcgtcttattcaaaaacttttgtgagatatgtaaaattatatgcctacataaaaatatatttaacaatgaatcaaatgataggaaaagaactaataattacttaaattttttgaataagacgaacggtcaaacatgtgataaaaagtcaacgccgtcaaacatttcgaaaatgaaggagtagtcggtttcgtgcgtcttatcttgggtgtcgtcctgtctgcctagcgcctaccatgacaccgtcagaaacagtgagacaaacacgatacaagacaagcacgtactgtaccgcgcatacgtacagcaatacagcagcacatgagacaagaagacgacgaaatgaaggaaattaatcagccgcgttccgttcggcgtaggccacgcgtgtgcgttgggccacacacaactaactccttcggctacagacgtactctctctctctctctccgttccctaatataagagatttttatattttatttgtattgtttgactacttatcttattaaaaaatttatgcaaatataaaatacgaaaagttatgtttaaaatactttggataaacaaataataattctaaatttttctaaataagataaatggttaaacagtacagctaaaatgtgttatattagggagtactagcggtggccttttgttttgtgtacactaccaaaccggggtgttcatttctctctctctcagccgcacaggcgcacagcacaatcacacaaacacaagatcagctttcgcaaccgttgagtgcgtggagaccctctgcgttcgataaacatcggcgccgggggaaaaaaggcgtgcttcgccttgtctcgtccggtcgcggccgctgctccagccagcctccaggcagaagcaaccggtcaacggcgcaggcaacgccaccgaccgaccgaccaccggtagtgctcgtttctcgccgagcgcagcagtcgtggaggagggcctaaaacgccgcgcttttgaagagttttcatagaggcaggcggcggcatgggctttcttggtgccgcacacgcgtgcgtgactgcacacgatggagttaagccatgaattaagttcactttaggtcccttgatttgttgccgaatctgatatacgctccctgaaccgcagcgtcagatatggcgtgtccctcaactcttcgaaccagtgctaataagattccaaaatgatttggactgtggtttcggatgacttgcgctgcccaccgcagagctgacccttctccttccctacctcgtcgttgacaccacctcttcttgcatgtgcttcccacctacatccttcaccgctaagcgagcacaaataaaaccctatgtctttgagctatatagggctgcctacttgccccgatccatcttcctctcttgatttcttgctcctatgcaggttcaattcttgtggtacgagatttgggcgtacgagataaaaaaccctaatatttgcttggttctttcacgcccgaaatttctatccaaaattccaaacgcttacatgtgtataaatcctcgtccaggaatcagccgaggcacacaataacaaattgataatagagtacaaattattactctaatcaataagcgaacaaaatgtcattacagaggtagatagttcctctcaatcaataaagtcctaagcagcggaaaaaataaaagaaacagcgcagacgactcctctccacaggcagcttgaccagggctacgcctaatcatcaactccatcaacatcactgtagaactcctcctctgattaatgattgcaaggtgagtatatgacatactcagcaagccacacagcaaatatgcaagtgcacaggataacaaaggatggcatagtatagtctcatttgcataaacaacatttaataaatatttcagaatttcataaaacagtagagtattaaataaacagtattaaaccaacgctatacaacataccctgttgtataggcccaaccatcatgcacaaccaatcccggctgcacaagtctatctccaaaccaggaattaaccattccaaatcaggagctaaacaagttaataacatcatcatttaatatagtgtgggggtgagactaatcacgaaagacattgttagacccgcccataaccgcggacacggctattcgaatagtttaaactctgatcagaagtgtaccactgtacccacaagacacaacctcaacatcatgtcaaccatgcgtcgcgatacttgacaagtacccgaatagagagattgtgacaataccctctatataatacaattcaaagcagtgcaccgttcccggatcataatcacccccttataaacaaggtatggactccccagtgacccccgtgggcttatctccgccacttcacagtctggtgctctactatgaaccatactatacagaaagtaaagccgttgcccacgctggcttgtggttggcacggtaaatgtttcacaaccgaaaatcgtgaaccgatccttaattgtcatgagcacaaccatcaaaaccatatgctcacaacccaccattatcatattttaattgtcaaattaattaattaaccaatcatgattaaccatcatgagctatcattaagccatcattaaataatagtgaatcttaaattatcccattagtgaactaatgtttctaagcatggctaagcaattatacctaacatctagctgaaccattatatgaagctcaactagtcaaattataatagcccaaggtatcaaagaataaagtaaatatgtacaaaagggccataacaaagaataggttacttccacccaatgacattcgaaaatagatgcaatagttgaatagaaacaatagctttaaataggatcaacatgctcaaagggttgtttgggatctgtgtgacttgccttgctggccttgaaaatcctcaaagtcttctcctgcaaaatcggactctccgggaacgtcggaatctaaagaaaaaagagcaaaatcaccaaaacagcacataaacaagcatgaacagtacatgtggatatttttaacatgtagatctcaattttagaaaaatttagagacttgaaccaactaaatccgagctaagatgaattagttatgaattttcaaagattaaatcgatttaaatcatttatatggattttaattgaattatgacgcaataatgaattatttttgaaaaggaaaaaggggtttattgcgtcagcgggctcggctcacggtggaccgggtgcacagcgacggttcacgagattggacggctgagatctatcctatctacaacggacggccgagatcgattggatccaccgcggctcacggatggacgacgacgatgacgtcagcgacgacgtcaccaccagcggcgaccgaaccgtgcgagcttgtcggcgaaccacggcacgtgtaacgccccgattttcgttcgggtttaaaaatcattaaataatgcattttctagaaattaaataaaagttaaatcaatttaatcaagtgaaataatgggagaattaaaattttcccttaaaaatcattggccgggaatattttgtaatattctttgtgccttaaaatactctccggatttttccgtgaattttcggagttcaagaaataattttaaagtcacaaagttcattaaactaatttaaataaaaagaaaacaaaataaacttccccttcctccctttcgggctcggcccaaaatcctctctccttcccctcccgcggcccggcttgcctccccttttggcgcaagtctgcttttcatccctcccggcctctcctctcactcaggccgacaggtgggacccgtgggccccacctgtcatccccaacctccagcccgggccggcaactgccatggccgcccgagccgcccacgtcgccgcccctccccgcgcgtcttccgattcccgcgcgcgtgtgggcgcggtccaccccacgtcatccccttcctccaccatttcccccacttctcccctccaaaaccggcgccaaactgcccccactcacccatgtcgccggcgcccctttcccccttcaaatccgtcgccaaccggcctccccgtcgactctcgaggctataaaaacgatccccgggctcccctcatccatttcccccattttccccaagccgccacgccctccctcgctctccccgcgccgagcccttgcaccgccgctctccggcgaactccagcagcgccgcgccgccactcccgtccaccccgcactgcgccgtcgccctccccggcaccgcagccgccgtgcgcaccccggcatccactccgttctctccttccacccccgcagcaccattcccaccgcgaggccgagcttccaccgccgttcgccgccccagccgcccgctactgccgccctaggggctgcagcgccgcgccgtttgtgtcgtcggcatcgcggtgccgagctctaccccgacccctagtccttttcccctccccaactccgaaacaccgccaccacgtgcaccacctccctccgccgtcgccgctcccgcaccctgccaccaccgcagccggcttcgccgccgcgaggacaagcctgtcggccgctcccctcccccaatcgaccgccaagctgtcacctccactgccaacccgaggccgccgccgctttcgccgccccggccaccgtttaccgccgctcccggccgtcccgagccgcacccgtggccatcctcagcgtcgccgcgtcgtgccgcacctcggttgccgcccctcgccgccgaaattccacgggagcccgcttttccccgttcaaggtcccggaggcccccggccgtcactcgtcgcccgtcggccgccgttggggcgccgccgtcgtcctcgcccggggagctccgccgctacctcgcctccgtccggtgccgtgccgcttggtgagcatcccctttcctcctcttctttccgccgcccttcgcgcgccctctcgcgccgccgctcgccgccggtggccgtgcgccgccgtgcgtcgtgtctcgaccgggccggctctgagccgtgcccgtgctctgggcgccctgcctcgtggccgcccgatcggctcgagctgatctgggccatcggttcccgtggaccggcggtggaccaccccgtggtcccggtccacggtggaccgattcccttgacccgctgacgtgtggggcccgcctatcggcgccggcctttttgatgacgtcagtacttaagcttttcctttgaaaaaataattaataattgcgcaataaatcgagtttaattctagaaattcatttaaatggctcaaaacttctaaaatccatatctaattcattcgaactccgaattgagccgttcaacttgcaaaattcatctaaaattgagctctacatgtttgtttactttttatgtactatttccttggtttttattagagtttttcctcgttttgcgtgccagcgtgtagtttccgtcgtttcggaagtccgcggtcgcgaggaaaagagttcggaagatcaaagtgaagaagcaaggcaagtcacacattccccttgagcatgttgatcctaatttacaaatgttttactgtttgcaaataaatatgcatgttttgctaattacacgggatcagggtttacctatctgctcgcttgtgccatgtttacttgatatctatcctttgtcaacattgggtaataaatcgactagctcatgttacttatgtgacttagctagaactatatgcttagccatgcttaattaccactagctcagttgataggataattacagtattagacctttttagtatcagagtgagctgcgtgctcgagacatctggccatgcttcatggtcgtaattatccaactaaaatacaactgaatggtgggctgtgggtgcatggttttgctggtcgcacccatggcagttaaggaccggttcgcgggatgccctggaagaacttatcgtacttaccacaagccagcgtgggcaacggctaggcttgtagtgtagctttcctctagtcgacgcatccaggcaagggtgggcgtgatggagcggggcgggccctgcgacggcctctgtcgcttccggattcacctaggcacgagaggggactgcccgctgccttgcgaggagtgggggtgaaacctgaggtgtggtgtgcttgattagagggggttatgcgaagggtcctgtcacggcctctttccggtatgtcgtggtggcatgtcggcgcacggaaacgtgtcgtggggctgtgtcttgtgggtacagttgtacacctctgatcagagtaaaactattcgaatagccgtgcccgcggttatgggcggtcgaccagattcaccgtgattagtcccatcttaataaatcgacccaatacactgtagtccaggtgggttggttgggcctgttcaacgtggtgtagcgttgatcagtggagatttaatgttactttaattactcaacagttttactgttttgctcaataaaatgttttacaaccgcctttatgcaaatagccacaaaccgtccttgtgttacccttgcacgtctgcatcgttggtgtggcttgctgagcatggtggttgtactcagccttgctattattcccccttttcagaagtgtagtgcttctgagttgaagacgaagttagaagaccaaggctcagaccccagttgagttttgcctgtggagtggagctgaagccccgctaggatcgcctttttccgctgctgtcgttctgtttcagtgtgaggactaagtgcctcttccgtaagtattttacgctttatttacgtttggaactgtatattacttgtcgttttgtgtaccctggctggtcctggacagggatttaatacgcaaaatagtctggaaatttgggttaaatttctgggcgtgacagcacgacagcgcgaacggaaagcacctacgggttgcgggcggcacggcgaactcaccggcgaccaaagcgacggcggacgatgaccggacgacgtcggcgacaaggaagaagcggcggcaaccttcggcttgacgacggcgacggtgctccggcggtcgacagcgacgacgaaggggcgaacgagaacggcgacgagacggcgaccacgacggcgacctccccgagcgacggtgacgactggagcgacggcggcgcacggctggagcggcggcggcgacggcggcgctagactgcacggggctagggcgctacgggcggcgagggacgaaggcgagggtggcggcgggtagcggcgggcttgggggtcaatttatagcggctaggaggcggcgacggaggcccacggcgaccggcgacgagaaggaaagtctagggttcggaggagagagaccgatccgattcaaccttgaatccacgaatttccaaacgattttagccgatgattccaaaagagaaaagatagaggagatcgagaagatcatttcccctctattgatttcatcggaaacggaaaggatcggccggattggaatggcggcggcggggcgcggctagggtttcgccgggaggaagacgacgggccggccccacctgtcagcgggcgaacgcgcgcgcgcgggcggctgactgggccgattgggccgagggagagagagaacggtttgggccgactttcggcccaaagcctaaagaggattttaagaacttttttcaatttaaattattcattaactgcaattccatttattaaaaatacttctttagctcaaataaatcccagaaaaatctaggaattatagaattaagcaaagtatttaataaaattttatctggccccattttatattggaatttatttattaaaattagatcttctcttctaggctttttaaaataaattctaataattccaatttaacaacaatttataatttggagatttttagggtgtgatagttctccctatcttgatttggctttcctcaccgccgataagaggatgttgggggatgggaaggagatgctcaaattgcggggcagggcggggatttcaaaatcaggcactatattgactgggacctcgagtacatcggttttataagttgagagatgcgttatatctagtattgttgttcgaggatgtaattcaaactcgccaccaagacgagggacctaaagtgaacttattcctttgacggctacaacaaatgttgctgctatgggaagaattaagggttaattgaattcatgtcactataaattttacaattttaaattctactattattattcatgtaattaaaatcatgccatcacaacaaatctaatgcccctatctctttgctttaatggatgaccgacatggatagcgctagtggaaacactgaccagcggcgatggtggaaagatgacagcgactggggaccaagacatgcacatggtgaggagggagtcacaccaaggattgacgaaggtaaggtagaacgtagaattggcagggatggtggccctttccttctcggtcaccgctaccaccttcaggatagctgcatcgatcaccacccacggatcctcctgcttcgctagtttcggcgccgtaacaaacgaagactagttgttgcctcaaccatcagcgtagaactgtgtcgaggcaaccgtaatagagctctaccaccggttgtacacaactatgcctaaacctgcccgccagggatacaccagggccgtttctactggagtggtggtgcctcttggctcgagcaccgccacaagtggcttcgcccagatttggagagagcgagagagggggccgccggatttgctagggccgaaccctagcgccagaacaagattcgagccctagcggcattgccgttgtttggccgtcgtccttgcatcattagcgtcttaccatcctccacttgcccccgcgtaccgacatcctctgctcattctccctgcgccgctagaatcaggctgtgtttgaggggaggagatataggagattgggaagatacgcaaaacgaggtgagccattaacacatgattaattgactattaagtattttaaactttaaaaatggattaatatgattttttaaagcaactttcctatataatttttttacaaaaaaacgcaccgtttagtagttcggaaagcgtgcgcgcggaaaacgaagcaaaactcactcacaatcacccagatcacccaggaaagaacacagcctcagtcttcattctcgcatcgcatttggctgccgtcatcctcgtgatgtcctcgtcccaaggctgacaactcacatgatttgcttggacattggtgatggcaaggacagctacggcatgagggcagggacattttagtacatacaaaaatattgcctaaaaattatttgaaacttgtttcaggcgtacagtgtggtatggatcaaattttgtgcttcttatgatggtatggtttcagttatataaatagtaatagattttaaaacctcaaaagttataatattttataatgatatagatcaaattaacgcaggattaagagggcagaaattgactcggcacgtttctgcatactgacacgcaactgtctgtcagcgtcaaaattaaacatattctttttttacgcaaaattaaacatattcttatgcagcacgtggtatcactggcaaattaggctgttgctttctgaagcggtgctgtgtgttggaatcttggagaggaggtggatatgtactaaaaaactgacctcttaatatcgtgctcatttagaacgtagaatctgatatagaataaataaataaatgctgctactccatccaattttctctactaggggttatcagttataaggcgtgctcgtagtaaaaaaacaaccgtaaaatttgaatttctttagaagacctaaaatttaaattctattaggtatatactcgactgcaacggattcatatgactatatcattgtgaataggtgcacaaatatgattactccctccgtgttttaacatatgactccattgactttttaataatgtttgactatctgtattatttatttttttgcaaatataataatatttatgacatacttaatgaatatttgatgataaatcaagtcacaataaaataaacgataataacatatttttaataaaacgaataatcaaacattggtcaaaaagtcattggtcaaaaaatcaacgacgtcatacattaaaatacagagggagtattttctttaccatcacgcgtgaggggaggcaggctaatgcgacattatctttaaaatcgaatggaagtaaaactcaaaatttacaaagtagggcaggtcaaacagttctctttcaataaaacttgcccaccaaagtttaagttctaaacttgacatgtgtggtcgtatttgtcgattaattatttttccagtagagagcgatgaacgatacaattatgacaacatacttatagggtcataaagattggtagggtaaagttacgctgttcaattaaatgtggtttttattagggataatcctaatctacgttatatgtaatatgagagagtatgagcctctgtggcacgaattgagatcctctgcctttaaatacatcatgccttttattactgacacgtgatcccatatagtttatcggtttcacatgccaatgacaaacacattttgaaggtagtggagcctgatccccgtggcacccctctggcatcatgccaaacttgccaagcgagaaaagcgatcggtacacacatcgtggtgaccacgaaggaggagccagccacgtggaccgcttcaacgccaggagatccgcgcgccacgtcgctgccctgtggggccatccctcgagggcatctcaatctctatccatcaatccggcccggccccacctgcagttggagagagcgcgtggcagcgtccacgtcaccagtggggccctggaacgtactacgccagatgtgacctgatgaggttttgctaccctcctctgtcatctcgtcattactgacatgtgggcccacgcttcaccttggcccaccggtcattggcgtcctggttaatgtgcgaaaatcaaggagagtggccatcaacaggcaggagccatgagctggcccccacgagaagttgttggtgttgggattgggaatctgttggctattgcttgggatgaaaattaaaggaaaatctataaattttgttctcaaatgaaatgaagggttgatttggtttgtggcctaaattggtcttaccaattcgtcaatgtcaaattttggtaacttttagcatggctaattttggcaaaagtaaaattatgtttggattgaagccaaaatagcctaaattaactgttaaaatggcatatttttttaggtatgtcaaaatttggctccaaaccaaatagacaataaacactattgaaattgccaaatattggtaaggccaatataggcctcaaaccaaaccaacccgaagttaacctgtgatcctcctcctgatcatgtgctcacagaggttaatttctctgagctcagcaaaccatgttcagttaatcaatttttgccatcaagttagagtgaaaacatggtgaaaccctgaatacacttggactgggttaacgagatgataatcgtcccatgacttggaacaaatggccatcatgacagtcacatcaatatattattagcactacatcatacacctaccaaataataacaaataaccttaagtccttaacaaataataagtgcacaaaaacacggagaaaaaataacaaaaaagatatccactcgcaaatcaaagaaagactggcagagtaaggctgtctttagatcacactgaaattttggttgaaattggtacgatgtgatagaaaagttgtgtgtgtatgaaatgtttgatgtgatggaaaattggaagtttggaaaaaaactttggaactaaggctatgtttagttcagcgcaaagtttggattttggttaaaattggagatgatgtgaccgaaaagttatgtgtgtatgacaggttgatgtgatagaaaaggactaaagtttgaatccatctaaacacagcctaaacaggacctaaacaaattcctaactactctagctaaaatatcgcagaaaccctccccacaaattaattgatctgcttcctcctcccctcctctcatgtcattgtcctgcaatacacgaggagcaaagagttgtgtgtaatcctcctcctactctgggtcagctcttaatcccttcaacttccgtcggttggacgccaccggaagccaatccctgtttggtgttttacccccaattttgtcagattttttggagcgaaaccacgagctgtttgaagtgttcggcttcggaatctctttcttggagttctaggaatggggttttgatacaaagattgaagcctttttgttagcgttggtgcaaagattgtattgtattgttttttttttctgcgatgggtggaggcgtcacggagcggctcccggagggcagcagcgagccgctgctcccgacgaagcgggagggcggcggcggcggcggcgagttcgccggcgcggtgttcaacctgtcgacgaccatcgtcggggccggaatcatggcgctgccggccacgatgaaggtgctggggctcgccccggggctcgtcgcgatcttgctcgccgcgctcctcaccgacgcctccatcgagctgctcgtccggtccagccgcgccgccggcgcgccgtcgtacggcgccgtcatgggggacgcgttcgggtggtgggggaggcggctgctccaggtctgcgtcgtcgtcaacaacatcggcgtcatgatcgtctacatgatcatcatcggtaaaaaaaaaattcgatacaacaacctgaattttgacttcaatattgccttcactatttagttgttcatgtgactctagaattgctgaatatttcattttcttttttacttataaccatttctctagaagttatatcatcagtatcggttcgtgtggaatgtagagtagattgcaaattctgaactaactcaaatgcaattgagtaatcgattgaggaagtttggccttctaattgtgaactgtaggatatgatgccttctgaataaactcggcagttttgcttacatgtgagatttaagttgcgttctgcattgtgctgtagataatcgtaactgtttatttgaggccataatttcgtgctgaggcatggcagtgtatctgacatacacattggggtacttcactctaggtgatgtgctatctggaacctcctctggtggtgagcaccattatggtgttttagaaggatggtttgggccacaatggtggaacgggcgtttctttgtcctcctggttacaactcttgttgtatttactccactggcatgtttgaagcgtgtcggtaagtagtctcttcacttagccttatactttcgtgagattttattttgtaccattttgtcgtactgccaattcatgacatcgctatgtttttgtttgtttcttgcagattcactgagttacacatctgccatatccgttgctctggcagttgtttttgttattattactgcaggaattgctattgtcaagttgataaagggacaaattccaatgcctaagttgtttcctgatgttcccgacttggcatctatttgggaacttttcacagcagtgccagttcttgtcactgcttatgtttgccattataatggtatgagacaaattgaagttttgacttgttggtgcattataaaattttattttagtagggaagactttctttcaattttcttttagataatgtcctgatgtcttataaaagcccgaatagggttgcttacttctaagttttctaaagagatttgattgatattttgcagtccacccaattcataacgagctgaaggacccttctcagattaagccaatagtacacacatcattggttctatgctcaactgtctatatcacaacaagtttctttggatatctcctctttggtgaatctacgctgtctgatgtgctcgccaacttcgactccaatcttggtattccatacagtcagatgctaaatgatgctgttagagtgagctatgctgttcaccttatgcttgtgttccccatgatattccatgcactacggcttaatttggatgggcttctcttttcctcatcaagtcctctgtcttccgacaaccgaagattttctgtaatgacagcggtacttctcctagttattttcctatcagcgaatttcattccgagcatctgggatgccttccaatttactggtgcaactgctgctgtgtgtatcgccttcatttttccagccgcgatcactctaaggtaagttaatggattaatgttcattgtgatgcttttattttgttccacctctacatatattatgaaaaaatggctgggatatttattccgttatctcaaaaaaaaaaagtgttatagtacttctgctaacatgcacgaagagaagtgaagaattctacatttgcagatttccacactgtagtaattgcttgttttgatatcaccttttcaatgttgtgatgttatggctgtctaatttattttgcttctaattttgcagggatccacacagtatagcaaagaagtgggacaaaatcctgtccatcttcatgattgttcttgcaattgtatcaaacgtagtagctgtgtatagcgatgcatattcaatgttccacaggaaaagttccccttccatagcctgatattccaaaatcctattggcgagtcagtggattctttatctgaaagatggcttgtacattagctagcaaataaaatcattatttaggcaagtatttacgggatttattttacggtttatttggcaaacaacccttgactcaattatgttgagttggatgtatctataggatgggtgtgtaaactttggtccgaagtgttttagtccaatgtacaattcaagatcaatttgaatcaaatgtgaattatggagttattattgtaacaaaagataaacaattattttttcgaatgtaaatcactgaaatggcaactctgttcatgcatttgcacttctgtataaacatgctactaatctggtttcttggatacaataaaattggtgctttttgttgtttcttgttgaaggtgtcattccagctgtagccgttggcttagcagaacagccttatccgctaatgctgcgtttcgttgcagcagattaaaaaaaatcatatttatctatttttgtatttaaaataatcagtactcaattaattatacactaatagctcatttgatatcttttgaatcttctcctttcttgagacattgttttggagatggagatgaaacactagctgactttatacgacaactgcacacattcgtcgtatgcttcttgagacattgttttggagtagttgtggaccttttttccttagatttgtttcggttattttgattacttttctttactgaccgtgtgcatcctaatagatacagaagtggatagtgtaatttcatttctcaacaaaatcttactattatatgatggaaacgaaaaatgttagcaacagatgatgaagtaaaactaaagatagtagctgcatttttttttgcagccccatcgtttggttgatttgaggaaaaagcgaaacgacgtatgtcggtgatatgggcctggcggtatgcgaagtatgggggagtcaccttcccgtccatccacgcggccctacagcctggccctcccccaacacctcgggcaacgcagaggcagccagggggcctcggggtgccacgtcacgcccctcgagccctcgcgttgcctcgcctcgaggccctcgcccaaccgccacgtggtgaggggagcgagtggggcggagacccaggctgaaccatcatcaatgcgcggcgcgccaaccgtccctcaccgcatttaatgcagtaagggcggacgtgcggcgctgcccgattgacccacgtcaatcgggcgtgaccagactgtgaccggcctgtcgccggtcacgtctgatcggacgggcggtagtgcccccacgttccgccctgtacccggtggagtgggggcaggtatgccccgtcccatcgaagcatcatctagagccctctccacatgagatggaccgccacaagtctccattcatttaagagggaatgacaagggtgtcccccgtgtcaggcggggggcggcgttgggccccactcgaggacggacggctgcttagcttccgggcgaaggcacgaatcgtggtccggtctaagcggagtgggtccccctttcgtgaaggagtaggtagaggtggtgtatgtggtatccccttgaattataaaaggaggaccttgcccaccgaggaaagggacgactctcggtgagcctaaacctcaggggaagaagagcgagagtactctctggagtgtaggaacctttgtaacactcagccataaatcccacacacaggagtagggtattacgctccatagcggcccgaacctgtataatcccggctctcgcgcgtggtctcagaaaactctaggctgatacatgatcttgatcagcgcgccctttcccccggtcgaactcataaaaggggatctctcgatcacccgctagagagggtcacccctcgataacgtatttgcaaatgaaaaatagtttgcgaataaaacttttatatacgtattcttaacgatataagagcaaagaccaaaaatatactacaataaaaaaaaatcccaaaatcaactccgaatttaaaattgaaaatacaaaatttgactcataagctttaagcgaaaagatgagccgttaatcttgattccggaccgctggttgggagatggacggcgtagattgcccaacccgcaccgcttagccaacgccccgccgacttggccgcgctctcgccgccttcttcccccttgtcgccgtcgccgagccgcctccgcctcaccgtgccgaccaccacctctcccaacctcgccgtcgaatcctctctctctctctcgtctccccgcttcgcttccacctcgcactcacactcccatggacccctccatgcctccgcctccacctcgaaaccctaacccctcctccgcctccatgccgccccccccgccaccgcccaagttggagccggcgtccaagcccgaatccactaaccctaactcctccatgccgccgcctccgcctccactcccggtggagggtgcgagcactagctcctctatgcctccgcctccgccgccacggcccgcggcgccgccgcagccggaggtggagggggcggacgcgtcggccgaagggggcactagcgctagcgattccgaggcggatgaggcggcggggaacttaggtaggggctccagggatattgagatggcggaggcggcggcgccgccgccatcacagcagcagcagccgaggccgcgtgccccgtacgccatacccgagtggagcgccgcaccgggccaccccttcttcctcgaggttctcaaggacggcaccatcgttgacaagcttgacgtgtcagttgctgtctctcttcacccttagcatgattgtctattgtctatagaacaattgccactacctctttgctcgtagcctcatattttggttagcgctcggggttatggattgaaaatggcatgaatgtgtctgcttttatattcatgtttggtgttacatgtgacaggtccaggaaaggagcttacatgtttggtcgaattgatctttgcgattttgtattggagcatcccactatttctcgctttcatgctggtatgttactatgctttcatcattgtcttttcaattatgacataggtaaaactgtagaagaatcaagattcaaaatcctggtgtttaacttagtggctagcttgcatgttccgaatggttttgcattcttaaaaattgtcttgtccttgaggggttttgttgctgatgttagaaaaggaaaatggcattcagtctcaggaatagctttttgcatcatctttttaccaattgatcatatatgaaatgttgacaaactggtaaccagcctgtccttgttcttttcacattgaggagaacaaagcataattgctattcatgatgctgtgatttccgtgaacatatatgaaatagcattgcatgaggaaccgatgaaacttacccagtaaatttggcttgaaaggttaaactttcacttcaaactctacaacttgtgaataccttcagccctaaatagcagaaaaaaaacacaacaaaattcaagaatttgagagaccaggttatgagattttcttgtgcagagctctattatttttaacttacaaaaacattttatttcaagtgtttatgtatgagcacttgttgcctttcttgggaggtatccgtctttaatattcgaataatctctcaactccagtgtcactatcatagtggacattatttgctagctagagaaggaaatgaatggattaggtaaaattggtactattagtttgtaatatagaatattttcttgtttagtgcttaaagcaagacattcatgaactgcttttatgctattttagttttgcagtttagaaatgatggggaggttttcctttatgatcttggaagcacacatgggtccttcatcaataaaactcaggtaatagtcttctgtcatatatcttacttcagagaaagcttcccccttatcaaagctcaacatatctttataccttaaagctttataagcttttgtcatgagtgcattctgtcgttgctcgtgctcttttatttaaaaagcagtgatttatgtcagtagtttcttatcctgttgcgttttagttccatcatttatctcaaccttattgtatcgcattgtaaattttaagaagtcacctgccacattaattatttatatggaacattgcagtaatatttacaatttgttgttcatattatattctctgatgttatttgtgaaaatactaggtcaagaagaagatatatgtggaaattcatgttggagatgtaattcgatttgggcagtaagtgatcttgttaattaattgtttaatttttttgttgcctaattctatggaacttactggcccttctttccttaaatgtttctattttttttattgagttggtgctgttgttacttagtacaattggactaatcttctcgtcgtatttgccagatcatcacgtttgtacatattccaaggaccatctgagctgatgccccctgtaagattcatctgttctttcatattttcgttaccttatttggatcgttcaaccatccacaattttgtcagtgttattgatgatgtagtatgctgtttattcttatcaaattctgcttttggatgtcatattgaaatgaagatttttttctaccagttaggcatgttcgatttcttggcagtgatcttgtaatactttctgaagtagtgccaattgagtgtggctagtaaaatcatagcatgctatatcagatctgtgcttatgttggatttctttggagctctgtttctttttgagaggttcctttatgcaatgggtcacacctataaaagcttctaaaatacttatttttttccagaaatagttctcagagaaattcatttcaatacgaagatatattatcatgtaacaagcaaacatacatgaagttgaactagttattcttcattctaacttcactttgataattttaactgttaaaaacctcataatttgatcatgttctttgttattacgagggacattttcacatccagtgaatagtccagtgaatcaaattaacctatcctgttgtttaaagttgcttgaatttacgtatttggcaggaaaaagatatgcagaagcttcgggatgctagagttcagcaagatatgcttgatcgtgaagcttcccttttacgtgcaaaaaatcaagcagctttagcagagggtatctcatggggtatgtctgaggatgcagtcgaagattctgcagaggttagttgtttttgcaagaattatattttgtatattgataaatttacataaatatttgtgatgcgtgtaatcacgtaaactgtgttttattgaaatttccaaagttcatatttatatttcagcattacatcatttgttgcatttatattaggatgaagctgatgagatcacatggcaaacctacaaaggtcaactcactgatagacaggagaaaacacgaagcaaaataataaagcgattggaaaaggtaaacattacttgtgctgactactgagatttgatctctatgcaatgttctttgtgacttagcttaaccaactttcttgtggatttataacttcattttatctggaaaactattatttgtgaatctgaaatgtgtgcttcttgttacatggactgtcaattctgatttctattgttctttaaaaagtaacttcaacaagtactgaagaccattgattaataatatctggatgctggaaatcggggatatgttgttgaaatttggggggtggtctagactttttccttcccatggatgcatatggtttgcacctctgcttgtcttacaagtttatctttctgtctttgtttcagattaccaacatgaagaaagaaattgatgcaataagagctaaggacatttctcaaggtgggttaacccaaggtcaacaaacacagattgcacggaatgagcaaaggacatctcaggttagtggatcaaatgcttcataccttcttgcactaccttttcatatcatattaccagtccaccaccaacgggtatcataacaaaccttttttcctcagcttatggaggagctggaaaatttagaagaaactttgaatgacagtatacgggaaagtcttggtgctcgcactggaaactcaaatcgtggtagtcataaagcaagtcttgaggaagaagatgacattcttaggtttgtcttctaataaattttgcctagcctgttatgcattttttgtttacgatatttgttggttgttatttgaaatgatattccttttcttttaatttaaatctagttagatatgaactgcactgctgaatttggttgatcaagcttggctactaaatttcctttagatagttactgcaaactagaacacggataaatgtactaggaacttctaccttgcaacctattatcaaattatttatattttatccaattgcataagttttgtcctgtctgctggtagacgcttatatagctgtacattgttcataagtatgatttaagaaatttatctttatatatgctcattgtcgtgtactgattaatggattctcaaataatttagtgacgaagatgacttctatgatcggacgaagaagaaatcttctagtcataaatccagtgagcagcaagtggagactgctgatagtcttcttgataaaaaagataccataaccagcgatattgaaagtaaaaagaaattggttgaagaagagaagaataagttggcaaaaagtgagaatgcggatgttggggacgaccttgatgcttacatgagtggattatcatctcaattaggtatggtgctgtagtgcctacaaggtttatcatctcagaattttgacatgcttcaattttccttaagagttccggtcaaaaaattttccttaagagtgtagtctatggtatcatgtcactaagaatctgttgctgcctgttcacctcggtgtttattgttgagtcattgaaatttgttgagtggtagttttgtatgtagttctttccatggtctgtaattgcatctggggaagtagtggtgaatgaaaataaggtaaatgagcttcatatagttctggtttgaaagttcccgtgatctcttttggaaacttgacttgctatttggtaacgacactggcctcaaagcaacatttgcaactgaaatgactcgacctctctgtacgatttgataatcatcaactctattttgggacaatcaagttcatctgagtacagttgcaattacccttcagcaatatgtcttgtcattttctctactactaaaaagaggagttgatggtggttgtttgcctatgcatcctcagtttagatcatttgtattgtagtatccattttctaaaaaatcccattatttacacgtgtatttagttgcctgttgttttgataaagttatacttgtatgtaatatgggtgcaatcaattagattagagataactattttttttacttcatatttgtggtgtgtttgtttttagatttggcataatgcacaggtactgtctagaacaattttaatgtagttgttaatcatttggtttggtctaaaaaacatggtcacattaatatggatattttagcttgtttgcgttgaggaactatgatcaatgttatttcccagcaatacttttagcttctgtgatagtgggaactatgaaatatttcccttttctttgttttcttctttacttattcttgcattgtacttggcattagttgataacttaatataaaccacgaatccatgcaacacttgaagttcatggtatgcaacaatttccttctaattatatttgtagtgctattttctgaacatattgatagatgtgtgagtagatatcctacagcactgatgcatggaagagattctttactctgattggacgttggagcagaggatacatatgctccattattaattttcccttgtataatacttccaacactcaaattattacaaaaatgacatgagtaaagttactaccaatatgctttcatagtagtattacatatctgaatatatagtaataaatattggtcattaataaagtggtgatattgttgactttgaagtgtagggtagagcattcaatgaccgcaagctaagttactaaagtatacgtcattgaaatatgactttcatttacagaacaatctgatattgcatcagtttttgtaatatttactttgtttaacccctgattagttttagacttcactcatggaaaaacaaagcttgaaaatgatgcatgtctgtatgcttgttttccatatttatgttcagttttatgcttgccacttttcttcactcactagtttgaactgttctgcagtacatgacaagattgcccaaatccagaaggagctttctgatcttcaaactgagctgggcagggtggtttacctactgaaaatagctgatcctatgggagaagcagctcgcaagagggatctcaagcccgagaaacaaaatctccagcatctaatgatagtctaagaccagagtccagaaagcaaaacaaagttgcacaaaacaaagcctcaacagaggag

SEQ ID NO: 6025 - DNA, 2900 bp, Oryza sativa
ggggaataagttctgcttgagcggtgaaaacgggtgtcacggtgtgaggtttctcgggggtgacggttagtatttaaagcacggcagtaacggtcggaaaacggtaaagtgcgaaacttgctcggagtcgatttacagcaaatccgaaacattaccaaatattccggacttggggggcatgtgttaacaaccgaatttggtaacatcagcgtcgggagagaagagtagatcgaagcaaagtcggaagcggaaatcgggtttgaaagcagagcaggaatcggctaaaatccagatcggctacgataagatcggctgggtatgagtcgtgttgggtaagtcgatgtagccgattccgacaatacgacttgtacgcgacatcgggttcaatttaatgtacttcaagatgattgccacgcatggatagagtcctgggaaggcaattgtatctattaattaggatattttatgtaaattccttatagataagtgtggggcaaaagtctgccgtaatgacttatggtatcttagagtttgttagagataatggtcatgtccgctatgggcatatcttgtaatcctcgggtataaatagaccccgagccctatgtaatgtcacaccctaaaaatcctaaatatataaattgttgtttaattggaattattagaaataattttaaaagcctagaagagaagatctaattttaaataataaattccaatgtaaaagtggctagataaaattttattaaatactttacttgattttatagttcctggatttttctgggatttatttgagccaaggaagtatttttaataaatggaattgcatttcatgaataatttaaattgaaaatgttttaaaaatcctccttttggctttgggccgaaagtcggcccaaaaccctctctctctcctccccggcccaagttggcctgcagccgagacgccgctcgcgcgcgcgtcccactcgctgacaggtggggcccacctatcggactcgtcgtccacctccagccgtcgcccggccgaaccctagccaagccgcgccgccgccgcccttccaaattcgctcgtccctttctcgatccgatgaaattgtttgaggggaaatgatccccgagatctcctctactttttcccttttggaatcatcgcctaattcgcttttgaaatcgccggattcgagtttgattcggattcgttttcttcccctgaaccctaatgtttccatcgccgtcgccggccgccgtgggcctccaccgtcaccccctagcccctataaaggacccccgagctctcctctacccgccgccaccctcgcctcgccttccatggccggtagagctctagcaccgtgagctcttgcaccgctgtcgctgccgcaagtccagccgtgcgacgccgtcgctccggtcgtcatcgtcgcttgggaaggacaacgccgggttcaccaagccgtcgccgtcctcgtccacccctccgtcgtcgccgaggatcgccggaagaccgccgtcgtcgtcaagccgaccgtcgccgccgcttcttcctcgtcgccgtccgccgccgttcgtgcctcggtaaggatcgctgcatcgtccactacgcatagaggccctccgtttgcgccaccgcgccgttgttcgccggcgagcatgcgcgcccgagccgccgccggtggtgacgtcatcgccgacgtcatcgtcgtcgtttcccgtgagccgcggtagaccgattagatctcggccgtctgttttggatagggttgatcccggccgttcgtttccgtagaccgccgctgtgcacccggtccaccgtgaacccgagccactgacgcaataatccccttttccttttaaaaaattattcattattgcatcataattcaattaaaatctatataaatgatttaatccgatttaatctttaaaaattcataacttattcatcttagctcggatttagttggttcaagtctctaaatttttctaaaattgagatctacatgttaaaaatatccacatgtactttttatgcttgtttatgtgctgttttagtgtttttgctcttttctctttagattccgacgttcccgagagtctgaatttgcaagagaagactttgaagagttccaaggccagcaaggcaagtcacacagatcccaaacaatcctttgagcatgttgatcccgtttaaagctattgtttctattcaactattgcatttatttttgaatgtcattgggtggaaataacctattgctttgttatagcccttttgttcttgattaccctattctttgataccttgggttattataacttgactagttgagctttatatatatggattcagctggatattagatataattgcttagccatgcttagaaacattggcacactactgggataacttatgcttcactattatttaatgatggcttaatggtagctcattatggttaatcatgattggttaattaattaatttgccaactaaaacctgataatggtgggttgtgagcatatggttttgatggttgtgctcatgacaattaaggaccggttcacgatttttgattgtgaaacatttaccgtgccaaccacaagccagcgtgggcaacggctttactttatgtatagtatgggtcatagtagagcaccagactgtgaagtggcggagataagcccacgggggtcgctggggagtccataccttgtttataagggggtgattatgatctaggaacggtacactgctttgaattgtattatatagagggtattgttacaatctctattcgggtacttgtcaagtatcgtgacgcatggttgacatgatgttaaggttgtgtcttgtgggtacagtggtacacctctggccagagttaaactat

SEQ ID NO: 6026 - DNA, 9893 bp, Oryza sativa
gttttagggttcctgctggtatcggctaaattgccttactagattagattaattaaggcatctaccatcttgaaaagctgttaattccttgattgcttagactttaggtttctctacttactttgagatgcatcatccctagtcttgtttagaaccctgaaaactaacctggaattaatcataattagagaaagtatcggagttttagccgatcttacctaatatacatgcttcttttctggttttatgtatatttgccacttatatagacagatcatcctatataatcgtatcaagtttgatcagtatcgtctcggctatttgaatttctaactgatcatgatttgatatgctcatatagattgatttgtttatataagtttgtactagagtattagctactactttatcgttatctacatattcagctctaaatatttttccattggctattttcataatattgtcttaaatcttctttcttaaacctaataggcagtgttacagccgatgaggcatgtttagggtcttttattccctgatctatcccgtccatagccgatttggtctaactacatcggctgagaccaccaatgatacgctatcggccatcgactgactaattatgcttttgtctttcttgttgattgcatgatcaaatcagctggcacgcctttgacacactcgaggctatccttggacctgcactggagttaagtagatctcccagtgtaacgccccgattttcgttcgggattaaaaatcatttaatatattcatagcatagccgatcagatagatctagcatgtatcggttaatactccgatactactttatataaagatgttaaagcaagtagaatataccaaacagaagcccaatatacttaaatgcaacaaaatcttaatgtaaagggcagatttaacatatcgatcaatgtgggacacccaatttaggcttggtgccccgaaaatccactcgtgatcgtctaggatttcgatcacgtacaaattgatatacagaacagctttcgattaattatacaaatttggttatacaagctaattatacaattgttaaaaggtgaaaagatccaaactaatatatccttatttgaaatacaagaaaatccatagtactaaactactaaactcctaagctcttcaactactaaaactacagccaataaactgcaaagaattcaaagaactccataggcaaaagctcgagtgtagactagtctagacaaacttgtcgatgccgtagatctcgcttccttctaatctccttgttagcatgttttctctatatgtcaaattatgcaagggtgagtacttatgtactcagcaagacatattataaataattaaatgtgaagagatatgaataaataaaacaataataaagtaaaggaataataaaaaccataaatcatctttatcctcaacattttaattttaaaaatacttatacttcaggagtaggaatcaccctgatgacacaactccagaaccgggagtacggcacattcgaatgatttaattcacctctgcagagactgtccagttttaaccgcacgatgcccacagctagctaggctgagaacaacagagccgtttgaaggtcccacttactactagtaagtctaggtctgtccccattctagaagctgcggtcgtactcgttcgtttgacataagtacttggtaaacttatatcgaccaagacagtactagccacccggaaatcaaccaattcctgcgtactgtcccaatctaagttcattgtatttttatgcagtctaactaggcagggctaagcaaaagctagcatataactggtttgctatatgttcagattatgcattcaaaatcatgaatggctaatgcatagaatagaatgtagaatataggataattatgctcaaaggggaggaataataacttgccttgctccaacgcaaataaatacgagataggcaacctgattatccgattctcgaaataccataggttgccatccaaaagacaataaactctactgagaaagaggaagaaccaaatttaataaaagccataaaataataagaaaacgataaacggctaaaagggctagggtttaaggtataacctatctcttttatagggtatagggattatggggctagtatttgctagcggtaggtttaggtagtataatagctagggttcagttatatgggagttgattgtggagtaggatagtatattggttaggctctatattttatgtggaggctctcgtggtttggacgataggaaatatactagatagttgatatggttaaataggcatgtggctaatatgggtccaggttggctttgatagaatagtggttaggatttagttgtttaggccgatatcgaggtaggataaatatcggctagggttttaggtgtttgctagtcgtcgctagagttggacatcatgacgactaggtttagtatcatttctagccgtgtcgatagacaacatatcggctagaagaataggaggtgggtgcaggtttagtggggcggaagtgttactccgacaaccgtgagtggcggcggagcggcttggatcacacagagcccgagagctaactgtgcggcgtgcaatggaggtcgaggggatagtgaagctccgaccgctatacgcatcaaggcgtggggtgccaggagcagcacttcaaccttgggtttggtttatgccgagctttacaaccaacggtccgacgttgaggttcgtagaccgcgcaaacgtccccatggaaggcgtaaagttctaaccggcggctttttagtggctacagggtattttggaaataaaagaaaatatttggaaagcaaatataagtttaagttgtaaattcaattaaaagattaaatcaaattttattcaaatggcatttgaataaattaaagaaattcaaataaaatcttaaaatagcaaatttgatatcaaaatgaatagtttgaatttatatgaatttaggtccaaatttcactggaatcggatctacggtttaggagatataggcttctaaaaattgggatttgaattaaatctaaaaaatacaaaaagttactgttgatgggcccacctgtcaatctccttttctttttctctctccttctctcgtcgtcgtcttcttctcttctctgttccagagagagagagccgagagaagagagaggagaaggcgagcggggcggcggctctccggtggctggagggcggcgacgtcggcgtccacgcgtgttcccgagcaagacatacccggggagggcggtggctggcggagagagtgaaggagttggccggaacggcgcagtcaagagcttgtcttcggcggcaaagagaggtggcggtggtggttgctatggggtgggggagaaggggaaaacgggaaaaatggaatcaactcgtcgaggcgaactcgatggcgcgatggtttggcttgcgaagctccggtgagggagatcgggtggtggcggccatggggaggagagagaactggaactcgattttgtatggaatagaggaggggtggccggctatttataggggtgagaggcggtggtgagaggcggttcggaggaggagatcgagaagacacggcgacggtagcgtgaagaaaagaatgacggcggccggcttcgtttgcttagcggcgacggaagaggagttggcggcggcatgcgccgtgcacggcacgcgcaccaggaggaggaggcggctcggctggtggtgtgggctggtttgggccggcttggcttagctgggccggcagcccaagaaggaggaggaaaatagaaaataaaagaaaagggattgggccaaaagaaagaaagaatggagtttcggcccgatgacaaaaagaaagaagtctaatctgaatacttgatttggataactaggttttgcaaaggatttgaattcggagagaattcacaaaagagatttcttaagttatttgagtgcaatatttacagatggagtttgaggaaatttatttggaagcactcaaataggaagggaaattaataatattcctcaaatatttttggaatatagaagggaattagttgaaggcaataaataggatttgaactctaaaattggtattatgtatatttgtggctaaaaggggaaattgagtgaagaatataaattggaattttcttagcacaagagctattattcataatatttgtaataatacaattcttatgccgaagaggaaaatcaagccacaacgattaaattggtggctagatcaaaaggaggaaaatggatatttggatcgagaatcaaaggatgggtttaagatcaaaggatggattagcaattaattccaatgagattggaattactttggtctaggttcaaggacgaaattggaggatttcttggaccataattcataatagtaaaaatggttttcaaactaaatttgaataaaagagttttaatcgaaagaaggtttaatattcgaaaatagaattccaacaagaaataccaaatatgtttttaaatgaaaaacacaaaagggattaaataccagagaggttttatgcaagttaattttaggaagtcccgctaagtatattttcctaggtttaaaaggttattaagaacataagaatcagcatgatgcaagattagaaaatgacatattttcaggatgttacagcaaggtatctatatcgtcacactttcatgaatcccactgttgtgaaacactgctgcccaaactccttacgcaagttcaccccaaaaccgctcatagagccacccaacagtctttcatatagtgggacaatgtactaggctaagttacttgatcgtgcggatggacgcaactatgtcatttcccatgggataagggggtaattataatccggttaaaccacccaaaactttccaaactccccacaccaacatcacaaacttcatcattcatcaacattcataatcacaactcaataatgcccattttaaccggattcctaagtttgtaaagatatttaaataataaaccacataaaatgatgtccaatgcatctttctatgatttcatgtggcagtgctcggaagcattaataattaccacaatgttattctgaagtataacatctacccatgagatgttaaaagagtaattatcatgcatcaaatttaaatatgaagattatctcaaggtttctatatgattaaaattttagttatgtcttgccttgcgccttaagatttcccgcggcttcagcgtagccatctgggtccacgtcagttccttggatgtcgacaggacttgttgtacggtctaacgtacgaatacgaaaacatagcaaataaagcctataagcaaattgctacaagaaacgataaagccaaggaataaaattggagcgaggcgagaggacaaaggaatgggtttaaaataagttttaatttgaaaataaaagagaggtgttctacaggttggagattgaataaaatcaaataaagaataattttggataggtggggtctatttggtggattggtttttagtcggtgctagaatagggcagcacgacggctagatatgtggagttggttagccgatgctaaggatgggtagcatagcagctaaatgtttggctcgtctagtcgatgctacagttaagcagcacaacggctagagtcgggaaaatttgtgggggtttgcaagatggaaagtgttactccattgccgtgagtggcagcagagcggctaggatcgcatagagctcggaagctagtgtgctgtggaggtcgagggagaagtgaagctccgaccactatacgcgtcgaggcgtggggtgcgaagagcaacacttcgaccttaggattagattataccgggttttatgaccaacggtttgacgtcggggtttgagaccacacgaacgtctccatggaaggcgtaaagtttccacagcagttttttggtggctaaaggatggtatatgagtggtttaaaaagaagtattttaaataaatcaaaggaatttaaattcaaaaaggggttttaaataaattgaaaaaataaaatttaaaatggtattttaaaagaaataaagaaaaggtaattaaataaataaaagatatttaaagaaattaaaagataatttaatttaaaagtttttttaaataaagcaataaatttaaaattaaagggatttaagataaataaaataggtttaaattaaaaaatatttaaataaataaatttaaataaaattttaaaataggaaatttggtatcaaaagagagggtttgaaattagatgaatttagatcaaaagttttctggaattggatcatcggttggtgagatatggatgtctaaagtttgaaattgaataaaaagaaaaaggattactttataaaaggtgggggccactgtcatagcctcttctccttcttctacctcttcttcttctgttcctgtttttgccgaacaggtagagaggagagggaggaggggcgctagagctccggtggctggggatcggcgacgttggcggcaacgtgtgttcccggacgacgcgcatctggcaaggatggtggccggcagaggtagatgaggagttagccggaacggcgagcacaattgcatgaaccggagagagagagagaaagctccggtgaggctcgattcgaaaggaaaaagaagggggaaaggggtaaaatgggttcaccagagggaggcaaagccgatggtgcaaggaaactaggagggaagctataggggaggagatcgaccgatggcggcgtcggccggacttggcaggagagagagagctcgaggagctcggctatggggaaggaaacggggtctcactggctatatataggcgaggagaggcggtggagtaggtcggttccaatggagaatagcgaaggatgcacggcaacggcgacgtggggaagaggagtacggcgccggctctgtccgttgattggccggtgatggcggttcggctcggcggcgtgacgtcgcagctgacgttggtgatagatccttcgcgtcgacggcaagacaacggcagcggcgcaaagctgcgggcgacggcagcacaaagccacggcgacggtggcggcggtgtgccacgcgcgcccacagagaagagaaaggagccggcttagctggggctgggtcggcttgggctgaggagggagatgggccgaggggagaagaaaaaggaatttcggcccgatttgaataggaacctttgggaatttttgtgtagaggattttaaatggaatttaaaggagatgaaatctataagaagaatgtttgtggactttttgaatttgactagaattcaaaggggaaaaaattctaaaggaagatatttgtgaaccttttgaactttggacaaggaatttaaatagagttaaaggaattttaaactagaggaattttgaaggcagggttttaaataaattaataaattttaaaggagataaaatttaaaagaggaatgtttaagggtctcttaaactttataaaaggaatttgaatataaggtttttgaagcaaaaggagtttaaaatacttataaaataaaatcaagatatttatttttgagatataaatttgaaaaggataaacattaagatgctccaattttaaaagaattcaataagaaccaaatataaaacttatcacaaagattttctttaaaaattaaattaatcaaatgggaaggaaaggaaataatttaatttctaactttggataaatttgggatggtggcaaaaatagatggaggtaaataactaggattttagcctccaaaatatgtggtatggattctcggtgaattatttgtggctaaaggaagttggattttgagtagaagggattggaaataagtttcttagcacaagagcaatcattcaaatatttgtgataatattattctttgtgccaagaatgtgatcaagttataggaatcgaattggtgcatggatcaaaataggaacttaaccacgggatattttggaccgattaaaaggagacaaatgtttttggggataggtttagataggggttgatccaaaataaattccaacggaaagggagttatactggtttagccccaaagataaaaatggttattaggatataacagagaatcgggtcaatcggggaaatattggcctaagctaaatagtagactttgaaatcttgaatggataatttagatgaacgagatttcaaaggggaaatatttgtgggagtatagaactggattcggaagtatatgtggatgggaatctttataggaacgaaattggtggtatgttgataaactctaaaggatgggtatgttgactcaaaggggaattgaaaaggatattttatggactatgggaatatttaggtggagatccaaaggaaaggtattggttctgggggaaaaaataagaattggtatttcatgtgttcgggtagagatcaaaggggaagtatttgatggaagataaaaatggatttggtggtagtatggtaagctctagagagattgatattttatgtgctcaagagatggttgaatgggaattgaaagggtattggttcgaggtgttcgggaatggattccaaggaaatataatttagagccaaagttagagattacagaaaataaatggaaaggttttataaaatttaaaagagagcgattaactttgcaaataaagtttaaatccaagttaaaagaaattaacagaaggcaagatcacttcagaagaatcgagaagagtgcaactaaaatatttcgcaaaaatttttcccaaaattttgagtccgttacaatcaagcatgtaagataaaagaagttagatcaggtaagatcggctgaaagtccgatactactctaatcggcaaccagaaagcagactagggattgaaattctaagcacgacttaatagatcaaactcaactgatgtagcattaagtatgaaaagaagaacaatatctagacaatcaagccgctggatgtttcatagagtggtagatatcttatataatctaagccaacctcactatttaacataatcggccgccttctactaacagatgttagccgattatagattagataatgataatgtcagagattatatagaatatatggtaactcgacgaattacataaacaagactagagtatcataaagatggaagcactaatcccgagaacgcaagccatcataataagttttacctcttgttgaagatcgaaaccgatgcagctcaaccttacatatggctcggggtctatttatacccgagaaatacaagatatgtccatattggacacgactcttatctctaacaaactcttagataccataagtctttgcggcagacttttgcccacatttatctctaaggaatttacataaaatatcctaattaatagatacaattgccttctcaggactctatccatgtgcggcaatcatcttgaagcacaccaactcgaacccgatgtcgtacaaaagtcgtattgtcggaatcgactgtatcactcaacccagtctgactcggacttagccgatcccagtcgtagccaatccggactccagccgattcttactctgtttccgcaacaatacatattagagaacagcggaagcttgactacccaatcacaagcacccgataggggtttaccccattaagttctcatcctagaagaagcaatcggaacccgcatcactcaaagaataagtctaaacctgcaaacaaaaggttatatcaacagcaagagtcagtacattaaacaagttaatgtactggcaagcacaagtcaatcctaccatactacatg

SEQ ID NO: 6027 - DNA, 4439 bp, Oryza sativa
  unsure (1)..(4439): unsure at all n locations
tgatcagcaaatccaaaccagtcatgcactaccctgttttcacataaaagagaaaacaaatatgggttgcctacaaaggacaatgatcatacagaggtaatatataaaattattagcatgtagtaaactcttaaatcatttatccttgttagcgaccaaatttggtaattcaagtatcgaaggtgaagataaaatcaaagcggaatctaagagatagatcgttccggaaacagagcaagaatcggccgaagtccgaatcggctacgaccagaatcgacagagttcgagtcggacaaggtagccgattgagccgattccgacaatgtgactcggtacacgttgtcgggttgagttaatgtgcttcatatggattgccatgcacggattgagtcctgaaaaggcaattgtatctattaattagaatattttatgtaacttccttagagataagtttgggcaaaagtctgccgtaaagacttatggtgtcttagagtttgttaaagataagagtcgtgtccgacaaggacatgttttgtatctcgggtataaatatgactcgaacctatgtaatcaaacaacacacattcaatacaatctcgacgcatcgccaccctttttactttcgtttcatctcgacgaattcttgctttcgggttgagttgcatcgtttcgatcttcaactagaggtaaacttgtcatgacggcttgcgttctcgggattagtgcttccatctttatgacactctaatcctatttatgtaaatcgtcgagttatcatatatcctatataatctctggcaatattgttatttaatccttaattagctaacatatattactggaaggcagccgattaggttaaatattaacgttgacctagattatatagggtatccaccaccctatgaaacgtccaacggcttgattgtctagatattgtccttcttttctgtcacgcccggaatttctatccaaaattccaaacgcttacatgtgtgtaaaccctcgtccatgaatcagccgaggcacacaataacaaattgataataaagtacaattattactctaattaataagcgaataaaatatcattacagaggtagatagttcctctcaatcaataaagttctaagcagcggaaaataaaagaaacagcgcaggcgactcctctccacaggtagcttgaccaggactaggcctaatcctcaacaccatcagcatcactatagaactcctcctctgatgaatgattgcaaggtaagtatatgacatacttagcaagccacgcagcaaatatacaagtgcacaggataacaaaggatggcatagtatagtctcatttgcataaatagcatttaacaaatatttcagaatttaataaaacagttaaataataattaaacaatattaatccaatgctatacaacataccctgttgcataggcccaaccattctgaacaaccaatcccggctacacagttctatctccaaaccaggaattaaccattccaaaccaggagctaaacaagttattaacatcataaattaatatggtgagaaatgtaagactaatcacgaaagacattgttagacccgcccataaccacgggcacggctattcgaatagtttaaactctggccagaggtgtaccactgtacccacaagacacaaccttaacatcatgtcaaccatgcgtcacgatacttgacaagtacccgaatagagattgtaacaataccctctatataatacaattcaaagcagtgtaccgttcctagatcataatcacccccttataaacaaggtatggactccccagcgacccccgtgggcttatctccgccacttcacagtctggtgctctactatgaaccatactatacataaagtaaagccgttgcccacgctggcttgtggttggcacggtaaatgtttcacaatcaaaaatcgtgaaccggtccttaattgtcatgagcacaaccatcaaaaccatatgctcacaacccaccattatcaggttttagttggcaaattaattaattaaccaatcatgattaaccataatgagctaccattaagccatcattaaataatagtgaagcataagttatcccagtagtgtgccaatgtttctaagcatggctaagcaattatatctaatatccagctgaatccatatatataaagctcaactagtcaagttataataacccaaggtatcaaagaatagggtaatcaagaacaaaagggctataacaaagcaataggttatttccacccaatgacattcaaaaataaatgcaatagttgaatagaaacaatagctttaaacgggatcaacatgctcaaaggattgtttgggatctgtgtgacttgccttgctggccttggaactcttcaaagtcttctcctgcaaattcggactctcccggaacgtcggaatctaaagagaaaagaacaaaatcaccaaaacagcacataaacaagcatgaacagtacatgtggatatttttaacatgtagatctcaattttagaaaaatttagagacttgaaccaactaaatccgagctaagatgaattagttatgaattttcaaagattaaatcggattaaaacatttatatagattttaattgaattatgacacaataatgaattatttttgaaaaggaaaaaggggattattgcgtcagcgggtcggctcacggtggaccgggtgcatggcggcggatcacggaaacgaacggccgtgatcaatctatccaaaacgggcggccaagatctaacggtctacgaccggtctacgacggacggcgtcgatgacgtcagcgatgacgtcatcaccaacggcggctcggcctcgcgtgctcgccggtgaacgacggcgtggcgacgcaaatgaaggacacctacgggttgctggcgacgcggcgaactcaccggtgaccaaaacaacggcagaaggtcatcggatggcgacgacgatgaggaagaagcggcggcgaccttcggcttgacgacgacggcggggcttcggcgatctacagcgacgacgaaggggcggacgaggtcggcgacgacttgatgatcacgacggcggctttcccgagcgatgacgacgaccggagcgacggcggcgcacggctggacgaacggcggcgacggcggcgctaggctacacggcgctagagctctaccggcggcgagagacgaaagcgagggtggcggcgggtagaggagacaccggggtccttttatagcggctaggggtggcggcggaggcccacgacgaccggcggtgtgaaggaaagtctagggttcggggagagagacgaatccgattcgagatcgaatccacagatttccaaacgattttagccgacgatttcaaaagagaaaaggtagagtggatctcggggatcattttccctctatcaatttcaccggatcgagaaaggggatgaacgaatttggaagggcggcggcggcgcggctcggctagggttcagccgggcgacggctggaggttgacgacggccctctcagcgggaggacgcgcgagcacgcgcgagcggcgctcgactgcgggccggcttgggccggggagagagagagagaggtttgggccgactttcggcccaaagccaaaagagaactttttaaaacctttttcaatttaaattattcatgaaatgcaattccatttattaaaaatacttccttggctcaaataaatctcagaaaaatctaggaactatagaatcaagcaaagtatttaataaaattttatctagcccacttttatattggaatttattatttaaaattagatcttctcttctaggcttttaaaatcaattctaataattctaattaaacaacaatttatatatttgggatttttagggtgtgacaaacctatccccctaaaacggaatctcgtcctcgagattcggaagaactggcgaacaaatgcggatagctgactttaattcatcttctcgttcccaagtagattcttcctctaagtgattactccattgaaccttgcaaaaacggataactctattcctggttcttctctcatctgtttccaagatacggattggtttctcaacatatgtcagatcctcttggactcctatctgttcaagattagcttcttcggtaggtacccttaaacactttttcaactgcgacacatggaacacattatggactcctgccaaagattgaggtaactccaactgataagcgacctctcctcttctactgacaatcttataaggtcccacaaaacgcggtgccaatttttctttggtgtgaaaacgatgaaccccccggagaggcgtgacacgaaggtacacatgatctccttcttcaaaacttaattctgtgcggcgattgtncgcataactcttatgacgagactgagc

SEQ ID NO: 6028 - DNA, 872 bp, Oryza sativa
aaatttcaatcacttttgagggtcaccaagtgaacttattcctagcaatatatatgtcacagcccaataggagggaggaaaattagtcttattctgaggaaaagcacgatgggccatctctacctttgggccggcccggcacggcccgagtcgtgttgggccatgcctgggccgtgagtgcggcacgtgggttggcacggcacagcccggtgcgtcggtcggaccgtgccggcccgacaagctgcccacatggccatctatactgacaggtgggcccctacacagtaacttttcgtattttccttatttaattcaaatcctattctttagaagcccatatctcctaaagtgtagatccgattatagtgaaacttatacctaaattcatataaattcaaactctacattttgataccaaatttagtattttaatattttatttgaattttcttaatttatttaaataccatttgagtttatatttgatttactcctatatttgaatttccaatttaaacttatattttattttcaaatattttattttatcccaaaatacctattagccactaaaaagccgccggttggaactttacgccttccatggggatgttcgtgcggtctacgggccccacgtcggaccgttggttgtaaaatccagcagaaccaaacccaaggtcgaagtgctgctcctggcaccccacgccttgatgtgtacagtggtcggagcttcactattcccttgacctccacaacacgccacacagttaactctcgggctctgtgcgatcctagtcgctccgtcgccacccacgattgtgaagtaatactttcgcctcgctaaacttgcaccaacctcctattcctctagc

SEQ ID NO: 6029 - DNA, 7212 bp, Oryza sativa
ggtctccacatgttatcctctttcaacaagaagctgggaacgaaccccacgacggcaacgagggatgtggcggtggcgggagcagcggcggagtcagtggtggtagcgttggagaaagaagagagaggaaaggggatagagatgaagagaaggagatggggagagaggaggaagaaaggaggggtgagaatgacatgtgggtcctaccattttttattattttatgtgtgaaactgacatgtaggtcccatgagtttttattatttttctggatcaaattgccatgtaagcggcacgtgaatgccatgtcagatgaagaccgagtcaaattagccacgtaggcgccacgccagccaaaaccgccatctaaaccgctgagggacctcatctgcaccggttttgattgttgagggaacccgtggtatctggatttccgattgaaggatgaaaatcggattcgttgacaagttaagggaccttagatgaacttattccgtagggaaaagaggtggggaagggagaagggagaggacttcggcccaaataaatgttttctgaattttagaagggctttagaaaatttggtttggatagaatttgaatttggaggaaattcacaaaagaaagattttccaaaagacatattatctagtttatttgagtgcaatattttgagagaaagaatacattggactaaatattaaagcactcaaataggaggggaaataaataatatgattactcacaaaatatatttttgggaataaggaaggaaaatacttagaggcaaaaaaaaaaggatttgaatccttaaattggtagtatgaatatttggggaattatttgtggctaatagggaatttagattttggatgagaacgatgaattaaaatctattttcttagcacaagagcaatcattccaaaatttgtaataatactattcttgtgccggggaggttgaagccatagggattaaattggaggctcgatcgaaaaaggaatttgactattggaatatctacagaaggattggtaacatgtcaggatagagaagaattagagataagactagatcaaaggtttggtcaaggattaattccaatgaaattagaatcatggttgttggtatttcttaatgatattactagaaatataattcccagcaatagcgtagaaacactcttcgtatattatggttacagactttatctgcaagcgcacggatataacattgtagcatttcacccgagagtatttgtaacgccccgattttcgttcgggaataaaaatcaattaataatacattttctagaaattaaataaaagttaaatcaacttaatcaagtgaattattgagggaattaaaaatttcctttaaaaattattggccgggaatattttgtaatattctttgtgccctaatgtactctccggaattttccatgaattttcggagctcgagaaatagttttaatagcacaaagatcattgcatcaattaaaataaaaagaaaacaattaaaatcccccttcctctctttgggccattttcggcccaagtcttccttcctctcccgcggcccgcgcgccttctccctctctcgggccggctcccctctcacttggcccgctcgcaaaagtctgttttgcgtccctccttctctcccttcgccgacaggtgggaccgacggtcccacccgtcagctcgtcctcctacctctcaccggccgaccccaaccgccattgccgtccacgtcgccgcaaaatccggcgccctcccgcacccgagctcgcatccaacgacgtgggcacgatcccctccacgtcctccaccatttcccccactctccccgcgaaaatcggcgccagttaacccctccaccaccccacgtcggcgccccacttcgccggccgattccgccacgtccggcctcgatcccgccttcccgagcccataaaaagcatccccgtgctcccctcgtccgtttccccatttttcccgagcccggcatactctccctcgctctccccacgccgcacccacgcgctgccacactccggcgaactccggtcgccgtttcccgccgccacagccgtcaccgcgccgagccgccgccaccgccagcttcgccaccgcaaggggaagtccggccgcctcttatttccccctctccacccctcgagcaccactcccaccgcacacccgaggccgccgcccctttcaccgcctccagccgcgcgccaccgccgccctagccgtcgccccaatgcgccaccactgccagtaccttcgccgcctcaaagtcaagctcggccgccgctcggttgtcgcctctcgccgcccgagcaccaacttcaccaccaacccgagatcgccgccgtgtttgtcgtctccatctgtgtcgccccgcctccccggtcgacgccggactgcgccgtttcctccctcggatcggcaactccgagccgcaccccggccaccgcttcctcgcctccgggaaccactgaaatcgccctctccgcgccccggtcgtcccggtcaccgtccgccgcctcgcgcccgtggtacgccaccggaccaccgttgcctccccgaggagcccgccgccggcttcctcgttgtagtctcgccgtcgccgcccttggtgagcatccctcctctcctccccgcgctgtcgccggccgtcgccgcgggtggccgcgccgccgcgcgccgtcgtttggccagccggctttgtgccgtgctgtgccccagccgcgccgcccctggccgcccgatcggtttgggccgatccgggccgtcggttcccgtggaccggcggtggaccgcctcggtggtcccggtccacggtggaccggcgcccttgtgccgctgaccggtggggcccgcttgccggcgccgcccctcccctttgatgacgtcagcaaccgtcttttcctttggaaaaataaataataattgcgtcataattcgttaataattatagaaattcatttaaatggctcaaaacttctaaaattcatatctaattcattcgaactccgaattgggccattcaaattgcaaaattcatctaaaattgagctctacatgtttgtttactttttatgtactgttttcttggtttttattagagtttttcctcgttttgcgtgtcagcgtgtagaatccgtcgtttcggaagtccgcggtcgcgaggaaaagagttcggaagatcaaagtgaagcagcaaggcaagtcacacattccccttgagcatgttgatcccaatttataaatgttttaccgtttacaaataaatatgcatgttttactaattacatgggatccgggtattacctatctgctcgcttgtgccatgtttacttgatatctgttctttgtcaaccttgggtaatgaatccactagctcatgttacttatgtgacctagctagaactatatgcttagccatgcttaattaccactagctcagttgatgggataattgcagtattagaccctttagtatcagagtgagctgcgtgctcgagacacccgtccatgcttcatggtcgtaattatccaactaaaatgcaactgaatggtgggctgtgggtgcatggttttgctagtcgcacccatggcagttaaggaccggttcgcgggatgccctggaagaacttatcgtacttaccacaagccagcgtgggcaacggctgggcttgtagtgtagctttcctctagctgacacatccaggcaagggtgggcgtgatggagcggggcgggccctgcgacggcctctgtcgcttccggattcacctaggcacgagaggggactgcccgttgcccgctggggacgggggtgaaatctgaggtgtggtgtgcttggttagagggggttatgcgaagggtcctgtcacggcctctttccgatatgtcgtggtggcatgtcggcgcacggaaacgtgttgtggggctgtgtcttgtgggtacagttgtacacctctgatcagagtaaaactattcgaatagccgtgcccgcggttatgggcggtcgaccagattcaccgtgattagtcccatcttaataaatcgacccaatacactgtagtccaggtgggttggttgggcctgttcaacgtggtgtagcgttgatcagtggagatttaatgttactttaattactcaacagttttactgttttgctcaataaaatgttttacaaccgcctttatgcaaatagccacaaacccctccttgtatccccttgcacgtctgcatcgttggtgtggcttgctgagtacggtggttgtactcagtcttgctattattccccctttttcagaagtgtagtgcttctgagctgaagatggagttagaggaccaaggctcagaccccagttgagttttgcctgtggagtggagctgaagccccgctaggatcgcccttttccgctgctgctgctttcgtttcggtgcgaggactaagtgcctcttttgtaagtattttacgctttatttacgtttggaactgtatattacttgtcgttttgtgtaccctggctggtcctggacagggatttaatacacaaaatagtctagaaatttggactaaatttctgggcgtgacaaagtggtatcagaggcaacttgactgtaggttgagccaaatggtcaaaccctaaggacaagttttctgaaaaccctattcgcaaattgtctcctctcgcccttcggcatttctttgcgaaacagtttattaaaatttttcctccctgtccctccaactcttttagttgtcaaacatgtaggagaaaccgccagcttcatgcccgtccagaagtcaagtcgagtctcaagcttcgtgcaaggagcgggaagattagttcagagtcatcgttccgcgaagatcaagaagagttttcccgaagttcacctaaacctaatccttcccggaagagtagttcgttagattctagatcgtgtgttgtttgcttgtgtgtaggggtatggtttgcatcattggtggggatgcgactatactaggttgtttgcttaagcaacttgaacaataaaaatctattaacaacatatcagtaggcaagtggtttagtaccttatctttagcgacccctctcttccacctctcttccgtcctggcagcagatggtcagtgttagagataagatcaattaaagccacagatcaatggtttagttgaaagctgcaaggtgccccaatgccagatgaaacctgctcatgatcaacttttggtgtccaagatcagaagatgggtgtatcgatgtgggagatgcaggttcgacacctagtcaaatgtagcggaaataactccagcagtagtgtgttgcagtcagagtcagtggatcagttcaagacaacaagctaccagctaagtcagagcacctcgctctggttagccaagattggaagatggatgtgccagatattgatgtagcaaccgcagagtccaaagcagcagatgcaacgacaatgtctccaacaacaagtacaagctcagatgcaagccggaatcaggatcagagcgaaagtcagtttgttttccaagagcaagcacctgcaacctcagacagtacgccaccaagtctttagcagaccagcacagctaagtcacccccaatcccagaggcaacaagtgctacctatagtggttatggtttacaaggtcagttcttgcaaggttgttcaacggcaaggcgttagcgtcatcaagacaacagctctattcgcagcaccccagttcctcaagttgtgtcaattccaatgcgagtcggtcagtttagttttgagatatcaactacacaacccatttaggtggatgacaccgaagtcaggtcagaagaaggacagtcatgccagcagttattactgatgggatagtcagttaagagttagtaagatcaggagctaaatgagaatttctttatgtggaatttcctatcagcaactgagggttaagttccaaatcttaatgggatgaaagtgcatcgttgttactctattttgatcgatcggcgaagtttttagttttcaaagtcagggctcttcgcaaaacagagaagtgttggttatattcgaaggacaacagttcaaccgatctcagccacgcgaaagtaagactactccttgtaaggggggtaggtctcggagaagagttttgcctcacttcgtcgctgttttagttgaaggttcaaccagtgccgcaatcagggtagcacttgaagaagcatgttgcaaggtatcagaagaactaagccgatcccagggcatccgatgagcccagttcaacagcttagcttagaggagcaacagtgaggacagttgcagttcagacgaaagacaggtcaagcaggtttcctggaattacgtgtcactcgagtcagaacccgttcaagcggatgtaggatcaatgagttacaaatgccagatgcaagattcaggaacaactccatccttctctagccaacttggtgaactgtcaggttatcaaattgctagcatcaacggttcagtccaagataagtaagttccaggagcatccgcagttctggcctgggtcagttcaagcagaaccaatcagtccagttttggcaaagcaaaggaacagaaaggtcgaatccagccagttcaatcatgcaggtttgatcaaccagtcaatcaatcagttcgaagcagaatgtggcagttcaatgtgcagatcagtcagatcgcccaccagcactggctttctttctagccatcccagaatctcgggacgagattcctgcaagggggggagatttgtaacgccccgattttcgttcggcaataaaaatcaattaataatacattttctagaaattaaataaaagttaaatcaacttaatcaagtgaattattgagggaattaaaaatttcctttaaaaattattggccgggaatattttgtaatattctttgtgccctaatgtactctccggaattttccgtgaattttcggagctcgagaaatagttttaatagcacaaagatcattgcatcaattaaaataaaaagaaaacaattaaaatcccccttcctctctttgggccattttcggcccaagtcttccttcctctcccgcggcccgcgcgccttctccctctctcgggccggctcccctctcacttggcccgctcgcaaaagtctgttttgcgtccctccttctct

SEQ ID NO: 6030 - DNA, 4104 bp, Oryza sativa
ttcttcagccttaaccttatcaatacgctctgtgtgcagcttttctttctctttatcttgatccctgtctctttcagctctgtctttctccttctctaactctttttcttggtcatggcgctccctctcccgttcacccccagggcgtcgttcatgctcctccatacgttccttttcttttcccttgtccttgtcacggtcactttgagtcttctcccttttccttttcttaacaatctgttgcaactcttcaacattttttgtgattatttcaagaggttcaagaagggcaaaatccttcgcaagatcttcatcattctgcaacaagataaagagcatgatgtagcatgcatcagaaaaggtaatgaacactagaagacaaacaaacttacttcatccgtatttgcttctagttctatgtattggaggcctttctgcacgatagtgataagagcaccaggtggaactagatttccatcaatcccacccttatggatccctgcttcataccctaatgtgaatgcggcatgaatgaaacctggaaaggttgagaaaccatcagcaataactgtcatagtcatatataaccaaatatatatataagtcgggtgcagcataaagtagttgcagctacatcattggacactgacacagatcacatgtcagttatgtatcaggaaaaagtcagctaaaatagatgatgttttttttttccgatacagctttggaacttcattgacaagcatgcaaaaatttatcgcacatgcaacacaaccctgccacttcaacaaaaagtgaaaagcctatcactagaaacagacaactaaagtaaatgatattattctttgatacagctttggaacttcattggacgcatgcaaaaatttatcacatccacaacacaaccctgccacgtcaacaaaagaatgatataagcttatcgctagagtgctagaccagcctccctccataggttttctcctcgtcatccagaccatgcacctctctggacatgcccccatgtcaagctcagttaagccatgtcaagctcactggtgggttcttattagttcctttcatcagttccttctgaattattaagttcttctctaagttaggttacatggagcaaaactggatgagttttggatttgttcttcttacttccactttcatattttagaaaatagaaacgaataatacaagtattccaagaaggagcacatactatcatcaaggcttcctatgttgaattgttgaaaaagacaaatactgaaatgggaaataatgtgcatagagagacatatcgtcatgttgtcttgtttgcaaaaatggcaatccctctcttggagtctatgtatcgtattcatgcccgtggaaccatatatatcaactgtgggtaacagataaatgagagaatatggcataatattcttcttgactcgttaggcacttctagaacaaaaaggcaccatagtagcacgaactccctatagcttggttctgaactctgagttctgagccatattttactctctgcaattgaggacagttagaaatatggaagccagcagtgctacagtgatcagtgaacaggcaccaaacgcaattctctcccgcaaattaccagttaccactacaatttcaaccccaaaaccaacaaaaacaacaacttcccatgcaccaacggttattaaaatcctcgggtccaactaaaaggaatgaaacggaagttagtaaaagaaacagacaacatcgaaccctattatatatatgggcatgtttggattgctaccctaccagtggtagtgccaaatcttgggcaagttttattactatcaacattttgttagagatttctagggagagatttctattgatttggcaagttatggaatcaatccaaacatcacacaagtactatttagactacctgttggtagtgcaagatttggcactaaaaccaaaacagccctatgtttccctggacacatcagatcccaagattgtgccctagcagaccctattttccccagggccgcacatctccaccacaatagcaccgaaccacactagagctactaaacatccagcagcggtaaatctccaacccacacgaaaatcctctcaacgtaaataaacacaaacaaaagaacctaatatccccaacgccccacatctccaccacaatagaaccgaaccacactagagctactaaacatacagcagcagtaaatctccaatccacacgaaaatcctctcaatctaaacacaaacaaaagaacctagtttccccagcgccgcacatcaccacaacagaaccgaaccactagagcagcagaggtaaatctccaatccacacgaaaatcctcgcaacgtaaccacaaacaaaagaactagggagaagaattcgagagtggacgaaccggactcctggagataccggaagatgaggaagttgagctcggccgaggtgattgcccccataggcgccggtcgacgaacgcgtggccgccgccgagacgggaaggctccggaggagaggggagaggggagaggggagaggggagagtggccaaggggacgaaaccggcgaagggatggatggtgtgggtataggaaaaattgatggattgagaattttaggtcatctcctgaagtcagtctggacacggtcaggatcgcgtgcagaaaaatcggacggggcatgagccccgtaggcatggacgggcctagaccgttcgtttgctttaagatccgtgcacaactggaatactaaatgctacaatgtaattctattgtatttaataacttttaagatcttgatttttctgttcgtcacacaaggcacacgtcgaccgttgccctttgagcacatagcatgagagcatgaatataaacccaaataatagttcgatatgaagtagatgtcaaattaatagtttcaccatgtataaccagattaacaattttgttggtcatctcgttatcgtcttcttttaagatctatatggcacgactattaaaatttgtcgatggcaaaagtaaatatttagagaggcatacttgttaacatagtcatggtattattccggtgcaaatgggcgcatgtagcacgagatggtatggagaagataatcacacaatattctacatgaatggtgatggcgtgctgtacagaacaagaggacattggtgagtaacataaagatcagcaatttactatcctctagattatgttttcgaattaattttgatcatgcgaacctatatttgctcactagtcaagaacgtctttatatacgatattcctagtgctcttccctgtggggtctacttctttctttggcttggctaaaatccttgttgtttgtcttgacacaccccttaacaatgcgacatacaactgaccatgtgaaaaaataggctatggatgatagatcccaacatttggggctgtgtcttgtgggtacagttgtacacctctgatcagattaaaattattcgaatagcagcgcccgtggttatgggcaatcaaccggattcaccgtgattagtctcacccctagtttagcttaatggaactggttagttcaggtggtggattggccctgtctcaacgtggtgtagtgttgagcagtgattggttaatattgattaattactattacagttttactgctttcaactactgcttttaaatgcctgctttatgcaaataaacctttagcctcctttggatatatcttgcatcataccttctcttctggtatgacttgctgagtgcagtggatagtactcaatcttgctctctcttccccacaccagagctgaagttcttctcagttgggctgtctcagagaagttggtttcgttgccgccgtcaagaatgcctgtggaatggagtcgcctcgctgcaggagtcaagtcttcaagcttagctcgtttttatctttctgttgcatttgtaaatcttttatatgtttgtaagacgtggatctgtatgtcaaaaattgtcgcttgtgtaccctagctggtcctggataggggttttaatgtacattcagcttagaaattctggttcgtgaatttatgggcgtgaca

SEQ ID NO: 6031 - DNA, 21590 bp, Oryza sativa
tagggtcgtgctccaccagcttggggcgcaccccacatgggccccacatgggccggggtcccaaatgaagttacaagcccataggcccattacaggtgtcgcagcaccttgtttcttcagttgctgccgactgagatggaatttggcaacgaggcttgatgcattggaaagaggactccgagagctttccatcaagtactcacgggccaaaaacggaggtcgtatggagcttcggcggccgtttgaagtcagcagtgtagcaggtggccgaattggattttggcacttggaggactcgaacttgatatcttgttgtttatccatgatgtgagcaacggatgtatccgtagtagccatggtcatatcaccctagtagttgagcgtgaggaaggcaaacaggaggcccctccggcttgcgatggcccctcgtcccccgaaggcctagcgcccaaagcttccagcccccgggaggaccccgaggcccccaagggaggaggggaggctttggcaggtggccctgaaccttatgatcccgaggcagtccgggatccccccgggacctccgaacaggcgtgccccggatcatctgcccctgacaacacgaacctgccccgccgaaaggtgcagcggcccgtctactttgtcagcgaggcacttcgagatgcgaaaacccggtatccgcaggccaagaaaatgctttatgccgttttgatggcctcaaggaagttgtgttactacttccaagcgcatcgggtttccatggtgacgtaataccctcttggccaaattttgcacaaccgagagggtactggacgggtggtaaaatgggccatcgagctggctgagttcgatctgcacttcgaaccgcggcacgcgatcaaaagtcaagaagtcctggctgatttcatcgcagaatggaccccggtggatgaacctattccgtccaacaatcgtacctgcggggagggcggttgaaggtccacttcgggggctcgatgaagctcccctggcatggctccgtttgccctatcttccggagccgcttctttttccgtccagcctcgggcccggcaggtcgcttgtggcccgctggcgaacgatccgtcgcgcgctcggcacctcctccacgtgggggagagggcgaccgggaataggccaccttccgcttcccctttgggtcaccggcggaatcgtctccgggtccgcggctcggtccgggcgcccttgaaccaccgccgcatggaccgccggcccggctcccacccgcggtcgcaccaccaccacccgcgccgacggcgctaccgctggcgccgcctcggctggaccggctcctgccggcgccgacggctgacatcacggccaggatgctctcccggtcacggtcgcagcagaagggaagaatcccatctgggattagtgttggctcggcggagtctaggcccagcacctgccgagtcaccctcttcgcgtcctcctcaccccagtcccagcgctcgcccacatgcgtccgcatggggtcgttgggaccagtgtattcccacgctccacgggatcgttcctggagaggtgcgatgcggcggcggaagtaatcgccaaagaccatcgcccccgtgaggcccaggctccgcaggcccttgaggcagtcccacaccgcgtcgtattcctcgcccagctccgaagccgccagccatgcagcagacctttcaggagggccagtaggaactcgaagtcgtggatggtccggtaacgcggtgtagaaccagtccttcttccagtcctcccatttcttgcggagatggctctcgatgtactgacccgctgtgcctggccggggctggaagtagcatccccccaccaccgcgccttgcagcagctgcgggatgaagaaggcctggaacaaccgcatcgtcggtcgtaccccaatgaacatctcgcacaaatgcgcgaagatggccagcatcatcacggcattgggtgcgagatgcaaggcatgaatttcgtagaaatccagaacctcatggaagaatctggagaacggcagaatcaagcccgccatggcgaaggacaagaggtgcacggatcgctccggatatcgcggccgtggccgcgactctcccgcccgcacgatggcaccgtccggcatgatcttgcggggaaggctaaggtgcttgtctgctgtgatgcgggaggaaaggagcactgcatcgccggtgtcttgagccatggcgaccggcggagaagtggcggagagcgtggcgcgcgagacagtgtgaagtggcgagaatgttagggttcgagaagcgaaaggacgagtgggcagttggcgaaaggaaggaggcagagtctccgcctccgcccccttttatcctcgcctcatccgtgctcacctcctcgtgtcacgcccccataattgcccccatgatcctcgcgcccgcatatgtctcttcgttttccgcgcccactcatcacgtcgcccgttgtatctgcttcccgcctttagtgcgcctgtcagtggcacactcgaggtggagtgcgcaacggccatgagcgcaagttgagaaaaccgtcgccactaccgccgcaggagactgaccccccccccccccccggttatcgcgcctcaagcatcttcttcatgatcgcggtcagtgctggtcaaaccgctgttatggttggcacgccaacctggccacgcggcgatatccctttgatttccctgccgggcccacaaccccagctcgagaagtcatgaggcaccatgtcagaccgatctcaggaaatcgatatctgatatagcgccgggggctactgtcggagatatgggcccgggggtatgtgaagtagaggggagttactttccctccggccacgtgactctgcaagttggccccactcacgcgtcacgcgagtcgtgaaaacggcgggggggggggggggggggctcggggcatggcgtcaccccctcgggctctcccgcagcttcgccccgaggccctcccccggctgccacgcggcggagggagagagagagagggtagctcaggctaaacatccataaatgtgcgacgccccaactgtccctcaccgcattaaatgtggtaagggcagacgtgcggcgcgcctagctgactcctgtccatcggatgtgaccggtctgtgaccggcctgttaccgtcacatccaatggatagggcaatcatgtcctcacgtcgcctctgtacccggcggagtgggggtgggtatgacccgtcacatccgagcgtcacacgaggaagggctgtcgcaagtcatcgctcatttatgaggaaatgacagggctgtcccccgtgtcaggcggggggcggcgctgggttccactcgagaaccggttgttgcttagcttccgggagaaggcacgggttgaagcccagtaaaagtggagtgggatccccctcctatggagggtaggtagaggcggcgcatgtggtatccccttgagctataaaaggaggacccggcccactgaaacggggggacgacgcccagaaaacctgaactccagaagaaagaaagcgagtgcgctctctggagtgaagaaaacctttgtaaaactcatccataatcccaaacacaggagtagggtgttacgctccatagcggcccgaacctgtataatccgactatgtgcaagcttgtcggtagtcttagggacgagcgagtgatttccaagagacgagcctctgcccccggccgaactcacgagaaggggggtctcacgactcctcgctattgaggatctttcctcgatagtatcgatggtgttgatgtcctcatcactttaaattcgatgcatcgagtttggatggcttggataacgtatcaattatcccacattctctcttttttttttctcatagtacaatctatttgtatttgtaactcataggtactaaatctaggaagacaactagagtgttagaaaagatatatcaagccaaataaactgtaatattacttgtgagctgataaaatagtgattaaccaatttttcattatatttgtaggtagatttaaaatagatttcatatatctctactatataaaaattgaaaatgtttttgccggtattttgatacgtcatccgtatttgagtcggtttttaagttcattcccttttggaaatacagatccgtgtatgagccggattttaagtacgtttgcttttaaaaatacaaaagaagtcgtatgagaaatttctttaaaaaaacttacatgctaaacttgagataaaagtcgaactccttattgcatctcatgatttttttaaaaaaatattcaagcgaattctcacagtgaatttcatcttagctaaaccatataacaataataagattaaaaaaatagcattcacccattgcaacgcatatgcatttttttctagtgtttgataatatagaatatacacgagtatataactcttcgtatatcctaatattttttttgggggatttggattcaaactcaactcttctcatattctaatctatattttttggagttatgattcaaactcgaatattaccgtgtatctctttttactctccaatatgctttgcggattcagattcaaactctgatactaccaggtatcccatttttctctcccatatcctttccatgagtctcgggttgagcgagcgtaaaaatactcttctcgttttcacttctaaaatcacccattttttccacattagtcgccacatcaccattgcagacttattacaagaagcaacacatcacattgaagcatatgacgtgatcatgtgaataagctcttactcatacttccctctccttgaaaatacgatggaacagaaattcgtataaaatcgagaacagttcttttcatacgaccctaaccatgatgaatacttacacatttattttactgggaatgcttaaacatctttgtctcaagaccagaaatgcttagtcggggagaaaaggctagaaatatattctaggcacacattttagccggaccttgggattcaatagcatcaatcccgtattgcatgcaggaaatttagcatgtggatctttggattgagatcaaccgcagatctgcatgcaatctcatagctctatgtttccaattaaaaaagctgcaccttacatcggagaacactaatacgacagctagttggaaggactgcacagtaactggattcccctatcttctgttcaaacgcctgagcggcctgttgttatcatcaaatccaccacttttaacccaatttcttcttgcgttactctgtagatctcttgagccatcatgtagttcagtagtacctcttgtacgagtcctatcaaagggcgggtgaccatcacgcatatcagaactcttgaatcgttcattcattttcttcctatttgagttggaggccctggcatggaattcatcactgaactttgttgagaacctgttcctcctatctgactgaacacagccacctatgtcacaatccatatctgaaaatggtacatcatcaagttcattatgcctaacaacaactcttctaggataatgcttgttatggcctcctttacatttcaatccttcattaatatccccatccaaatcagaaataatcccatcatcactctccgagccaaaagattcccttctgtggttgttggaaccattgcagcttacaggtttcctccaagaagcagcaagatgactagatctcagggaagggtgatcaaattcctcatcctcaggagaccctattatatcctcctcttcaccgtgcttagagttcctaattttagcacgcccatttaggtctgccgagtcacaagcatcttcaaagtccaaataactcatccttgacattccatctgtctgaccaccctttgataaatcaagctcgtaactatcaatatcatcctcttcgtcatcaaagtcatcaaaaccaactctttctctttctgaaaaccttctctctgttccctctctccatgtttcattaattccaaattcgttgtcctcagagaacttagaaccacctctagaagacgtgttgtccacagacaagctattcctggcctttgatgaatcagcaaactcaaatgctgcaacatcagcaccatctgattcattgtcatcaaaatcaaagttccatgcattacaaacttcagatttgtgagcaggtctttccaatcgctttcgtggaacagattgattagcttccatttggctgttggtgtattcatctggtggacggttgtgttcacaatggaagcacgacatattccgcctgtagttcaaaaagttgcacctgaaatttgaaggacacattagcttatgtggataataccatgcacatctaccgttgaaacatataaattccatcatttttccttccatgattaccagaatgtttcttcagaataatgacaatacagaaatattttaaccacggttatgtaatgaaaaagatggtcacgatatcacctttaccagaaacaacacaatggcaaaaactctttctactgactgggtttattttaaattcagaacaactttgttagggtaccggttgatagcttcataagataaataatgaatgccagtcaattcttctaacagtgagaaagaaaaataagatgaaaggatggcaatttcactgtcagatccttctacagaggtctgaaaaatagcttttcccttcaagaaaacgtggaaatataaaatgctgttgaaagttaaaaaaataactctgttctgcctcacaagcagtattctgaccaaggataacttatacaaaagaggctggaggaaagcggacaataaatgtcagtttttgtagcaaattaacacaattgatcacttgtttatacactattctctagcctgacttaatatgcctttgatattggtcccatagataatatgaataatctttttggcccttggcttaagaagtttgatgcagaaacacagaacatggtggtggtaggatagctacagttatttgggccacctggaaaactaggaatagaacttgtttcaggaatacactacccaaagaccatgtgggtgtatcttctatgtttgtcattggatttctacttggcccattttgcaagggttggagggaaaggaaggaaaactgcaggagggagtaactctactcaagcaggtggcaaaggaggtatatgatgctcagcatggttggcagctttaggactggaagacttgaaggatgaagattgaggacggtgaaacaaccaggatggaggatgagatagtgtggtagtatatctttggcttctggttgccttttgcagaagatttgttttgttggcaaccatgagcagtaaaacctagcttagacctgcaaatgagatggatggcatctcagtttgcaaatgccatggaagatgatcgtctctaggaagttactgtttgaacaccggttttgttgccatttctgataatagaaatgggggttctcaaaaagaaaaagacgatggtcaaacaagtaaagacttgtttcaattcacaggtaataaaacaagggtgtggaaaaatatatgttaaaatgtattaggggtcactagtgtgtcttgcatgatgtagtagataataatttgacaaagttgtggttgatcaaactaaccgaggacactcccattctccagggagaagttgccttttgggacgtttagcatcgcattgcaagcaaatagtgttttttgcaaagttcatgaagtcacacctgcagccaaattccagaaaatgagaacacaattctgagctcaataagattctacagatcacaggaggaagttgctataagtactttgggcagagccaatctcctttcttcatctctacatcatcacgtcccactcgtttctttggtggtggaggtggttgtttcaccttaggtggtggctttctgattatagggggcggaagattgggatcaatggggacagcgctcagcttggcaatgtcatgtatcaatttacgaacaactgtcttcacagatttcagtttgaggagtggcttgttctccacagtttcctttacatgatcaaaaccatagaacaacaaaatacgcataacatcaagagttcgagcttcatcttctttgcgtgtaagaatatagccccttgagcatagatttcgtaaattacaagaactgcatacctgcaaagtaggaggaaaacaagaaattcagaatgtcacatgttcctagtgttaccatcttcactaatatttaaagattttaggttagcattggattatttaactaaacaaattgtctagcttagcttttacaagctacttggaacctgagaagataaggctgcaagaatttgtatcagtaaaactgaggcgtgtgtttcaaccctaacatcagcaagcccctctactccataacttgtacttcctccgtccctagaagagtgcctttttagctatgtacctggacattggtaatgtacaagttcatagctaaaaacacacttttttatggacggaggtagtatgtcttaatgcatattttgtaatatcatggaaaacgccatcataaattcatggctagttaaagatggctaatcatgaaatcagtcactgagaactgaataatccaacaaggagtatgaaaaacagttctacatctagaaacattggctcactataaatttcaagtcattatctaaaagataaatttcaagtataaatgaaatccgcaagggaatacaccatagcatagaaagacacctgacatttagtattggcaacagttttacatggcagaatcttagttatctataatataaatgtatatggctatgcctcagaaaaatttgaaattggcccaagctacttccacagcaagcagggtggtgtcaactatacctgcctttcatttccatgtgttttatagaaccaagtggggtgttcctaccaacagtaactcaatcaattcaggtaaaaacaatttggtctggaatccattgataagcagcacagaaaggtagcaccagtttactgtactggagcaagttaggtctagatgaatatttattttgttaagaagtctagtttgttttaggtaatggtttattagtaagtcaatatatgttgcacaattatttgttgctggtgtcatctctgcagcagtgaacgcacacagcttgtacagcccatacaaggatgcagacgttattggacaggtcatatcccagactgcatttatatggtgaggccgacctctccttcagtgctacatggtttttctgttgcccttcctgcacagttcattcatgcacatttgaatagggagatagagaatagggtcgggggagtgggggatgaggttcaggtacactaacaaaacatcatagcagctcatgcctcctaaatgctagcagctgacttcaagatgtgttctccaacgttccagaccaaagactaatgttgtttccaaagcagccaaataagatttgtgtattcatggacttccaaccgataggcagcaggcatactgggcatagttatctatcgattagttgtaacgcctatttcattaatttctatattatttagtatccttatctgttagggagtttatttaacaaactgggaaactatgcatggataagaatctgagagcctcaacataatcacataacatgaaaggatgagtctccactaccatgtaggttctcatctggaatcagaccacctggccatcccttacttcacattcaactgagcatagaaaagagagaatggataattgatgctaatggaaaagaaggccaagaaaaatggagatcaagtgggacttaatgtgattatgctacccatgatcattaccacagcccactacaaacatgcagtaaagatacttttactgttccagaaaaacaacaaaaaacaagcagttttgtttccttatgaacttcagttgaattgctacctaaagtcagatatgcatgtctttatatgtttagatgttatatagatgtgcatggtgtcgtacatggagtgtgaacatgtcacacgtggtcctagtggagctagagataatctgtgttctggaatctaatttggactttggagaccagtcatactttggtcagtggtaccaacgaggcaacaaggcagagatagtaaaggccttcgtggcaggcaagcatgtccaaactgtcctcatcgatgtgggctcatgctaaccatgtttagctccacatctcaactttcaagctggcagatctgccatcactgcctatgggtatgtttcacctcctggtactgagtacacctcagacatacaaacttgcgcccaatgaacaccattaattttgcatgaacaccactggttccataactgtacttcacagacaccaaactccagctctattgcatccatacaccagcctccagatattcccttccctgccttcctgcatgtgcccattccctgattgccagcatgcaaatcggtcaactaggtggaactcttcttggcgcctagctacctagtgtctttactttaggaaaaattaccaggtagcaaaggtgatgatagtgaggctagcaacattatcatcttcttacaacctcttcaaatcttgtcctgggtgaatcattaaattatattggacacaaacatggccaagaagaggcaaaaaactacaggacggcttgagaaaacatttcaggtagctatgcaagggagaaattacacttgtccctaaaaactcaacagtgactctatttatattgataaattgagaaaatcgatcctccccagtttgtttttcctatttctgttactttccatgccatatcgactggccaaaacattttttttctcaaccagcaataaaaaaagcagcaatatggtaatttttgaacgataggaaatgaaattttggtttaggagcaacttacatccccctcatcaagatggacaagttttcttatcagctttgcagaaaacacaactttcggatccatgctagggcacccatggccaaccaatacctgaagatccttcctaggcaatgacctggattgataagattaaggaaccattaataatggtgttaatacaatattatttgattatttgttattacatctattggctgccattccagtaccatttttccatgtttaaggaaattaattgccttttttccagaaaatggaatggaacttctcttagattttcaaaacaaaattccaaattctgttcaagtggtctttactaattctcaagtaggaaagatttgtatgtctgtttgcctgtgctttaggcaagaatatacacaacaaaatttatataatttgcatgcgtttccagcagtctttggagtctgtttatcacaagtacttcacacaaccacatagaaatttatacagcggaaagtataataatggttatagagggttgtgaactcgtgatcaagtgcagtccttgcttttactgcgatttaagcagtaggagcccatctatgtcatccaaaaatcatctaggattcactgtccacaccttttcccccctttgttcaccaccctcaaagttccacgaagcaccaaactcagccgtgattttgacgctcaagccgagccctgcaaggtgcaagcatcttgaagccagtggccgtgaagtcgtcatcaacatacagttcagagtcgtatccttgaggggctcgtcgatgccacgttcaacacactgttaccagaactcagactcgagagtcggaatcttactcggactcgggtgtccaactcggcaaactctagaaaataggatccgggaactcgtctaacatatataatttttttattaaaaatattacatagtaataccaaataccaacaccatagttggtcaaacacttaaaactttaatatcagtagtcttgtgcacaaaggatccaattgctttgtatcttgtgccgctgaacagtgacgtattgcaaaaaaggagaaaagatggtgcatatgctacagcctacagatactctcttctctctagcctgcggctatccctcttccagagcctgaaaaagctacaacttgactctctttcccagcccttctcttactttacctcctacaccaagtcatcttccctactagaacaactagagttttctctaccatacagcggctgcagagcccctgcaactcctctctcccaccttgggactcgccaacccacgtcagatgcgtgtcgtcccgagtcggacgcgagtcgacacgcagatacacgtcgacgcggcaaatttttttcctgacacgtgtgtcccggtaacactggttcaacactaaggccagacaagcacttgccagtggcagcaaggtgctcattgatatgaagctcattgacctgcgcttgaaactgtctctgcatcgcagcagccattgtgagctccttcaagagatcagataatgctggttaaggctgcgtggcattgggtttgctgcctgacagagctctctggagtggaccaggtgggattgacatgttgtccctaaggaaggacttgccgtttgatctcttttggaaggggctacttctaaagttgactgcacctgatgtcctgatccccatccgtgtagggacatggagaactcaattagtgtttaatatttgttctgtgttttgagaataggacgctgtccagaattttaagcaaactataagaaaaatcaaggagataatttcaaagggaatgaattgctagtaccgagcatggtaggaggggttatccacacgtaaaaaaagggacgactcagtgaagacgttcaagaattatgctttcgtggaagtatcttgttagtttcaacagattgcaatgtacagattttcttatgcctacgatctagaggtaagcagagggcgttgagggttcgccggcttacgttggcgccgcggccagcggcagcgaaggcgtcgacggcctgagacagcgtcgtcttcgtgacaggaacaggaagatcgcgatgctcggactcggcaaaaactttcacggttcgtcgagatggccggctacaccaaccaaaccaaagactacttacatggatcccctttttcaccactgtgggcagacagcgataaagaatccgtctggtcctcgtcttcgtactcgacggcggtgttcataagggaggctaacgagactggcttcatggtggaaaagctcctacaggcagaataagatatttctcttttagggcacaagatgggtttgacggcaaggcgagtgaacgaattgatggtcagtcatcgcttggcttgtcttccttggcgtggtcggctgccagtgcccagggtttcatcgtcgctaaccattggggacgtcattgcttcggccaagcaaccaaaggtacgtcaactcttagtttcgatgcagcataattctccggtgatgtattccgcatcggcgagacttcagtctttgccggcggtgaggtatgctcgatccgatgatgtcagtgagtatccgagtcttctgggggatatgcaaatttcaaaatttggtttgttttcacgtgcaaaccaggcccattctcctccaaagcccaacataccctttaggcccatgctcgcattagtttccctactcgctagaacggggacttctcaacttgtggctcctagggttatcgccacacaatcgccatacacggacgttgtgcgcgagaaacaacatcaataatggagagaattgatgaagagacctatcgaggtggtgcaagaggtggaggtcaaggttcgtttgcggcaggcggaaggggtggtttccagggctttaatcacggctatgcaaccggtggtggctggtcatatggagtcggcgatcgtggtagatcgatggtggcagaggcaacaaagatcgtggcttctacgacggtcgccatggaggtgggagatacggtggcaacttccaggggaattggcaaggcggtagaacggtcagcgctttccgatgttcacaggcaacatgccgccggtgtcgccaacgattggagtcgctggggcagcaagtgcaactggagtggctaggactggtgccgtagcttcgaagggtttggctacaacagctagtggcgtcgtcccaccgatggctacagcatcaggtggtcttcgtccactggctggagtgaccggcaaatggagcagtgtttggagtggccagagggcctaccttggccaacaatatggcaggaataggcagcatggctggcaacattgccggcggcatggcaagcatgggtggaggcatggtcagtggcgtggcgggcatggctggcggcaatgtggatggagggatgggatcgcaaggtgcagcaggtggggcacctagctctttgcctgcagctatcttgttcgcttagccaggtatgggcataataggtaatggggcagctgctgtcgtggcccaactgaggtctttgacagtggtggcgcatggaggttcaacacctatggttctaactgggattgagacaggaaagaagacaggtttgatagaggtccatgcaggaggtgtgacgagttcaggacagccgggagtgatgccagaagcgattgtgtcgcatggtggatcaatggctcaggtacatatgacaagtatggcaggggagaacattaatggtgatgtggacgttaaggctaaaatcccatattggtaccgttgctacacaaagggtcatacccttaaggagtgtgtaactcagcttttctgtaacatatgtgaaagtgctgaccatgtaacatctagtgtcctgtttttaaatcagcaaacaagcacatggcgtctttgtgtggttatgcggtggatggcttgggattctattatatccctcttcctgcaggtcagaaggtgaagcatgagtctaatgtagctttgatacatattacaaaaggggttctaacagtgatgaatgtgacatcggagttagataggttgattccaagtaaatggaaatgggaggtttatgataatggtaacaatacttttagaactatctttccttctaaggtggaattgcagagaatggtagaatgggggcaagtgaatactaagtttgtgaaagctaagatggaaatgaaggagagagatgttgggaatgagataaaatatgctattccaaaggtgtggatacagtggattaactaaaggagctaagggaatactagatcatatgggctgttgggttcattcttggtgtcaccgagatagtggatatgaagttgaccaagagatatgatgcagcccatttgcaagttctggttctagatcattctttaattcctgaatctgttgatgtgataattggagatttcttatacgaacttcaatttaaagttgggcctaagaatgatgatgaaccggtgcctatggagatggataattttgatggtcctaatgatgacacaaagaaagagggggatgatttggatggaaagaatggtaagaaatcattatggtaagggaaaggagttatctaagtccaatgatggaaaatcttctggagttaaaattggggcacctacacagatatgggactgacggtttctgatgagtatgatggacttagaaaacacaatgatggtggagactggccagcaaccttcggcacttgtgctagcgacggttccgtaggtagtgggcaaatgattcggagcaggattctcttgagatggcagataagcttaaggtgatgtgcaacctagagattctatcttcaaaaggtaatagcttagttcataattcttttttgcaattttctgatgagcaattaactagtaaggtcactaaattgggaattatgttgggggtgatgatacttgtgttaggactatactacatgatagtaaatcttcagaacttttacggttacaaaatgttaacatgcaagaaaattgacatgttaatgttgaagtggaagaggatgaaatgctagttgaacaggaatgtcatgatattatggaggaggtaatggatgtgggtggtgatcacttgtgtgattttaaagccataccatcttcagaactttcttgcctttttgtttaatgtcattatagatggtttaagtctaagagagttatatatgtctggaacgatatatacttgtgctaataatttgaatgtgcctacttatgaaaaacttgatagaattcttatgtctaccgaatgggagcataagtttcctctttctactgtcaatgttcttactagagacatttcagcaagcaaactcacatctgtctctaaagaaagatccattttgttcgtgctgaaggtttctccgtggaacaatccacgacttaatccatatatatctgatactatgtggtttccaactaacaaacaaacaatgcatgcaagctccacgagatgcggctaaggaagagcaaacttacttgacgatgtcgaaacggtcacggccgaagttcatacaggcattcttgacagtggtccagtccctagagaagtcaaaaccagtctcttgagtgacttccgctaggtccattggcacggcggcggcgacgcagccctcgtcagcgccgccggtgcccccaaggtcgaagtatttctgctgcgccagccgatccatcagctcgatccactccggccagggatgcacgagctccacttccctccttagcacctccgccacgctcatcctctccagctcctcctttccggcaacgtccaccgcctcaggttccttcttcaccggctcgccaggttcgggtgccggtcgcggctccgcctccgccggcagcacgtccggaagcgcggcggggcggcgccaggactggatgcggcggagggccgcgtcgcgggcggagtggtcggagaagcgggagcggtcgagggcatcgagttggtcgaacacgaacgagaggcgggcggagagggaagggggcttcgccggtgagagggacgaagggcaatgggaaaaggaggaggaaaggaggcgggggaggagcggggggagggtggggatggtgcagcggcggcggcggcggcggagaagcgatagaacgtaggaagaagccatgatgtgatttcgtggtctccgtggtccgtggtataggtggccaaacaggctgcgcacggcccgccccactcaccactaaaccccgtgaggtggtggaataagtccacttaacctcccttaaccagtggccaaatctaattcttatccctgaactacaaaatattagatatctctaatcctagctattaaaactagtgcaatttgactttctctctctctcaactgttttgaagggtaatttctttaacatggcactttaactaggtccaacctgttgagtcaccctgtgagacccacccgtcagtgttagaataggtgtcgaatatactagtcctaattggttacagttggacttggagttataataggtggtgggggtgaagttagagtcggactctataacccggcaactctcttaaatagagaggaggcaccacaatataaccatggtgactacaatatagcgtaggcacgcagggagatgatggtgcgcggctatagactcgtagcagctatgagctatattgattggggaggcgcgcccataaccagagccccgaggatgtaagcttcggctgaacctcgttaacaaatatcgtgggttcctgtgttgccatctggcatgtcttagctgatcaatgactgaagcgatcgagaaagttagtcgtcgttccgctatattgactaacttttataacaagtggtatcatagcagaagttttcaacattggaccaagaagacatgtggaggaggaaacacaaggtgaggatcgcacatcgacagaagatcgtcagccatggcgatgagatcgatgacgacaacgaggacgtcgcggagacgatgacctcactcacgattagacaggtccaggtgtggctgaaggcgaccagagagattggaggggtagcgctatggacgacgcgcccaacgcacgcggcgatcgcggatccgcgactgatgtgaccatggctactacggatacatccgttgctcacatcatagatgaacaacaagatatcaagttcgagtcctccaagtgctagaatccaattcggccaccgctacactgctgacttcaaacggccgtcgaatctgcatacgacctccgtttttggcccatgagtacttgatggaaagctctcggagtcctctttgatctagcctcattgccaaattccatctcagtcggcagaaactgaagaaacaaggtgctgcgacacctgtaatggccctatgggcttgtaacttcgtctgggactccgcccaagtggggcccatgtggggtgcgcaccaacccagtggaggatgacctagaggacctcccacctacttaaataggtaggtagccctttagagttttttgggttttgatagattaaagtttagctattgctacttggttgcagggcacgtgtcggctagaccgtccgtttggttgtttttcggaaccccaacttatcatttgtattaaattcctatttgcaatatcagattgcttttatcttgttcttgcttgtttcttcgatttgcttgcaggaaaagggttgatctgcaccggcaagatcaacaacccacggagaggtgtatcgatcgctaaggcgcaacacaacgtctcgtacggttgtagtcgggtcgtcaacgtgtctcccaaatcgtagttatctcaactcaccgaaagatcgggccaacaacagccttgagtgtcgagtggaactcagggttcatcagcgacggcagggaggccagtgatggaagggtgaagtcagcgagcgcggcatggcgcggcggacatgcagggccgggacgatggggtcgtggacggtgaccacgagggctgcggactgcgatgcgtaagagaggcacggacggcgtacacaaagtgcacgtcatatgcacacaagctacaccaatgagcaatgcaacggatagagaacagaggagttgctggcacattgtattggaagcacggcaaggatacatgcatgcacttgccatgcatattccgaggtggcaatctgatgcatgtacagggagacatcaatagctctgctctagcgccgtgtagcctagtgccgccgtcaccgccgttcgtccagccgtgtgccaccgtcgctctggtcgtcgtcgtcgctcgggaaagccgccgtcgtgatcgtcaagtcgtcgccgacctcgtccacccctccgtcgtcgctgtagatcgccggagccccgccgtcgtcgtcaagctgaaggtcgccgccgcttcttcctcgtcgccgtcgccgtccgttgaccttccgccgctgttttggtcaccggtgagttttccacgtcgcccgcaacccgtaggtgtccttcgttcgcgccgccgcgccgtcgttcgccggcgagcatgcgaggccgagccgccgtcggtgatgacgtcatcgctgacgtcatcgacgccgtccgtcgtagatcggtcgtagaccgttagatcttggccatccgttttggatagatcgatcacggccgtttgtttccgtgaaccgccgccatgcacccggtccaccgtgagccgacccgctgacgcaataatcccctttttccttttcaaaaataattcattattgcgtcataattcaattaaaatctatataaatgttttaatccgattaaatctttgaaaattcataactaattcatcttagctcggatttagttggttcaagtctctaatttttctaaaattgagatctacatgttaaaaatatccacatatactgttcatgcttgtttatgtgctgttttggtgattttgttcttttctctttagattccgacgttcccgagagtctgaatttgcaagagaagactttgaagagttccaaggccagcaaggcaagtcacacagatcccaaacaatcctttgagcatgttgatcccgtttaaagctattgtttctattcaactattgcatttatttttgaatgtcattgggtggaaataacctattgctttgttatagcccttttgttcttgattaccctattctttgataccttgggttattataacttgactagttgagctttatatatatggattcagctggatattagatataattgcttagccatgcttagaaacattggcacactactgggataacttatgcttcactattatttaatgatggcttaatggtagctcattatggttaatcatgattggttaattaattaatttgccaactaaaacctgataatggtgggttgtgagcatatggttttgatggttgtgctcatgacaattaaggaccggttcacgatttttgattgtgaaacatttaccgtgccaaccacaagccagcgtgggcaacggctttactttatgtatagtatggttcatagtagagcaccagactgtgaagtggcggagataagcccacgggggtcgctggggagtccataccttgtttataagggggtgattatgatctaggaacggtacactgctttgaattgtattatatagagggtattgttacaatctctattcgggtacttgtcaagtatcgtgacgcatggttgacatgatgttaaggttgtgtcttgtgggtacagtggtacacctctggccagagtttaaactattcgaatagccgtgcccgtggttatgggcgggtctaacaatgtctttcgtgattagtcttacatttctcaccatattaatttatgatgttaataacttgtttagctcctggtttggaatggttaattcctggtttggagatagaactgtgtagccgggattggttgttcagaatggttgggcctatgcaacagggtatgttgtatagcattggattaatattgtttaattattatttaactgttttattaaattctgaaatatttgttaaatgctatttatgcaaatgagactatactatgccatcctttgttatcctgtgcacttgcatatttgctgcgtggcttgctgagtatgtcatatactcaccttgcaatcattcatcagaggaggagttctacagtgatactgatggtgtggaggattaggcctagtcctggtcaagctgcctgtggagaggagtcgcttgcgctgtttcttttattttccgctgcttagaactttattgattgagaggaactatctacctctgtaatgacattttattcgcttattaattagagtaataattgtactctattatcaatttgttattgtgtgcctcggctgattcctggacgagggtttacacacatgtaagcgtttggaattttggatagaaattctgggcgtgacaagttggtatcagagcctccttgaccctaggttatgccaaatggttacctatagaagccctctaaaaatgttgaaaagtagaattgttctcctctctttctcttttatttaaaccaaactaatggcacatgcagtttataattcctttaattgttctcattcaaaatttatttattattccggtgttgttagtactgtaca

SEQ ID NO: 6032 - DNA, 8587 bp, Oryza sativa
aaatgcctgctttatgcaaataaacctttagcctcctttggatatatcttgcatcataccttctcttctggtatgacttgctgagtgcagtggatagtactcaatcttgctctctcttccccacaccagagctgaagttcttctcagttgggctgtctcagagaagttggtttcgttgccgccgtcaagaatgcctgtggaatggagtcgcctcgctgcaggagtcaagtcttcaagcttagctcgtttttatctttctgttgcatttgtaaatcttttatatgtttgtaagacgtggatctgtatgtcaaaaattgtcgcttgtgtaccctagctggtcctggataggggttttaatgtacattcagcttagaaattctggttcgtgaatttatgggcgtgacagtagcgaagtatctgctaaggtttagttgtttgctagtcattgctagagttgggtagcatgatgactgagtttggtatcttctctagccggtgtccacgaatagcatatcggctagaggaataggaggttggtgcaagtttagcgaggcgaaagtattacttcacaatcgtgggtggcgacggagcgactaggatcgcacagagcccgagagttaactgtgtggcgtgttgtggaggtcaagggaatagtgaagctccgaccactgtacacatcaaggcgtggggtgccaggagcagcacttcgaccttgggtttggttctgctggattttacaaccaacggtccgacgtggggcccgtagaccgcacgaacatccccatggaaggcgtaaagttccaaccggcggctttttagtggctaataggtattttgggataaaataaaatatttgaaaataaaatataagtttaaattggaaattcaaatataggagtaaatcaaatataaactcaaatggtatttaaataaattaagaaaattcaaataaaatattaaaatactaaatttggtatcaaaatgtagagtttgaatttatatgaatttaggtataagtttcactataatcggatctacactttaggagatatgggcttctaaagaataggatttgaattaaataaggaaaatacgaaaagttactgtgtaggggcccacctgtcagtatagatggccatgtgggcagcttgtcgggccggcacggtccgaccgacgcaccgggctgtgccgtgccaacccacgtgccgcactcacggcccaggcatggcccaacacgactcgggccgtgccgggccggcccaaaggtagagatggcccatcgtgcttttcctcagaataagtctattttatgtctctcttctttgggctgtgatatataaatagctaaataagtctatttaaggtccctattctttggacatcgacatctctaatactaccaattgcagggttcaggatcaagtttttcattgggccacatgccaacttataaatttcgttagggcccatctgaaaatctgccacgtgtccccttctctgattctaggatttgctccgacgcatcaaagccttcaaaggtagagatggtgcaaaggacctaactgtaaattttgctattcaaagggagttgaatgcaaaaggtacgatccctatcttccacatgattcgttccccctcctgaaacatcaagagcctcatgctaagatcatcagatcgatataaatcaggtcatgtgtgaaaaaaaaatagcatatctaccctaaatccacattgagaaaactaaaaaaaaatctaagaagattaaaaagcacggcagaagtaattggtgaaaaaaattgaacacaatctccttgcatattgcttgacttcttcagttctttgatatcagctttctataacgccgatcagaattgggaaaaaaaacaaggaaagcaaaaaaccaggaaaaacaatttaagcaatacatctccaaggagtacttcccaactatctgctcccttaggcaaggaaaaaaaatctgttgctccgtcctattcgattgaatatacatccaggattgtgaaggagaaaaaaagaaagaaaaaatatcagatgcccaaaaaagaaaaatcagtaccggtggttagctagacggatgaactagagcttgaccggctgccaacaacgagctatagctcagctcactttctctgtttcctctcagatgcggccagccacctaccgtcggccgtcacctccctaatccctatccacgccggattaggcccgctatggctagcggttgcacagcaccgaatctagcggacgaacatgtcgtggcccatgtgagcaacaggaataggggatcatggaggattggtggcgacggaatccgcagtgcgccaacgacggggaatgagcgagaataagactagttttattcttttctcctttttttcgactttcatctcggtgatttctctatgagctttatcagcatgggcaaaacgatatgggccaagagcccaaagagaggtaggttggatatggcagtagtactatgtgtgatttatttctaactcgatttgttcgccaagattttcaacatattgcaaaccccaacgctaggggggcttgggggaaaaaagattgtctaaaatacaatttcatttagaagaatctagaatacaatgggtctccttaacaattagaccaagtgaccagtccgactaggtagattagtcgtgctgtcctaaaacagcgtcaatataacttaatgctatttttctagattacacgacagagccacacatgtacacatcactatatacgcaaatacgcaataccacactgacaaattttgctataacttacaatcgtctaaattacatctaaaacaaaaatttagataaagaatcaattatccaaaatattaagttaattataactatcactgatcgattagtttgatgtatttgtgacatccgcatgcatagtgttactacatacccaccttgatcactacatatatgcatgtactgattaaccggccagcatgccatttggcctaattagaatactcaggagcatttgatatatttcccgtgttctctctttccgtccaacaccaaaactaatactccctccgtttctaaatatttggcaccgttaactttttaagaacatgtttgacctttcgtattattcaaaaacttttgtaaaatatgtaaaactatatgtctacataaaaatatatttaacaatgaatcaaatgaaatgaaaaaaattaataattacttaaattgtttgaataagacaaatggtcaaacatatttaaaaaagtcaacggcgtcaaatatttagaaatggagggagtaaaatagtgggatgatgtccagtagcaaggagccacattataacagtgtgtttctctaaataaatatttacttttacgctacaactaaaccacgaagtcgcaaaatccaataacagattttaccatatttggtgtttcagaaaagattaagtacacaaggataaaagataaatgtggcataaacaatatacataggaaatagaaaattgttagcatttcatgttcacattgtaaactatttaaatttatctcaagttaaacttctatagctttggctgacttcataaaaagaataataaaactacaacaccaaactaattgagttagatttatcatgaaatatgtctccatagtgcatttatttattattatagatattgctatacttttctataacttataagattaacttagaaaaaggattaatgaaaaggagcaatattgaacctatgctattataaatgttcggataaacactacacctactatttggtaacaccaaaaattagaaattaaaaatattattaattacatatatttttgtttatagacgtatatgggcgaaaaaatcaggggcgccaacaggcgcaccgattttctagtttatatgtctatttttagtctctatactttgtgtgccgggcctggccttccggcccgaccgtgccgggccagcccagcatgccggtggggaggcccaggcacggcccggcggtcaggccgggccggcatggacccgacccaagtcgagccatgccgtgcttgggccgagccaaaatgccgtgccgtgggccggtccttcgggcctcgggtcttatgtccatctatacttgtcagggaatattctattctttttatttttatttttcatccttcctctcgtcttctttcttctctgtttcgttcttcacaggtagagcagagggaggagaggagcggggcgccggtgctccggtggctgggtggttgcgacgccggcggccaaacgtgttcctgagggtggcgcacccaggaagggtggtggccggcagagagagtgtgggatgtggccggaacagtcggtagaggagctcagctctggcgacaaaaagaggtggtggtggtggcttgtttcggaggggggaaaggaggggaaaatggtgaaatgggctctcctcggcgaggcgaggctggtggtgagagggaattggaagagttgctatggaggaggagatcggccggtgactttgtggtagccggccatggtggagagagaagagagagctcgaggagcttagttgtggagagggatggcgagcttgctggccatttataggcggagagaggcggtggagtaagtcggctgcggaggagaacggcgaggagtacacggcgacggctgcgtggaggagaaggggacggcgcggcctcggcttccaattggtcggccatggcggcgcgtgtacgtggagactgccctagggttgggcggcggaggaagaggagcacaacacggtgatgccggaggtgcaactcagtgggcggcagtggatgtcacaccccgaagttctcctcccaagccaaatttaatttgtaaacaaccccaagaaaatgcaggtgcaaatcaagagaaaaccctaagaaagtaatgcaaataataatcggatttggcatgtggaatttttcttgagttctacatgtcgaaattcattaacaggatttttagtggaattttcagagctctagaaataattttaaccaattaaaattgagcaagcaatattttaattccagggaaaatcctttttcctttttctttttctttttcctctctttttcctcttttttccgaatgggccgccggcccattctctcctttcttccccctcctccttgttgggccagccgcaggccgaggcccatccaggccgtcccgcctccctcctctctcggggtcgccgacaggtggggcccacctgtcgggcccgtctccctcctccagccgacgccgcgcccgcaaccgccgcgcccgcaaccgccgccgcgtcgcctccgcctcctccgggccacgtcgaccacgcccgcgcgtgcgccgcgttccccgcgcccactcccctctctctcccgctcgcgcccgcgcccgagatggccgggattcgattttcgaatcccgcctctctctcctcccccacttctcccacgttggccggcgaaatcccgcctctcccggccacgtccggccctcccctcccctatttaagcttccccgtcactccctctcgctttttccttttctcgccgaactccctcgtgctctccatcgctcccgcgccgtgcaaccacccgccgccgccgtctccgctactccggccgccgctagccgccgctaggctcaccgccgcaccgcgccgtcgccgccgtcgggttcgcgtggccgagatccaccccgtccacccctcctccgtagagattcgccgccggagccccatccccgtcgtgcgctggtgagtgacgccatggccgccgccttcggccggcgccctcgctctctcgcactctcctctctccctctaacccctctccttttgttcgttaggaggttccgaagctcgtcccgccgtcgccatcgtcctccgtcgcccgccgtcgtcgaccgttgtcggtgaggcctctcctcctctttctctctctcccgcactgtttagccgtcgcgccgccgcttagccgcgtagctgccgcttcacctctagccgccgctctccgccgccggtcggtcgccgtcggccgccgtcttgcgccgctgccgcatgtgcgccgcgccgtcgcgcgccatggtcgccgggccggtttgcgccgtgcccgcgcgcaccggccgcgagctcccgccgccgtccgatctacccttgggtagatcggggccatcggttcggccgccgcgtggcgcgccgctcctccccggtccgtggacccgatccgccgtggaccgccctccccgagccgctgaccggtggggcccgcttgtcggcgcccttcctccctccccgagccgctgaccggtggggcccgcatgtcggcgccgcgccccgccttgatgacgtcagccctggaatatattgcgcaataaatgatttaaggtttttcttgtatagtaataaacacagtgaatcttctaaaattcataactaattcatccgagctccgtttaaacccattcaagtctcagtaaatcaagaaaaatgtgtagaatccattaaaaatggttttgttccctgtttcagtagtcttatagcctgtttgcaatgtttgctttgtatgtcactagattccgattcctccgacgctccggtgtacttcgaaatagtcgccgaggttcctccagcaacagagcaaggcaagtcatgcttgtcacttgaacatgttgatcctatattgcaaatgctctattgttttcgttcaaatactgcatcgttttataatgttactatgggttgtttacctattgtcatagccatgctattgttgtaccttgtttctttgtcaacttggggttataacatgattagagttaggactagggaatgcttagccatgcttagttcaactagtgcacaatggggaaaatcctattaatgtttagactgttggttctaatggtgttgttggattagtgacaccgctttggtgttggttaattaaaataaaccacatggtgggctgtgggtgcatggttttgctggtcgcacccatggcagttaaggaccggttcgcgggatgccctggaagaacttatcgtacttaccacaagccagcgtgggcaacggctgggcttgtagcgtagctttcctctagccgacgcatccaggcaagggtgagcgtgatggagtttggatgggccctgcgacggcctatgcggcttccggattcacctaggcacgtgaggggactgcccgctgccttgcgaggagtgggggtgaaacctgaggtgtggtgtgcttggttagagggggttatgcgaagggtcctgtcacggcctctttccggtatgtcgtggtgacatgtcggcgcacggaaacgtgtcgtggggctgtgtcttgtgggtacagttgtacacctctgatcagagtaaaactattcgaatagccgtgcccgcggttatgggcggtcaaccagattcaccatgatttgtctcaccctagtgtaatcttttaaaattggatagtttaggtggatggttgggcctgtcgcaacgtgggttagcgttggacagtggatagctgatattgtttaattattacaactgtttaaatctttcaacttctgtttataaatgctcgctttatgcaaatgaaccactttagctcttctttgatgattccgtgcatcatacccctattccggtatgacttgctgagtacagtgggtagtactcagtcttgctctacttttcccaaccccagagttcgagtatgtgtcagatgaaggtttctccgaggagtaggcttcgtccgtgccgtcgaggatgcctgtggagtggtgttcccgctgcagttttagtcaaggcttagctcctgtgtctttcttttcttccgctgcatttgtgtaagacttttatgatgtttgtaagacgtggatctgaatgtcaacattgtcgtttgtgtaccccggctggtcctggacggggattttaatgcacattccgcttgaaattctattcgggaatttctgggcgtgacagtggagaacggcgggcggcggcgcaggccgtaggcaatagcagcggctgcgccatgcgcgtgcgccacgcgcgcccatggcgcacccccagagaggagagaaggcggcggctgctgctcagcttggctagctgggccggcttgggccgtgcgctaggtttgggccggggtagggaaaggaataagtttatctgaggtcccttaacttgtcatcgaatctgattttcatctttcaatcggaaaaccagatatcacgggtccctcaactattaaaaccggtgcagatgacgtacctcggcggtttagatggcgattttggctgacatggcgcttacgtggctaatttgactcggtcttcatttgtcgtggcattgacgtgacgcttacgtggcaatttgatccggaaaaataataaaacccttgggacccacatgtcagtttcacacacaaaataataaaaaggtgggacccacgtggtctccacatgttatcctctttcaacaagaagctgggaacgaaccccacgactgcaactatggatgtggcggtggcgggagca

SEQ ID NO: 6033 - DNA, 30977 bp, Oryza sativa
gtgtagctttcctctagccgacgtacccagacgagggtgggcgtgatggagttgggtcggccggggtgtccgattgatcggcttccggattcaccgcggcacgagataggggctgcccgttgcctgctagggacgggggcgaaccctgaggtgtggtgcgatcggttagagggtgttatgcgaagggtcctgtcacgacctctttccggtatgtcgtggtgtcatgtcggcgcacggaaacgtgtggtggggctgtgtcttgttggtacagttgtacacctctgatcagagtaaaactattcgaatagtcgtgcccgcggttatgggcggtcgaccagattcaccgtgattagtcccaccttaataaatcgactcaatgcactgtagttcaggtgggttggttgggcctgttcaacgtggtgtagcgttgatcagtggagatttaatgttactttaattactcaacagttttattattttgctcaataaaatgttttacaaccgcctttatgcaaatagccacaagccgtccttgtatccccttgcacgtctgcatcgttggtgtggcttgctgagtacggtggttgtactcagtcttgctattatttcccccttttcagaagtgtagtgcttctgagctgaagacgaagttagaagaccaaggctcagaccccagttgagttttgcctgtggagtggagctgaagccccgctaggatcgcccttttccgctgctgctgcttttgtttcggtgtgaggactaagtgcctcttctataagtattttatgctttatttacgtttggagctgtatattacttgtcgttttgtgtaccctggctggtcctggacaaggatttaatacacaaaatagtctggaaatttggactaaatttctgggcgtgacaaagtggtatcagaggcaacttgactgtaggttgagccaaatggtcaaaccctaaggacaagttttctgaaaaccctattcgcaaattgtctcctctcgcccttcggcatttctttgcgaaacagtttattaaaatttttcctccctgtccctccaactcttttagttgtcaaacatgtaggagaaaccgccagcttcatgcccgtccagaagtcaagtcgagtctcaagcttcgtgcaaggagcgggaagattagttcagagtcatcgttccgcgaagatcaagaagagttttcccgaagttcacctaaacctaatccttcccggaagagtagttcgttagattctagatcgtgtgttgtttgcttgtgtgtaggggtatggtttgcatcattggtggggatgcgactatactaggttgtttgcttaagcaacttgaacaataaaaatctattaacaacatatcagtaggcaagtggtttagtaccttatctttagcgacccctctcttccacctctcttccgtcctggcagcagatggtcagtgttagagataagatcaattaaagccacagatcaatggtttagttgaaagctgcaaggtgccccaatgccagatgaaacctgctcatgatcaacttttggtgtccaagatcagaagatgggtgtatcgatgtgggagatgcaggttcgacacctagtcaaatgtagcggaaataactccagcagtagtgtgttgcagtcagagtcagtggatcagttcaagacaacaagctaccagctaagtcagagcacctcgctctggttagccaagattggaagatggatgtgccagatattgatgtagcaaccgcagagtccaaagcagcagatgcaacgacaatgtctccaacaacaagtacaagctcagatgcaagccggaatcaggatcagagcgaaagtcagtttgttttccaagagcaagcacctgcaacctcagacagtacgccaccaagtctttagcagaccagcacagctaagtcacccccaatcccagaggcaacaagtgctacctatagtggttatggtttacaaggtcagttcttgcaaggttgttcaacggcaaggcgttagcgtcatcaagacaacagctctattcgcagcaccccagttcctcaagttgtgtcaattccaatgcgagtcggtcagtttagttttgagatatcaactacacaacccatttaggtggatgacaccgaagtcaggtcagaagaaggacagtcatgccagcagttattactgatgggatagtcagttaagagttagtaagatcaggagctaaatgagaatttctttatgtggaatttcctatcagcaactgagggttaagttccaaatcttaatgggatgaaagtgcatcgttgttactctattttgatcgatcggcgaagtttttagttttcaaagtcagggctcttcgcaaaacagagaagtgttggttatattcgaaggacaacagttcaaccgatctcagccacgcgaaagtaagactactccttgtaaggggggtaggtctcggagaagagttttgcctcacttcgtcgctgttttagttgaaggttcaaccagtgccgcaatcagggtagcacttgaagaagcatgttgcaaggtatcagaagaactaagccgatcccagggcatccgatgagcccagttcaacagcttagcttagaggagcaacagtgaggacagttgcagttcagacgaaagacaggtcaagcaggtttcctggaattacgtgtcactcgagtcagaacccgttcaagcggatgtaggatcaatgagttacaaatgccagatgcaagattcaggaacaactccatccttctctagccaacttggtgaactgtcaggttatcaaattgctagcatcaacggttcagtccaagataagtaagttccaggagcatccgcagttctggcctgggtcagttcaagcagaaccaatcagtccagttttggcaaagcaaaggaacagaaaggtcgaatccagccagttcaatcatgcaggtttgatcaaccagtcaatcaatcagttcgaagcagaatgtggcagttcaatgtgcagatcagtcagatcgcccaccagcactggctttctttctagccatcccagaatctcgggacgagattcctgcaagggggggagatttgtaacgccccgattttcgttcggcaataaaaatcaattaataatacattttctagaaattaaataaaagttaaatcaacttaatcaagtgaattattgagggaattaaaaatttcctttaaaaattattggccgggaatattttgtaatattctttgtgccctaatgtactctccggaattttccgtgaattttcggagctcgagaaatagttttaatagcacaaagatcattgcatcaattaaaataaaaagaaaacaattaaaatcccccttcctctctttgggccattttcggcccaagtcttccttcctctcccgcggcccgcgcgccttctccctctctcgggccggctcccctctcacttggcccgctcgcaaaagtctgttttgcgtccctccttctctcccttcgccgacaggtgggaccgacggtcccacccgtcagctcgtcctcctacctctcaccggccgaccccaaccgccattgccgtccacgtcgccgcaaaatccggcgccctcccgcacccgagctcgcatccaacgacgtgggcacgatcccctccacgtcctccaccatttcccccactctccccgcgaaaatcggcgccagttaacccctccaccaccccacgtcggcgccccacttcgccggccgattccgccacgtccggcctcgatcccgccttcccgagcccataaaaagcatccccgtgctcccctcgtccgtttccccatttttcccgagcccggcatactctccctcgctctccccacgccgcacccacgcgctgccacactccggcgaactccggtcgccgtttcccgccgccacagccgtcaccgcgccgagccgccgccaccgccagcttcgccaccgcaaggggaagtccggccgcctcttatttccccctctccacccctcgagcaccactcccaccgcacacccgaggccgccgcccctttcaccgcctccagccgcgcgccaccgccgccctagccgtcgccccaatgcgccaccactgccagtaccttcgccgcctcaaagtcaagctcggccgccgctcggttgtcgcctctcgccgcccgagcaccaacttcaccaccaacccgagatcgccgccgtgtttgtcgtctccatctgtgtcgccccgcctccccggtcgacgccggactgcgccgtttcctccctcggatcggcaactccgagccgcaccccggccaccgcttcctcgcctccgggaaccactgaaatcgccctctccgcgccccggtcgtcccggtcaccgtccgccgcctcgcgcccgtggtacgccaccggaccaccgttgcctccccgaggagcccgccgccggcttcctcgttgtagtctcgccgtcgccgcccttggtgagcatccctcctctcctccccgcgctgtcgccggccgtcgccgcgggtggccgcgccgccgcgcgccgtcgtttggccagccggctttgtgccgtgctgtgccccagccgcgccgcccctggccgcccgatcggtttgggccgatccgggccgtcggttcccgtggaccggcggtggaccgcctcggtggtcccggtccacggtggaccggcgcccttgtgccgctgaccggtggggcccgcttgccggcgccgcccctcccctttgatgacgtcagcaaccgtcttttcctttggaaaaataaataataattgcgtcataattcgttaataattatagaaattcatttaaatggctcaaaacttctaaaattcatatctaattcattcgaactccgaattgggccattcaaattgcaaaattcatctaaaattgagctctacatgtttgtttactttttatgtactgttttcttggtttttattagagtttttcctcgttttgcgtgtcagcgtgtagaatccgtcgtttcggaagtccgcggtcgcgaggaaaagagttcggaagatcaaagtgaagcagcaaggcaagtcacacattccccttgagcatgttgatcccaatttataaatgttttaccgtttacaaataaatatgcatgttttactaattacatgggatccgggtattacctatctgctcgcttgtgccatgtttacttgatatctgttctttgtcaaccttgggtaatgaatccactagctcatgttacttatgtgacctagctagaactatatgcttagccatgcttaattaccactagctcagttgatgggataattgcagtattagaccctttagtatcagagtgagctgcgtgctcgagacacccgtccatgcttcatggtcgtaattatccaactaaaatgcaactgaatagtgggctgtgggtgcatggttttgctagtcgcacccatggcagttaaggaccggttcgcgggatgccctggaagaacttatcgtacttaccacaagccagcgtgggcaacggctgggcttgtagtgtagctttcctctagctgacgcatccaggcaagggtgggcgtgatggagcggggtgggccctgcgacggcctctgtcgcttccggattcacctaggcacgagaggggactgcccgttgcccgctggggacgggggtgaaacctgaggtgtggtgtgcttggttagagggggttatgcgaagggtcctgtcacggcctctttccgatatgtcgtggtggcatgtcggcgcacggaaacgtgttgtggggctgtgtcttgtgggtacagttgtacacctctgatcagagtaaaactattcgaatagccgtgcccgcggttatgggcggtcgaccagattcaccgtgattagtcccatcttaataaatcgacccaatacactgtagtccaggtgggttggttgggcctgttcaacgtggtgtagcgttgatcagtggagatttaatgttactttaattactcaacagttttactgttttgctcaataaaatgttttacaaccgcctttatgcaaatagccacaaacccctccttgtatccccttgcacgtctgcatcgttggtgtggcttgctgagtacggtggttgtactcagtcttgctattattccccctttttcagaagtgtagtgcttctgagctgaagatggagttagaggaccaaggctcagaccccagttgagttttgcctgtggagtggagatgaagccccgctaggatcgcccttttccgctgctgctgctttcgtttcggtgcgaggactaagtgcctcttttgtaagtattttacgctttatttacgtttggaactgtatattacttgtcgttttgtgtaccctggctggtcctggacagtgatttaatacacaaaatagtctagaaatttggactaaatttctgggcgtgacagtattccaagggtatcgtatttatttaatcctgcgggaagattataacagagagaactatactaataatttatatattacttgtaataatcaaagtataagcaggggttaagattataaatagggtagaatgacacacagcaagagaattatatactctcataataaattatctaagctaagtgggaagagaatagaaagaatctattcttatacttctaatatagatacatattatacatatacatccaagttatatgattacttagctaataccctctttccaataccgtcctggtgcttcgagaagccacccctgattgccgagtttcttacaacaatccgtcatgaccatctaacctgggctaaatacggaggagtagcctccccaggaaagtaacttaggagtatatacacaagcggaggaatacccgtactgagctgtcaccatcagcggcccaccttgatgtattcgtagcatttaaccccaaataacgatatctagtaatctaaacaccacgcttaaattaccaaatactactctaatatcattgtcatgacacagagcaatcgtatgcacgatcattatacccacaccattgcatttcccagataagctagcatcataatcaatatagtttgaatgtatgatacaattggtactcatatattcggaaagtagtacaataccagagtagtataaagaagaatattttaataaaagtataagtcttacaaaagaaagtaaagctaccggatccatacccgattcctatgaagacttctcggactaagactcctattctattcctactccactagcttgagaagactactaaactagagagacagcttgattcttcttgcttgaggtgtgtgaagaaatggagggagtgaggggtttatataggctggtaatgacggttggaaaggtcggtaatgccctccaaccatcattggggatcaatcccagccgtccagccaaaccctacatccatcggtgctacggctggttcggccgaaccctgggctggctcagttcttggcaggtggcctccccgtttgctcctctccgcagacttgtgaattttgggcttgttggatcttgtgaatttggtgttctcagcccatttatccataagtttgtttcttgacagcgtctgaatgattgatcgtatgttttgctgtcacttctccttcatttatgatcattctctgcaaaaagttagaaacctagtgctagtggaatatattttagtttgacatgaaatatgcattgcaagcataactagttctcctttattttaataatattgacgggcgaaattgatcgctaacgaccgtcaacaaaaccccccaagcttgaacctttgctcgtcccgagtaaaggactcacaaaaaaaaacttggtagctgatcaggagttgctactatgctgtatatctcaaaagtataggtgcaagaagatatgtgtactctctctcaaatcaaataaatttggcacggtggcttacccttacccctgattcccacgagacactgtccttccttgtcttgagcggttgagagacagaacacaaacaacaacttgaatatcttgtggtacctcctcaacctgcctacgcaactctttcaaaataaccatagctctttcatatgcgaccttcgacttgcatgctgccctcatcactccaaatgcttcaatcatcatcatgtttgttatgtaattttcatgcaccccatccggtcctgcagtctcacgatcacacttgtcactgtttgctttcatggtatacctctttaggaatagacaacagggatcttctccagttggatgtgtacgaacgccctaatcaggtgtgtgcaaaacattcctacaacacaataagaaaaaaacaaaaacaatttttgttttgcaatcaacatgtgtgagctactccctctattccaaaatataatgcacaaccacgcttaacccaaagaccaagaaataattattatcatctcgtagtttggatcatcctaataaatataatacatgcatccaataggattagataacatgagagtggagaattttaaaaagcaataatttaatacgtatatcaatgaataaagggaaaagaagttccggtcggtcattttttcatgttaacaagtctagattaaaagagtgagaaataggcctaaaatcattaacacattctagattaaccttgggctataattggccaacaattttttaataaaacaaccattaaagccatctgggcctggagctttgtcaatcggaagtcttttaacaaggtcatccatttcaagagtgaaaaaatgatctaccatgctatcggtcactcttatatgttgtcacgcccagaaattcacgaaccagaatttctaagcttaatgtgtaataaacccctatccaggactagccagggtatacaaatgacaattgttgacatacagatccacgtcttacaaaaatataaaagattacaaatgcagcggaaaagataaaagcgagctaagcctgaagacttgactgctgcagcgggcgactccgttccacaggcatccttgacggcagcgacgaaaccaacttcttcgagacatctccaactgagaagaacttcaactctgggggtagggaaaagagagcaggactgagtactacccactgtactcagcaagtcataccggaagaggaggtatgatgcaggatatatccaagggaggctaaaggttctttcgcataaagctagcatttaaaagcaggagttgaaagcaataaaacagttgtagtaattaatcagtattaaccagtcactgtccaacactacaccatgttgcaacaggcccaaccaaccacctgaactacaccagttcattagctaactaggggtgagactaatcacggtgaatctggtcgaccgcccataaccgcgtgcacggctattcgaatagttttactctgatcagaggtgtacaactgtacccacaagacacagtcccacgacacgtttccgtgcgccgacatgccaccacgacataccggaaagaggccatgacaggatccttcgcataaccccctctaaccgatcgcatcacaccttagggttcgcccccgtccccagcaggcaacgggcagcccccctttcgtgccgcggtgaatccggaagccgatcaaccggacaccccgaccgacccaactccatcacgcccaccctcgcctgggtacgtcggctaaaggaaagcaacactacaagcctagccgttgcccatgctggcttgtggtaagcacgataagttcttccagggcatcccgcgaaccggtccttaatcgctatgggcacgactagcaaaaccatgcatccacagcccaccatgtagtgtattttaattaactaacaccattgcggtggctctattccaaagctataccaataatcagagtctatgcattactgtaattcccccctctatgtactagttgaactaagcatggctaagcgttccctaaaccaacatctaatcattttaatactgttaacaaccaaatttggtaacatctgtgtcaggaaagaagattggatcaaagcgaaatcggatgcggagatcgagttcggaaacagagcaggaatcggctggagtccagatcggctacgattaggattggctaggtctgagtcaggctaagtaagccgataacgccgattccgacaatacgatttgtacgcgacatcgggttcaagttaatgtacttcaagatgattgccacgcacggatagagtcctaggaaggcaattgtatctattaattaggatattttatgtagattccttatagataaatgtgggcaaaagtctgccgcaaagacttatggtatcttagagtttgttagagataatggtcgtgtccggtatgggcaatcttgtaattctcgggtataaatagaccctgagccctatgtaaatgataacacacacgttcaatacaattttggcgcatcgccaccctttttactttagttttgtttcgacgagttcttgctttcaggttgagctgcatagatttcgatcttcaacaagaggtaaaattcgttatgacggcttgtattcataggattagtgcttccatctttatgatactctaatcttgtttatgtaattcgtcgagttatcacatatcttatataatctctagcaataccgccatctaacctactatcggctaacatctgttagcagagggcagccgattaggttagattttgacgtcgatctagattatataagatatataccactctatgagacttctagcggcttgattgtctagatattgttcttcttttcatacttaatgctgcatcagctgagtttgatctattaagtcgtgcttagaatatcaatctctagcctgccttctagttatcgattagaatagcatcggagtttcagccgatcgtatctggtttaactatattttttctatatgcttcattgacatgttaaatctgccctttatatcaagatgttgctgtatctaagtatattaggcctttgtttgatatattatatttgctttaatatcctgatatagagtagtatcggagtattagtcgatacatgctacatctatctgatcggctatgctataaatatatatagtcctgttattgatatatatttcgatctaagtgatttatactgtctcggcatgatgaccgatctatcccaatcacttgatttaagtatacatcgatataaggagtatatatcgttaatatctatagccgatcgagtagatttagtgtttatttacttattcatgactgccgatcgaaacacagatgacatcggctcaaagataaatgatatgtcatcggcatctagccgatcggctatcatttatagatttaaccgcggtttctttgcttctatttcttgttgattacaggatcaaatcaactggcacgctaacacatccgaaggcgagctttggacctgcactggagttaagcagatctcccaggccacgtgttttctatcaacaaatacccaagttatcatcaatggcataaggtaaacaagatatggctgagtggtaggacccatcccacatgatattgtaaaacaatgcaacatttaatagaaatgcgggacacttgtaaattgggtacaatatgatcaatctaatgcatgacttgccttgctctcgcactgatgagaccacagcaacgtcttcgagaaaccgcggatcgacggaacgaccgaaatctacgcaacaaacaaagcacacaagcaaaacatgctataagtctactgaaacaggaaacaaaaccatttttaatggattctatgcatttttatgaatttactaagacttgaatggatttaaacggagctcggatgaattagatatgatttttagaagattatttgtgtttttactattaaagaaaagccttattgatttattgtgcaataaagcatcctagggctgacatcatccaaggggtggggcggcgccgacaggcgggacccaagggtcggaggcacaagggagagggagggggtactagcaggcgggccccaccggccgcggctccaaaaagggggaggggcgacgtctgccgggctcggctcggctccaagccggccggccggctacagcgagcggcggcggtgcacggtcgccggcgatggcaaccggcggcggcgaacggcgcggaaggcgtcggcgtcggccgaaggcaatggcgcgcacgcggtggatggcagtggacacgggagggagagaaagagggaggacagggagttctcaccatggggttggccggcgcgggaagaagggacgacgaacggcgatggcgaacgaccgggagatggcggcaagtgccgaacgaggtccggaaccacctagttgtcaaaataagagagattagagggagaagggaggtccgcggcgagcgaaaactagggccgaaggcggcggcaatggtggaagctcgccggagtgcgaggagatgcgggctccggtgacggaattggacgggggagcggcggacgaggtggacctcagccgtgcgaacccgacggcggtgctagcagtggcgagcggtggccggaggagtggaaaaggcggcggcggctggtgtagcggtgcgggagcgatggagagctcgggagcggctgatggaaaaaggaaaaaggaggaggagaatgcggggatggtttatatgggctcgggagggacggacgaggccgggaggaggccggatttctcgccgacgtgggggagtggggagagagagtttgggggggggggattgaaaccgaatcccgcccttgcggggctcgcgcgtgcgggagaggagggggaagcgggcggcgagccggcgacgtgggtgtggggtggggcgcagatgcggagtggaggaggtggggcgccggcggttggagctacggctccaacggctagaggaggaagacgaccgacaggtgggccccacctgtcggcgcccgaaggagagagggagggagggaggacttcggggaggggagaagcgggccggcgcgggaaggaatgggccgacggcccaagaaaaggaaaaaggaggaaaaagaaaagagaaaagggaaaaaggattttcccagggatttaatattgcactttgcttattttaattggttaaaattatttccaaggctctgaaaattccactaaaaatcctgttaatgtagtagagcatgtagaatctaagaaaaatttcacatgccgattccgattattaaatgcatttattaatttagggtttctctcttgcctttaaacaaataatttcttgcaacaatttattaattgaatttttgctaaggagaagaacttctgggcgtgacatacgtatacaatgaataaagggaaaattaacatttcttatacgtatatcaataataaataatgtagttgtactagactaagagaattaacatgaatgcggagattatacaccaaagtgaatgagaaatgaagctggcatgcaaagaaacacaccaccagcgaatcacgtgtgagcacacggattgatgggaccacaaattaggccaaatgttgatggtctttaaatcataatatttgaccgtcaatacctgcatataatgaaataaaataatgaaataaaatatggtattcaacttagtggtagggattattactacccaattccactagtgttggtgaaatatgtgtatgcgggtattttaatgagaaaacacaccagtcatgcaaggaaacacacctctggccaattagacgcaagtacacggattgaagggcccataagtcaggtgaaaccgccatggaatgcgtcataactgtcataaccgccatcagggcccaccagtcagtctcctggccaaagggaaggccaggaggtggggcccaaggtttggccgaaccaccaccggcgcctttgatcctggccttccacgtgtgcgttcctgttaacaaccgaatttggtaacatcagcgtcgggagagaagagtagattgaagcaaagtcggaagaggaaatcgggtttgaaagcagagcaggaatcggctgaaatccagatcggctacgataagatcggctgggtctgagtcgtgttgggtaagtcgatgtagccgattccgacaatacgacttgtacgcgacatcgggttcaagttaatgtacttcaagatgattgccacgcatggatagagtcctgggaaggcaattgtatctattaattaggatattttatgtaaattccttatagacaaaagtctgccgtaaagacttatggtatcttagagtttgttagagataatagtcgtgtccggtatgggcatatcttgtaatcctcgggtataaatagaccccgagccctatgtaatttttaatacacatgttcaatacaatctctgcacatcgccatccttttgctttagttttatttcgacgagttcttgctttcaggttgagctgcatcgatttcgatctacaacaagaggtaacattcgtcgtgatggattgcgttcttaggattagtgcttccatcctcatgacactctagtcctgtttatgtaattcatcaagttatcatataccttatataatctctaacgatatcgccatctaaactactatcggtcaatatctgtatgcagaaggcagccgattaggttagatcttgatgttgatctagattatataagatatctaccattctatgaaactgctagcggcttgattgtctagatatggttcttcttttcatacttaatgctgcatcagttgagtttgatctattaagtcgtgtttagaatatcgatctctggcctgccttctagttgccgataagaatagcatcggggtttcagccgatcgtatctgatttagccatatttattctacatgtctcatcgatatgctaaatctgcccttgctatcaagatattgctgcatctaaatatgttagggctttgtttgatatattatacctgctttaatatcctgatatgaggtagtatcggagtattagccgatacacgctagatctatctgatcggctacgctataaacatatataatcctgttattgatatatatttcgatctaagtgatttatactgtctcagcatggtgtccgatctatgccaatcactcgatttaagtatataccaatataaggagtatatatcgttaacatctacagccgatcgagtagatttagtgtttatttacttattcatgactgccgatcgatacacagatgacatcggcccaaagataaatgatatgtcatcggcatctagccgatcggctatcatttatagatttaaccacggtttcgttgcttttatttcttgttgattacagaatcaaatcaactggcacgctaatacatccgaaggcgagttttggacctgcactggagttaagcagatctcccaggccacgtgttttctgtcaacacgcttttggcacgcccagtgggacttgattagaagtcagacgtcagttcttcctcatggccgagaaacaagcaccaccaccatcaagcccaggttccattaaaggcaaggcattgaagccaggattgactgacatcattgatgacaatgtcatgccaatcaatccagagaaattcacgcctgagcagaagcaggagtttgaagcaatgatgcagcaagcacgggatcagtatctgagctcgttcatgcaaacccgcaagggaacgcttgttcagaagtataagataaatgtggttgctgatagtcctggaaccggttcttctaaagatggagaggtgaagcaagctccagaaggctcggctcagccgagcaacaaaggtgctactgatggttctctaggaaatcaaggcgacaaccctcaaggagtgcacggagctcaaggtgatgctgctcaagggtcgcaaggaggaaatcttaatcagaataatgagctagcacaagactttttcaacaactttcaagatcgggttgattacactgtgcatcatgctctgatcaatcagtccggggttttagtcaatacattgtcaaacatgatgaagacaatagccgatggttcgatagctaagcatcaggctacgggcccggtttacttgcaaggaggtgtcttcccgaattatcgatctctggtcatcgatgttcaaccagctgtgcaagcggttccctctattgcacccacaactcagccaacggcgccaacatcaactcccttgcccgctacatcagctatggcgctaggccagccgatgaaccctcggttgttaatgagggagcatccacagcctactgggcagatcgcgaatccgccgacccatgatcaggttgctgccatgtttttgccacctccacctattgttgatccagtgcagcagcagccgattcagcagacactaccaatccagccagttgtacagccgatccaacaataggtcgtacaaccagctcagcaaacaccatcaacacagcagcctatccaaccgattcagcaaacactgccaaggcagcggcttcagccgatccaacagactcaggtgcgacagcagatcgttcagctgattcagcacccggggtcggccaatgcatcagctgggttcgcagcacctggtgggcaacctgcgcagcaatttgtaaaccaagttgtctcagagcatttggttcaccatgcacagccggatggcactgtggtgcctcagatggtccctgagcacttggtacgcaacatccagccgaatcttcataattaccaagggggtaacttgagctatcagtatcagcctccttccccgcaagcccaatatcagccagggggattggctcagccccagttcgcacctcagtttggtcaattcgagcccatgcagcaacaaccgcaaggagcagctcagcaatgaccatgggccgatgtgattgccgatgtgatgagggagcagtttggacttaaaccaaaagaaactagaagtttgtatcggcagccttaccctgagtggtttgaaagagttcctcttcccaatcggtttaaagttccagatttctccaagtttttgggacaagagggcgtgtcaacttatgagcacatcagccgattccttgctcagtggggtgaagcatcggctgtagacgccttgagagtttggttgtttcggttatctctgtccggatcagcttttacttggttttcttctttgccgtatgggtcgatcaatagttgggccgatttggagaagcaattccacagctatttctacagcggggtccatgagatgaagttgtccgacttgacagcgatcaagcagcggcatgatgaacccatgcacgagtatattcaaaggttcagaaagatgaggaacaagtgctttagcttgagtttgaccgatgctcagttagccgatttggctttccagggtatgtccctccaatcagggagaaattctcatccgaagacttcgatagcttatcgcacctgatacagaaggtgaccttgcatgagcataggtcagcggaagtcaggaaaagctctaagaaagttaatcacgtttgtccatatatgtatgggtcggatgacgaagaagatgattctgagatagctgcagccgaatgggtgaggagcaaaaaggttataccatgccaatgggtaaaaagtcctgggaaagaggagaagtatgattttgatatcaccaaagctgacaagattttcgatttgctactccgagaaaagcagattcagcttcctgctggtcatacgatcccatcggctgaggaattaggcaagaagagatattgcaaatggcataattccaggtctcattctaccaatgattgtaaggtctttagacagcaaatccaggttgccattgaggggggaaagattaagtttgatgattccaagaagccgatgaaggtcgatgggaatccttttcccgttaatatggtgcatacagctggtcaagcaaccgatagggaccatgcaaagggttttcaagtaaattcggctaagattatcaacaagtatcagaggaagtatgataagcagcaggagaggcgttatgaggagtacgatgatggttttgatcctcattggggttgcgagttcttcagattctgctggaatgaagggatgaggttgccatctattgaaaactgtcctgggtgcagtgatatcatcgagagctcaagccgaccacgtaatagggatgatcggctgagacagacaagactccctgttcatcaaaggttgggtccgatgaatcaagatcgtggccaagaggatgaggtgatcaggaagaatcaatggtgtccttctggtattttcacgaagaatcagaaaaggagggtccagagattgaggagcagggaacgttttcaggaggttgaagaggaaatcaaccattggctgaggaaaccaaagccaagacaggagtggcgtgtcaagaatcaggttcccgtagccgatgatgctgcagccaatgaagtgaagaagttggcaaaaggaaagagtgttatagcggcaccgattaatatggtctttacattgccacctgaattctggatcgatcaggccgatgttgatgaggtggaagaggaatcggctaagttggtcttgtcaccagaacaggcagtattcgagaaacccgaggggacagagaatcggcatcttaaaccattgtatgtaaatggctacatcaacgggaagccgatgtctaagatgatggtcgatggtggggccgcggtgaatttgataccttatgctacgttcaggaagctgggtaggaacgccgaggatcttatgaagataaatatggtgctcaaagactttggtggtaatccatcagagaccaaaggtgttccaaatgtggaactaacagtcggcagcaagactattcctaccacgttttttgtcatcgatgggaagggttagtacaacttgttgctcgaaagggattggattcatgccaactgttgcatcccttcgactatgcatcaatgcttgattcaatggcaaggcaacaagatagagatcgtgccagccgacaggtcagttaatgttgccagtgccgatttagccctttgggagatggatggccttgattgtttatctggaaaattctgggatggagattttctaaaagtgtccgattctgatatacagccaatcgaagatggagaacccaagctattactttgagggcgttgtggagggttcgaatgtctacgctaaggatacagtagatgatctcaatgacaagcaaggtcaaggttttatgtcggccaatgatttggaagaaatagacataggtccaggcgatcggccaaggccgatatttattagcaaaaatttgtctccagagtttagaaccaagctgatagagttcctaaaagagtttagagattgctttgcttgggagtactatgagatgcccggacttagccgatcgatcgttgaacatcggccaggggttagaccacgtcagcaacctccgaggagatgtaaagccgatatgctcgaacctgttaaagctgagattaaacgattgtatgatgctggttttattcgtccctgccgatatgctgaatgggtttctagcatagttccagttattaaaaagaatggcaaggtcagggtgtgcattgattttcgagacttgaataaagctacaccaaaggacgaatatccaatgccggtagccgatcagctggttgatgccgcgtcagggaacaaatttttgagttttatggatgggaatgcaggatataatcagatctttatggccgagggagatatccataagacggcttttagatgtcctggtgcaatcggcttatttgaatgggttgtcatgactttcggcttaaagagtgctggagcaacttatcaaagggccatgaactatatatatcatgatttaatcggctggttggttgaagtctatattgacgatgtggttgttaagtctaaagaagtggaggaccacatagccgatttaaggaaagttttcgagagaaccaggaagtatggcttgaagatgaatccaacaaaatgtgcttttggtgtgtcggctggccagtttttgggatttcttgttcatgaaagggggattgaggtgaaccaaaggagcgttaatgcgatcaagaaaattaagcccccagaaaataagacggagctacaagagatgatcggcaagataaattttgttagaaggttcatttctaatttgtctggaaggttggaaccttttacacccttattgaggttaaaggccgatcaacaattcacttggggagcagagcagcaaaaagctttggataatatcaaggagtatctcagctctcctcctgttttgatccctccacagaaaggaatactgtttaggttatatttatcggctggcgagaggtcaatcggctcggttctgattcaagaattggaagggaaggagcgagttgtgttctatctcagtcgacggctcttggatgctgagactcggtattctcctgtggaaaagttgtgcttgtgcctgtatttttcgtgtacaaggttgaggcattatttattatctaacgagtgcactgttatatgcaaagccgatgtagtcagttacatgctgtcggctccaatattaaagggacgagttgggaaatggatattttctttgactgagtttgatcttcggtatgaatcaccgaaggcgattaagggacaagctatagctgattttattgtggaacatcatgacgattcaatcggctcggtggagatagtaccatggactttatattctttgatggatcggtgtgcactcatggttgtggcatcggcttagttataatttcccctaggggggcatctttcgagttcgcttatactatcaaaccgtatgcgactaataatcaagctgaatatgaagcagtgcttaaggggttgcaattactcaaggaggttgaagccgatatgatgaaccctgagttcctctcgacactcaaggctgttgttggcccgatctttcggtgagttgtgataactacgatttgggagaaacgttgacgatccgactacaaccgtacgagacgttgtgttgcaccttagcgatcgatacacctctccgtgggttgctgatcttgccggtgcagatcaaccctattcctgcaagcaaatcgaagaaacaagcaagaacaagataaaagcaatctgatattgcaaataggaatttaatacaaatgataagttggggttccgaagaacaagcagacggacggtctagccgacacgcgcgctgcaagcaagtagcaatggctaaactttaatctaacaaaaccccagaaaccctgaaggggtaactagctatatataggggtgggaggacgacctaggggtgcctagggtcgtgctccaccagcttggggcgcaccccacatgggccccacctgggccggggtcccaaatgaagttacaagcccataggcccattacaggtgtcgcagcaccttgtttcttcagttgctgccgactgagatggaatttggcaacgaggcttgatgcattggaaagaggactccgagagctttccatcaagtactcacgggccaaaaacggaggtcgtatggagcttcggcggccgtttgaagtcagcagtgtagcaggtggccgaattggattttggcacttggaggactcgaacttgatatcttgttgttcatccatgatgtgagcaacggatgtatccgtagtagccatggtcatatcatcctccccttcttcacggaaaaccgtcctcggtttttccatatggtgttctttatatagtccattcaaaataacctgtttcatccaatcaaaactagagaaactcgaagtagtgtgattagcaataacatgtttctctaaatccgaacaaatgaaaactctatgcaccaaatatattcctctatcattatatttgccaaagatatgaaaaatagcattagttggacttggcaaatcagacttagaaaataatttctccttcaaattatcgagctcacaaaaatcattaaactgaacatagcccaaagtatttaaagaagatagcaatttacgttcctcaacttcattagcaatgtgaacagcatgcttaaaatcagcacacaaagaaacactaggaatagcatgttcattcactagttgtggcatggatataagtgaagcattatcacacaactcttctttatcacaaggaacagcgagtaaatcaacttgtgacaaaggaattccagcatttggttccactaacggttgctctacttttgcatgaaaagtggacaaatttacttcgttaacaatgcactcaccttgattaatttcagtatcatttactttaccttggatgtcctctttagatgatggaggtgtctcgaacttgggtgtgaacaatggaattggtggctctttcatgtctctctcctccttttcgtgattacgcacttcctgcaaatagttagtaattggaggcaaagacatagcgtgtttctttttcatatcctcctctattttactttcagcattgcaagcaagttgtaacaaatgagaaagagatgtatatctttgacaatcaagcatgtcctgaatttctttgttaagcccacataaaaacctcaattctttagcttcttcgcattcatctaaaccacaacgtaataaacaagcttgcatatcatgatagtatgaagtaacagttctggtatcttgttttaaacattgcagtttgttgaacaaaatgtcagcataatacatgggaacataaacatatctgaaatatagtttcaggtctttccaagattgtggtattttgttatgcctacaaagatgtttccaatcattagaagcatgtttaattaaaacactagaggcacacataaccttttgtttctccgacaagacatgcttttgaaattcactatcaaccgctagctcccaattaatgtaagcacgaggatcatagtttccctcgaaataaggcagtgcagatttgatcttacctagaacatcatcacttacctcataatggtcatgttgatccctcctcatgtctcgacgaagatgtcgatgttgagcacagctatccccaattatcttgcgtatccctgccattgttagtagaaaacaagaaacatacacaaaaatatgcgcgttcctattaactactaggtagtggcagctcaaaaatcgcacacactcaagcttttaaccaagctcttacaagatcttaccaatgcaagtggaatggtgacatacaccgactcaaccaagcaccccaatgaaggttggatgtatcgatgccttggcaaacacttgcggtacggctgtaatcaaatatgtggagctctgggtaggcttaaatacgtagcaaaggaatagcaaatgctcaaatcagataatgcaaagttgaataattgttcaaagtcaagtaccgtgctggtcctaggctagaacgtactagagacgcgagcctagacacaaacggtaccacaaaatagcaccagaaacaactcaagcacactctgatgtatgaagttcagctcaaacaaaacaatattttctcttttctttctttcttctttcttcttttcttttttttttccttttcttttctgatttttttttggtgcggctttttttttcttttttttttgcacctttctgcccttttttttctcacttttttttttattttttttaacaaaaactgacttaaggaccttaatgtaagattacagggactcaaacataaatataaaatttatagggactcaaatgtaaaagtctaaacccaaaattaaaattatacaaaaaaatggaatgctgaatttatgccggttccgtttttccaaacagatctcgaaaccgacaccaaacaaaaattcgccaaggtgtttgacacaactcggaaccgtggaattgagggagggggtcagactcggccaaaggggcgagtgggactcggcaaggaggtggagtggatggcagccgaatttggtgtatgggataaaacggaaactgatttttaaccaatccaatctactatatctttccaaaacaaacttgactacttccaaaatcagatatggtaattcaccttcctcctcttgtgcacgacacaggcacggccaaaacaaacacacacaaggatcggcaaactctagatgcaactcaataactccaaaactaaccgacagaaacttctgaaaactacaaaaatagaaccgtggcagcgagccgattccgttttcgtaggtcccgacaacaacagagacacggtggcagcgacgactgtggtacaaaaacgtgaccagaactcgaaactctaaacgaactagacgctaagaccagcaacacgacgtgacgatgcaacacaaaattcaacaaagcaaaaactgaaaagaacaatgcaatggcacaatatggctaggtaaatgatacgaatttttttgtatggctattttctggttataggaagataaaaactcaccgagcaacgaaagctctgataccacctgatgaaccctgagttcctctcgacactcaaggctgttgttggcccgatctttcggtgagttgtgataactacgatttgggagaaacgttgacgatccgactacaaccgtacgagacgttgtgttgcgccttagcgatcgatacacctctccgtgggttgctgatcttgccggtgcagatcaaccctattcctgcaagcaaatcgaagaaacaagcaagaacaagataaaagcaatctgatattgcaaataggaatttaatacaaatgataagttggggttccgaagaacaagcagacggacggtctagccgacacgcgcgctgcaagcaagtagcaatggctaaactttaatctaacaaaaccccagaaaccctgaaggggtaactagctatatataggggtgggaggacgacctaggggtgcctagggtcgtgctccaccagcttggggcgcaccccacatgggccccacctgggccggggtcccaaatgaagttacaagcccataggcccattacaggtgtcgcagcaccttgtttcttcagttgctgccgactgagatggaatttggcaacgaggcttgatgcattggaaagaggactccgagagctttccatcaagtactcacgggccaaaaacggaggtcgtatggagcttcggcggccgtttgaagtcagcagtgtagcaggtggccgaattggattttggcacttggaggactcgaacttgatatcttgttgttcatccatgatgtgagcaacggatgtatccgtagtagccatggtcatatcacgatactattgaaatcatgggggattcttatctagtaatcagccaattggctggagaatatgaatgcaagaatgatacattgatggtttataatgagaagtgcctggaactaatgaaagagttttggctggttactttgaagcatgtatctcgagaacaaaatcttgaagctaatgatttggcccaaggggcatcggggtataagccgatgatcaaagatgttaaagttgagattgcagcaatgtcagccgatgattggaggtatgatgtgcatcagtatttgagtaatccatctcaatcggcttctaggaaattacgatataaggcattgaactatacactgttggatgatgagctttattatcggacgattgatggggtattacttaagtgcttgagtgccgatcaggccaaggttgcaatcggtgaagttcatgaagggatctgtggtactcatcaatcggctcacaagatgaagtggttgcttcggcgtgcagggtacttttggccgacaatgctggaagatttattcagatattataaggggtgtcaggattgtcagaagtttggagcaattcagcgagcaccggcgtcggctatgaatcctattattaaaccatggcaatttagaggttaggggattgacattatcggtatgataaacccaccatcgagtaaagggcataaatttatattggtggcaactgattatttcaccaagtgggtagaagcgattcctttgaagaaagttgattcgggggatgctattcaatttgttcaagagcatataatctatcgatttggtcttcctcaaactatcactatggatcaaggttcaatcttcgtgtccgatgagtttattcagtttgccgatagcgtgggtatcaagttgttgaattcttcaccttattatgcacaagctaatgggcaagccgaggcatctaataagagtttgattaagttgatcaagcggaagatttctgattatcctcggcaatggcatactcgattggccgaagcattatggtcttataggatggcttgtcatggatcgatccaagttcctccttacaaacctgtttatggacatgaggctgttttaccatgggaagttagaatcggctctcgacgaacggagttgcaaaacgatttcacagcagatgagtattacaatcttatggctgatgagagggaggatttggttcagtcacgattgcgagcccttgcgaaggttactaaggataaggaacgtgttgctcggcattataataagaaagttgtacctaaagatttttcggaaggtgaacttgtatggaagctgattttgccgattggtactcatgatagtaaatttagcaagtggttgccgaattgggagggaccgttccaaattcataagtttgtgtctaagggggcatatatgttgcaagggcttgatggtgaagtttacgggcgagcgctcaatggcaaatacttgaagaaatattacccaagtgtgtgggttaacgcatgatcggctactactgccgatgcgtgacagccgatgtgtttacatcgccttgagatggccgatattgttatatcgcccttagttgtttttataatgtaatcggttgtggtttgccgatgtacaatggccgatattgttatatcgcccttagttttttttataatgtaatcggttgtggtttgccgatgtaaaatggccgatattgttatatcgcccttagctgttttataattttatcaatgctcttgacattgtaaaactaggggggcatatatatatcaaaatgcagtatgcagtacaaaattttttgagcaaatttcaaagtcatattaatcggcgcaaagggttgttaagacaataaagtatcagaatgttttagccgattacaaaagtcttaagtattattacataaagactactgagataagtatcgctagatggccgaaatagccttctgcctaatctgctctacttcttctatggcttgggcatcttgagcatcggttcgagggataacttttagggacttggtcagttcagcaacatgcttgatagccgatttaagtcttgctttctgttcttcaatagacttggggagatcggctagcttcttgcgctccatatccagctcggcgttacattcttcaagttgtgctaagaggtcaatcttgtgagcctcaagccgatcaatgttagacttgattgggccttcagataattggtcaagcttggatttctcttcatgcacaagttgtcggctggcttggatagtggcttcaatgttcttacattctcgccgttcgactaatcttaacttggctttctccagcttgaattggtgttgctcaaggtaaacagctggagtaaggatgtcggctaactcatccgggattaaggcttgaatctcatgcagccgagcctgattgagccacagtcaactactaagctgtctagtgatgatgcctctagccgatccaaaatacttccttgagttttcttcacgtcatcagataaaggagccaatgctttgcttgtagtatcttcttctccttcatcaagatagtctctgatattgaaagagaaaagatcggccaatgcctgcaataacaatttagaagcagattagaggttaaacgattatagccgatttgaatgcctgttgtgataaaagaaacttactaagatagcaggagcagttggttgttcttcttcctcgacgtgatgactccctgcagctgaaggggtctgatcacttgatgattgttgaataaaaggagaaggaggaggtgaaggctgaaagggagacaagtgtcagatagaatcggctaaaaattaactaatgaaagttaaatctatcttactggtggagctggtttagatgttgttgcagccgatttcttcttcaccgcagtcttctttttctgcaattataagacttgggaatgatcggctataagacaaaataatcactaaaaggattaacgagaaacacttacccttgagaagtggactggggcagaaggagttggaagggtttgcttaggcgaagccgatggtgttctttcagtatcgcttacttcagctgcggcctgatcaacttcgtcttcaattatctcttcatctaaggcttgttcaatagatggatccaaggtgggcagatcatcggccggcttgtcagtcggtttggttttcttgaacttggcctttttctttggagccaagattgaagtgctcacagccgaggatctggttttcctttttgggcctgcatcggctggttctctagttaggccgtgaaggagagttgaggtcttgggggcatagtagccaataacaggggggagatagcccacctccatttggaattaagcccgaagcatactcaatgttcttgccactattgctttggtgaggaggggaggactctgttgtctgcaaagcaggagcaaaagattggttaagtaataaatcgattaattgactacgcaatttgatagtaacaatgtttacctagggtatgacgtcgggggacagatctgtcatatacatcgtggctgattgatgaaacagatgtagcttctattcaccccaccatctgtcgaagtttttgcttctgaatccagccaactcaatattttcaatgctgccaagaggaggtcccgatagattgagtagccgatccatcattagagcagacgtgatttgtcctcggcactgaatcttgtcggcaaaaaataagccgattgggagttggcctaatccaagttgcctagccgagctcattgggtgataaaactcgtaggagacttggatgtttctcccttggtgaatgccgacaggaaggatgcaagggctgattgcggctataagaacttctctggatttctggaatttctcatggttaatatcttcgaatctaaaatctgatggaagttcgaggtctgctgattcttcataagggaaccagatccgggtatctttcttaaagccctcatagaagctgcagaaccagtccttaagcagctcagccgataactttgctccagcatcggttggtgtggatgcatattccccatatcatgtgcacctgcgatgagtacattcttctccgtcgtcacccacaatcggctctggcagtgggaactcagcttctgttacagaaggccgattgacaaccttcataaccatcaggtttaaccaagtttgcagtagccaccagggtccacctgctccaactgccgagccgacggctattctagccgatgtgttgttcaacatctggtacagatagccgagaaggattttgcccaaagggaattctttctttgactccagggcttcggctacgaactgccagttggttgtagggccacaactggatccacagaaaaggaacttttccagccacatgagcaaaaaggctacgtgctctcgaggggtaacggatccttgacccatatatgctgccacatagccggaccaacaacctatgctcttggttttgaaatcgaattggttcttggtattcatgctcatggggttggccgatgaagttacatctagtccggtgatcatagtgatgtcaattaaggttggagtcatcggcccttggttgaacaggaaagcgttgatggtgtttgaccagaagtaggtggcggcagccatcagaggttcgtctttggcagaattggctatggtgagggctagtgcttggccgattccaatctcatcccagtgaactttcttactagccgatacacgttgataccaagtggaccaactcctgtcgggtgtgggtttttcgagagatggccaggatttaaaggtgttcttccaatgacctaggttagggttggatagcctaaagggaatccggttggtctcaccagtgatgaaatcggtggggtcgagattgccgattgggccaaggaagtagtggttctggtgtgaaaggcttggaattgcgacttggtgggaaagatgttacgaatccaaagcaatcgaaaagagaggggaggtatgagatgagagaaaatcaatctattgctaaggaaaggggatttagccgatgagaacttacctcggcgtactcggctattggcgcaccagacgggctggcggaggatgacatggccgcgggcggagatctcgtcgaaggagaggttgcctgggaatcgcctttgcgtcggaagagtcgccggagaaggaaggggaataagttctgcttgagcggtgaaaacgggtgtcacggtgtgaggtttctcgggggtgacggttagtatttaaagcacggcagtaacggtcggaaaacggtaaagtgcgaaacttgctcggagtcgatttacagcaaatccgaaacattaccaaatattccggacttggggggcatgtgttaacaaccgaatttggtaacatcagcgtcgggagagaagagtagatcgaagcaaagtcggaagcggaaatcgggtttgaaagcagagcaggaatcggctaaaatccagatcggctacgataagatcggctgggtatgagtcgtgttgggtaagtcgatgtagccgattccgacaatacgacttgtacgcgacatcgggttcaatttaatgtacttcaagatgattgccacgcatggatag

SEQ ID NO: 6034 - DNA, 68595 bp, Oryza sativa
tcagtagtcttagggacgagcgagtgatttccaagagacgagcctctgcccccggccgaactcatgagaaagggggtctcacgactccccgctattgaggatcttccctcgacagctggcgcgccaggtagggggcggttgcgcgtttcgagaggaaatcgctttcttccgtccctagtttctccaggccttagctgaccatggtcgaggtcctggaagtagaggaggaggcggtggcgtttacccccacccagtccgggagtggggattccggtgaaagccgtggtcctcgtctctgtcgccatggttctccaactcctctccgccgtgaaccttcgcggagggaggatcccactcgttcgggtggttcggctctctctccgccccctggcggagggaggctgcgacgcatcggggcacgccgctgtctcgactatggagacggcggttcgccccaaggcgcgctccaagcagcgggcgcccttctgcggcatcccccggtaaacccgcagccggagactcctgttcagcgctggctggacgacgtggccaacctggtcactgctgcccagcggcagttggccacgggtggtcgatccaccgccactggtacgtcgcgtacctcggtcaccctctcctcatcggcgaggagaagggcccgccgatcggccacgatcttgaggcgatccacggttccaacatcgtcgggggcctcgggaagccggaggcgtcatgacggcctctacgggacgcaggacgctcgaatcaacatcgagcgacgccgggacgagcgccgagctgcccgcatgggggaaggcgcctcctcatctggagcgccgcgctcctcttcacaaggcggccctcccccccacactcacccctggggggatgggttgtagggccttcgtggcgagtctccggaatgtccggtggcccccgaagtttcgccccaaccttacggagaagtatgatggtagcatcaatccctccgagttcctccaaatctacaccacgattatcgtggcggcaaggggtgacgaccgggtcatggcgaattactttcccatggccctcaagggtcaggcgcgcagctggttgatgacccaaccccccgactccattcactcctaggaggatctgtgccagcagttcattacgaacttccaaggcacatatccccgcccaggggaagaggcggacctacgtgctgtacagcggaaggatgacgagtccctctgttcgtacatacagcgcttctatcaggtccgcaacactattccgtgcattccagctcatgcggttgtatatgcattccggaacggcgtgcggcataatcacatgctggagaagatcgcctccaaggagcccaagaccaccgtcgagctcttcgagctggcggacaaggtggcccggaaggaggaggcgtgggcctggaactctcccggcaccggtgcggcggccgcggctacccccgagtttgccccccgctctaagcggcgagataggagaggcaaaaggaaaccagcccgctctgatgacgagggccatgtccttgcagcagatgggcccacacgggccccgcgcaaaggaaaggccaccggcgataagccgagccccaccgttccctccggcgagggccggtcagcggacaagtggtgctcggtacacaacacctaccgccacagtctcgccgactgccgctcggtcaagaatttggccgagcggttccgaaaggctgatgaggagaagcggcagggtcgacaggagagcaaagcccctgcgacctcaaccagtgaccggcgagaggaggccaagaacaagcccccccccccccgatgatggcggagacagtgaggatctggatttccaaatacctcaggggaccgtcgccacgctcgacggggagggggggttgcgctcacacctctcatcgaggcttcaagaccatgaggcgagagcttctggccgttgttcccacgcacgaggcggtccggaaggcgcgctggtcggaggtgaagctcacgttcgaccagagcgaaccattcgacggtgctcgctcggggtgggaagttggccctggtggtctccccgaccatccacaacgtcaagatgaagcgtgtgctggtggattggggggccagtctgagcatcatctccccggcagcctttgacgcactcaaggccccagggatgaagctccagtcgtcgctcccaattattggcgttactccggggcacacgtggccgcttggccacgtagagctcccggtagccttcggcgactccacaaacttccgcaccgagcggatcgacttcgatgtggcggatctcaatctgccctacaacacagttctgggcaggcctgcgttggtgaagttcatggccgccacccactacgcctacctccaaatgaagatgtcgggtcctgctggtcccatcaccgtctttggtgatgtcaaggtcgccatcgcctgcgcggagcagcgcgcagacaacctggcggtggccacagggccgcaggccgcagaggcctctgcgtcccacgcctccaagaagcgcctcacctcggctgacgaggtgcccgtcaaggaaatcccccttggcgacgatccgtccaagaccgccaagattggcagaaccttggacgccaaataggaaggcgcgctcgtctccttcctgcgggcgaattctgacgttttcgcatggaagccgtctgatatgcccggggtccccagggaggtgatcgagcaccgccttgccgtgcggccggatgcgcgacctgtccggcaaaaagtgcggcgtcaagcccaggagcggcaagccttcattagggaggaagtggcgcggctcctagaggctgatttcattcacgaggtgatctatccggagtggctggcaaacccggtggtcgtcccaaaggccaatggcaagctacggatgtgcatcgactacaccgacctcaacaaggcatgccctaaagatcccttccctctgccacgcatagatcaaatagtcgactccactgcgttgtgcgaccttttgtgttttctagatgcatactctgggtaccatcagattcgtatggctagggaagatgaggaaaaaactgcctttattactcctgtgggcactttttgttatacaactatgccttttggattgaagaatgcaggccctactttttagcgcatgactctattactttaagtaatcagatagggcgcaatgtagaggcgtatgtcgatgacccggtggtaaagacgcgccaccaggacatgttgctacaggacctggccgaaactttcgatagtcttatgtccacgcgcgtaaagctgaaccccgataaatgtgtgttcggcgtgccggcgggcaagcttctcggttttctagtctgttcccgaggcatagaagcaaatcctgagaaaatacgcgcgatagagaggatgccccccccccccagcaagcttaggaatgtgtaatgcgtcgctggatgcatggccgccctgagtcgatttatatcgaggctgggtgagagggcgctgcccctattcaagctcctcaagcactccgggccgtttgtatggacggaggaagctgagcaagctctcaatcagctgaaagcttacctcacttcccccccatcttggtagtcccgggaccggaggaaccattgctactctacttggccgcgaccccccatgtggtgagtgccgccctatgatggaccctgagttcctctcgacactcaaggctgttgttggcccgatctttcggtgagttgtgataactacgatttgggagaaacgttgacgatccgactacaaccgtacgagacgttgtgttgcgccttagcgatcgatacacctctccgtgggttgttgatcttgccggtgcagatcaaccctattcctgcaagcaaatcgaagaaacaagcaagaacaagataaaagcaatctgatattgcaaataggaatttaatacaaatgataagttggggttccgaagaacaagcagacggacggtctaaccgacacgcgcgctgcaagcaagtagcaatggctaaactttaatctaacaaaaccccggaaaccctgaaggggtacctaactatttatagaggtgggaggacgaccaagagggtccaagggtcgtgctccaccagattggggcgcaccccacatgggccccacatgggccagggtcccaaacaaagttacaagcccattggcccaatacaggagacgcagcaccttgcttttgtgattgcggccaaacgagatagatttccgagatgaggctggatccgttggaaggaggacttcgagagctttccatcaagtactcacgggcccaaaacggagcacgtatgtagatttggcggccgtttgaagtcagcaatgtaacacgtggccgaatcagattgcagcacatggaggacttgatcttgatgtcttcttgttgattcatgatgtgagcaatggtcgtatccatagtagccatggtcacatcatcctccccttcttcacagaaaaccgtcctcggtttttccatatggtgctcttcgcgcagtccactgaacacaacctgtttcttgcaatcaaaacaagacaaactcgagacaatatgattagcagtaacatgtctctctagcttgcatattttatccagaactacaagatgttctaaatctgaacaaatgtaaactctatgcaccaaaaatattcctctatcattatattcgccaaagatatgaaaaatagcattagttggacatggcaaatcagatttagcaaataatttctccttcaaattatcgagctcacaaaaatcatcaaactgaacatagcccaaagtatttaaagaagatagcaattcgcgttcctctacttcattagcaatgtgaacaacatgcttagaatcagcacacaaagaaatagtagaactaacatgttcattcactagttgtggcatggatataagtgaaacattatcacacaactcttctttatcacaagaaacagcaagtaaatcaacttgtgacaaaggcaactcagtaattgattccactaatggttgctctactatagcatgaaaagtggacaagtgtagctcaccttgagaatactcaccttcatttctctcagcaccatttaatttaccttgcgaactttcttcagataatgtagctgcatcagccttctcctcattcgcgagtgatggaagtgacatctcaaacatatcgttcttctcattttggagacttttctgaacttcctgcaaaacatcagtgataggaggcacaagcatatcttgttgctccgttggattctccaaaattttgcgctcaacaatgcaagcaagcatgaacaattggcctatatgattatatgtcacattaacaagcccagcctgaatattgaaattaagccctctgaaaaatctagtcattgtgttctcattagattcttgtaaaccactataagtgatacaaattttaaaatcatgaaagtactccctaacagttttgtcaccttgttttagatgttcccatttctcaaggagagcacatctatagtatgaaaacacaaatctttttctcatcagtattttgcattcatcccaagtttcaagcttattccccacagtatgccaccaaaaagatgcagaaccggtacacttattactagcagccttaatcatttgagcattagaaaaatcatactcatcaaattgtttttctactgctagctcccaattaatgtatgcagcggaatcatactttccatcatagactggtaacttacatgcaacttgtgcaaaattatagtcatgtacctcatatgcatcacgtgaagaagtcgtcatatctcgtcgaaggtgtagatgttgacgttgagcatgaccatcttgtttccccttgcgcaatcctgccatggttagcagcaaacaagaaacatacacaagaatatacacgctcctatcaactactaggtactggcagctcaaatgtcacacacactcaagcttttaaccaagctcttacaagatcttaccaatgcaagtggaatggtgatgtacaccgactcaaccaagcaccccaatagaggttggatatatcgatgcctcggcaaacacttgctgtacggctgcaatcaaatctgtggagctctgggtaggcttaaatatgtagcaaaggaatagcaaatgctcaaatcagataatgcaaagttgaataattatagtcatgaaccctgagttcctctcgacactcaaggctgttgttggcccgatctttcggtgagttgtgataactacgatttgggagaaacgttgacgatccgactacaaccgtacgagacgttgtgttgcgccttagcgatcgatacacctctccgtgggttgttgatcttgccggtgcagatcaaccctattcctgtaagcaaatcgaagaaacaagcaagaacaagataaaagtaatctgatattgcaaataggaatttaatacaaatgataagttggggttccgaagaacaagcagacggacggtctagccgacacgcgcgctgcaagcaagtagcaatggctaaactttaatctaacaaaacccgagaaaccctgaaggggtaactagctatatataggggtgggaggacgacctaggggtgcctagggtcgtgctccaccagcttggggcgcaccccacatgggccccacctgggccggggtcccaaatgaagttacaagcccataggcccattacaggtgtcgcagcaccttgtttcttcagttgctgccgactgagatggaatttggcaacgaggcttgatgcattggaaagaggactccgagagctttccatcaagtactcacgggccaaaaacggaggtcgtatggagcttcggcggccgtttgaagtcagcagtgtagcaggtggccgaattggattttggcacttggaggactcgaacttgatatcttgttgttcatccatgatgtgagcaacggatgtatccgtagtagccatggtcatatcatcctccccttcttcacggaaaaccgtcctcggtttttccatatggtgttctttatatagtccattcaaaataacctgtttcatccaatcaaaactagagaaactcgaagtagtgtgattagcaataacatgtttctctaaatccgaacaaatgaaaactctatgcaccaaatatattcctctatcattatatttgccaaagatatgaaaaatagcattagttggacttggcaaatcagacttagaaaataatttctccttcaaattatcgagctcacaaaaatcattaaactgaacatagcccaaagtatttaaagaagatagcaatttacgttcctcaacttcattagcaatgtgaacagcatgcttaaaatcagcacacaaagaaacactaggaatagcatgttcattcactagttgtggcatggatataagtgaagcattatcacacaactcttctttatcacaaggaacagcgagtaaatcaacttgtgacaaaggaattccagcatttggttccactaacggttgctctacttttgcatgaaaagtggacaaatttacttcgttaacaatgcactcaccttgattaatttcagtatcatttactttaccttggatgtcctctttagatgatggaggtgtctcgaacttgggtgtgaacaatggaattggtggctctttcatgtctctctcctccttttcgtgattacgcacttcctgcaaatagttagtaattggaggcaaagacatagcgtgtttctttttcatatcctcctctattttactttcagcattgcaagcaagttgtaacaaatgagaaagagatgtatatctttgacaatcaagcatgtcctgaatttctttgttaagcccacataaaaacctcaattctttagcttcttcgcattcatctaaaccacaacgtaataaacaagcttgcatatcatgatagtatgaagtaacagttctggtatcttgttttaaacattgcagtttgttgaacaaaatgtcagcataatacatgggaacataaacatatctgaaatatagtttcaggtctttccaagattgtggtattttgttatgcctacaaagatgtttccaatcattagaagcatgtttaattaaaacactagaggcacacataaccttttgtttctccgacaagacatgcttttgaaattcactatcaaccgctagctcccaattaatgtaagcacgaggatcatagtttccctcgaaataaggcagtgcagatttgatcttacctagaacatcatcacttacctcataatggtcatgttgatccctcctcatgtctcgacgaagatgtcgatgttgagcacagctatccccaattatcttgcgtatccctgccattgttagtagaaaacaagaaacatacacaaaaatatgcgcgttcctattaactactaggtagtggcagctcaaaaatcgcacacactcaagcttttaaccaagctcttacaagatcttaccaatgcaagtggaatggtgacatacaccgactcaaccaagcaccccaatgaaggttggatgtatcgatgccttggcaaacacttgcggtacagctgtaatcaaatatgtggagctctgggtaggcttaaatatgtagcaaaggaatagcaaatgctcaaatcagataatgcaaagttgaataattgttcaaagtcaagtaccgtgctggtcctaggctagaacgtactagagacgcgagcctagacacaaacggtaccacaaaatagcaccagaaacaactcaagcacactctgatgtatgaagttcagctcaaacaaaacaatattttctcttttctttctttcttctttcttcttttcttttttttttccttttcttttctgatttttttttggtgcggcttttttttcttttttttttgcacctttctgcccttttttttctcacttttttttttattttttttaacaaaaactgacttaaggaccttaatgtaagattacagggactcaaacataaatataaaatttatagggactcaaatgtaaaagtctaaacccaaaattaaaattatacaaaaaaatggaatgctgaatttatgccggttccgtttttccaaacagatctcgaaaccgacaccaaacaaaaattcgccaaggtgtttgacacaactcggaaccgtggaattgagggagggggtcagactcggccaaaggggcgagtgggactcggcaaggaggtggagtggatggcagccgaatttggtgtatgggataaaacggaaactgatttttaaccaatccaatctactatatctttccaaaacaaacttgactacttccaaaatcagatatggtaattcaccttcctcctcttgtgcacgacacaggcacggccaaaacaaacacacacaaggatcggcaaactctagatgcaactcaataactccaaaactaaccgacagaaacttctgaaaactacaaaaatagaaccgtggcagcgagccgattccgttttcgtaggtcccgacaacaacagagacacggtggcagcgacgactgtggtacaaaaacgtgaccagaactcgaaactctaaacgaactagacgctaagaccagcaacacgacgtgacgatgcaacacaaaattcaacaaagcaaaaactgaaaagaacaatgcaatggcacaatatggctaggtaaatgatacgaatttttttgtatggctattttctggttataggaagataaaaactcaccgagcaacgaaagctctgataccacctgatgaaccctgagttcctctcgacactcaaggctgttgttggcccgatctttcggtgagttgtgataactacgatttgggagaaacgttgacgatccgactacaaccgtacgagacgttgtgttgcgccttagcgatcgatacacctctccgtgggttgctgatcttgccggtgcagatcaaccctattcctgcaagcaaatcgaagaaacaagcaagaacaagataaaagcaatctgatattgcaaataggaatttaatacaaatgataagttggggttccgaagaacaagcagacggacggtctagccgacacgcgcgctgcaagcaagtagcaatggctaaactttaatctaacaaaacccgagaaaccctgaaggggtaactagctatatataggggtgggaggacgacctaggggtgcctagggtcgtgctccaccagcttggggcgcaccccacatgggccccacctgggccggggtcccaaatgaagttacaagcccataggcccattacaggtgtcgcagcaccttgtttcttcagttgctgccgactgagatggaatttggcaacgaggcttgatgcattggaaagaggactccgagagctttccatcaagtactcacgggccaaaaacggaggtcgtatggagcttcggcggccgtttgaagtcagcagtgtagcaggtggccgaattggattttggcacttggaggactcgaacttgatatcttggtggtcatccatgatgtgagccacggatgtatccgtagtagccatggtcatatcacgatactattgaaatcatgggggattcttatctagtaatcagcccattggctggagaaatatgaatgcaagaatgatacattgatggtttataatgagaagtgcctggaactaatgaaagagttttggctggttactttgaagcatgtatctcgagaacaaaatcttgaagctaatgatttggccccaggggcatcggggtataagccgatgatcaaagatgttaaagttgagattgcagcaatgtcagccgatgattggaggtatgatgtgcatcagtatttgagtaatccatctcaatcggcttctaggaaattacgatataaggcattgaactatacactgttggatgatgagctttattatcggacgattgatggggtattacttaagtgcttgagtgccgatcaggccaaggttgcaatcggtgaagttcatgaagggatctgtggtactcatcaatcggctcacaagatgaagtggttgcttcggcgtgcagggtacttttggccgacaatgctggaagatttattcagatattataaggggtgtcaggattgtcagaagtttggagcaattcagcgagcaccggcgtcggctatgaatcctattattaaaccatggcaatttagaggttaggggattgacattatcggtatgataaacccaccatcgagtaaagggcataaatttatattggtggcaactgattatttcaccaagtgggtagaagcgattcctttgaagaaagttgattcgggggatgctattcaatttgttcaagagcatataatctatcgatttggtcttcctcaaactatcactatggatcaaggttcaatcttcgtgtccgatgagtttattcagtttgccgatagcgtgggtatcaagttgttgaattcttcaccttattatgcacaagctaatgggcaagccgaggcatctaataagagtttgattaagttgatcaagcggaagatttctgattatcctcggcaatggcatactcgattggccgaagcattatggtcttataggatggcttgtcatggatcgatccaagttcctccttacaaacctgtttatggacatgaggctgttttaccatgggaagttagaatcggctctcgacgaacggagttgcaaaacgatttcacagcagatgagtattacaatcttatggctgatgagagggaggatttggttcagtcacgattgcgagcccttgcgaaggttactaaggataaggaacgtgttgctcggcattataataagaaagttgtacctaaagatttttcggaaggtgaacttgtatggaagctgattttgccgattggtactcatgatagtaaatttagcaagtggttgccgaattgggagggaccgttccaaattcataagtttgtgtctaagggggcatatatgttgcaagggcttgatggtgaagtttacgggcgagcgctcaatggcaaatacttgaagaaatattacccaagtgtgtgggttaacgcatgatcggctactactgccgatgcgtgacagccgatgtgtttacatcgccttgagatggccgatattgttatatcgcccttagttgtttttataatgtaatcggttgtggtttgccgatgtacaatggccgatattgttatatcgcccttagttttttttataatgtaatcggttgtggtttgccgatgtaaaatggccgatattgttatatcgcccttagctgttttataattttatcaatgctcttgacattgtaaaactaggggggcatatatatatcaaaatgcagtatgcagtacaaaattttttgagcaaatttcaaagtcatattaatcggcgcaaagggttgttaagacaataaagtatcagaatgttttagccgattacaaaagtcttaagtattattacataaagactactgagataagtatcgctagatggccgaaatagccttctgcctaatctgctctacttcttctatggcttgggcatcttgagcatcggttcgagggataacttttagggacttggtcagttcagcaacatgcttgatagccgatttaagtcttgctttctgttcttcaatagacttggggagatcggctagcttcttgcgctccatatccagctcggcgttacattcttcaagttgtgctaagaggtcaatcttgtgagcctcaagccgatcaatgttagacttgattgggccttcagataattggtcaagcttggatttctcttcatgcacaagttgtcggctggcttggatagtggcttcaatgttcttacattctcgccgttcgactaatcttaacttggctttctccagcttgaattggtgttgctcaaggtaaacagctggagtaaggatgtcggctaactcatccgggattaaggcttgaatctcatgcagccgagcctgattgagccacagtcaactactaagctgtctagtgatgatgcctctagccgatccaaaatacttccttgagttttcttcacgtcatcagataaaggagccaatgctttgcttgtagtatcttcttctccttcatcaagatagtctctgatattgaaagagaaaagatcggccaatgcctgcaataacaatttagaagcagattagaggttaaacgattatagccgatttgaatgcctgttgtgataaaagaaacttactaagatagcaggagcagttggttgttcttcttcctcgacgtgatgactccctgcagctgaaggggtctgatcacttgatgattgttgaataaaaggagaaggaggaggtgaaggctgaaagggagacaagtgtcagatagaatcggctaaaaattaactaatgaaagttaaatctatcttactggtggagctggtttagatgttgttgcagccgatttcttcttcaccgcagtcttctttttctgcaattataagacttgggaatgatcggctataagacaaaataatcactaaaaggattaacgagaaacacttacccttgagaagtggactggggcagaaggagttggaagggtttgcttaggcgaagccgatggtgttctttcagtatcgcttacttcagctgcggcctgatcaacttcgtcttcaattatctcttcatctaaggcttgttcaatagatggatccaaggtgggcagatcatcggccggcttgtcagtcggtttggttttcttgaacttggcctttttctttggagccaagattgaagtgctcacagccgaggatctggttttcctttttgggcctgcatcggctggttctctagttaggccgtgaaggagagttgaggtcttgggggcatagtagccaataacagggggagatagcccacctccatttggaattaagcccgaagcatactcaatgttcttgccactattgctttggtgaggaggggaggactctgttgtctgcaaagcaggagcaaaagattggttaagtaataaatcgattaattgactacgcaatttgatagtaacaatgtttacctagggtatgacgtcgggggacagatctgtcatatacatcgtggctgattgatgaaacagatgtagcttctattcaccccaccatctgtcgaagtttttgcttctgaatccagccaactcaatattttcaatgctgccaagaggaggtcccgatagattgagtagccgatccatcattagagcagacgtgatttgtcctcggcactgaatcttgtcggcaaaaaataagccgattgggagttggcctaatccaagttgcctagccgagctcattgggtgataaaactcgtaggagacttggatgtttctcccttggtgaatgccgacaggaaggatgcaagggctgattgcggctataagaacttctctggatttctggaatttctcatggttaatatcttcgaatctaaaatctgatggaagttcgaggtctgctgattcttcataagggaaccagatccgggtatctttcttaaagccctcatagaagctgcagaaccagtccttaagcagctcagccgataactttgctccagcatcggttggtgtggatgcatattccccatatcatgtgcacctgcgatgagtacattcttctccgtcgtcacccacaatcggctctggcagtgggaactcagcttctgttacagaaggccgattgacaaccttcataaccatcaggtttaaccaagtttgcagtagccaccagggtccacctgctccaactgccgagccgacggctattctagccgatgtgttgttcaacatctggtacagatagccgagaaggattttgcccaaagggaattctttctttgactccagggcttcggctacgaactgccagttggttgtagggccacaactggatccacagaaaaggaacttttccagccacatgagcaaaaaggctacgtgctctcgaggggtaacggatccttgacccatatatgctgccacatagccggaccaacaacctatgctcttggttttgaaatcgaattggttcttggtattcatgctcatggggttggccgatgaagttacatctagtccggtgatcatagtgatgtcaattaaggttggagtcatcggcccttggttgaacaggaaagcgttgatggtgtttgaccagaagtaggtggcggcagccatcagaggttcgtctttggcagaattggctatggtgagggctagtgcttggccgattccaatctcatcccagtgaactttcttactagccgatacacgttgataccaagtggaccaactcctgtcgggtgtgggtttttcgagagatggccaggatttaaaggtgttcttccaatgacctaggttagggttggatagcctaaagggaatccggttggtctcaccagtgatgaaatcggtggggtcgagattgccgattgggccaaggaagtagtggttctggtgtgaaaggcttggaattgcgacttggtgggaaagatgttacgaatccaaagcaatcgaaaagagaggggaggtatgagatgagagaaaatcaatctattgctaaggaaaggggatttagccgatgagaacttacctcggcgtactcggctattggcgcaccagacgggctggcggaggatgacatggccgcgggcggagatctcgtcgaaggagaggttgcctgggaatcgcctttgcgtcggaagagtcgccggagaaggaaggggaataagttctgcttgagcggtgaaaacgggtgtcacggtgtgaggtttctcgggggtgacggttagtatttaaagcacggcagtaacggtcggaaaacggtaaagtgcgaaacttgctcggagtcgatttacagcaaatccgaaacattaccaaatattccggacttggggggcatgtgttaacaaccgaatttggtaacatcagcgtcgggagagaagagtagatcgaagcaaagtcggaagcggaaatcgggtttgaaagcagagcaggaatcggctaaaatccagatcggctacgataagatcggctgggtatgagtcgtgttgggtaagtcgatgtagccgattccgacaatacgacttgtacgcgacatcgggttcaatttaatgtacttcaagatgattgccacgcatggatagagtcctgggaaggcaattgtatctattaattaggatattttatgtaaattccttatagataagtgtggggcaaaagtctgccgtaatgacttatggtatcttagagtttgttagagataatggtcatgtccgctatgggcatatcttgtaatcctcgggtataaatagaccccgagccctatgtaatgtcacaccctaaaaatcctaaatatataaattgttgtttaattggaattattagaaataattttaaaagcctagaagagaagatctaattttaaataataaattccaatgtaaaagtggctagataaaattttattaaatactttacttgattttatagttcctggatttttctgggatttatttgagccaaggaagtatttttaataaatggaattgcatttcatgaataatttaaattgaaaatgttttaaaaatcctccttttggctttgggccgaaagtcggcccaaaaccctctctctctcctccccggcccaagttggcctgcagccgagacgccgctcgcgcgcgcgtcccactcgctgacaggtggggcccacctatcggactcgtcgtccacctccagccgtcgcccggccgaaccctagccaagccgcgccgccgccgcccttccaaattcgctcgtccctttctcgatccgatgaaattgtttgaggggaaatgatccccgagatctcctctactttttcccttttggaatcatcgcctaattcgcttttgaaatcgccggattcgagtttgattcggattcgttttcttcccctgaaccctaatgtttccatcgccgtcgccggccgccgtgggcctccaccgtcaccccctagcccctataaaggacccccgagctctcctctacccgccgccaccctcgcctcgccttccatggccggtagagctctagcaccgtgagctcttgcaccgctgtcgctgccgcaagtccagccgtgcgacgccgtcgctccggtcgtcatcgtcgcttgggaaggacaacgccgggttcaccaagccgtcgccgtcctcgtccacccctccgtcgtcgccgaggatcgccggaagaccgccgtcgtcgtcaagccgaccgtcgccgccgcttcttcctcgtcgccgtccgccgccgttcgtgcctcggtaaggatcgctgcatcgtccactacgcatagaggccctccgtttgcgccaccgcgccgttgttcgccggcgagcatgcgcgcccgagccgccgccggtggtgacgtcatcgccgacgtcatcgtcgtcgtttcccgtgagccgcggtagaccgattagatctcggccgtctgttttggatagggttgatcccggccgttcgtttccgtagaccgccgctgtgcacccggtccaccgtgaacccgagccactgacgcaataatccccttttccttttaaaaaattattcattattgcatcataattcaattaaaatctatataaatgatttaatccgatttaatctttaaaaattcataacttattcatcttagctcggatttagttggttcaagtctctaaatttttctaaaattgagatctacatgttaaaaatatccacatgtactttttatgcttgtttatgtgctgttttagtgtttttgctcttttctctttagattccgatgttcccggagagtccgattttgcaggagaagactttgaggaattccaaggcgagcaaggcaagtcacacagattccaaacaatcctttgagcatgttgatcccgtttaaagttattgtttctattcaactattgcatttatttttgaatgtcattgggtggaaataacctattgccttgttatagcccttttgttcttgattactctattccttaatactttgggttattataatttgactagttgagctttatatattggttcagctagatattagacataattgcttagccatgcttagaaacattagcacactattaggataacttatgattcactattatttaatgatggcttaatgatagctcacgatggttaatcgtgattggttaattaattaatttgccaactaaaacctgataatggtgggttgtgagcacatggttttgatggtcgtgctcatgaaaattaaggaccggttcacgattttcggttgtgaaacattaaccatgccaaccacaagccagcgtgagcaacggctttactttctgtatagtatggttcattgtagagcaccaggctgtgaagtggtggagataagcccacgggggtcgctggggagtccatgccttgtttataagggggtgattatgatccaggaacggtgcactgctttaaattgtattatatagagggtattgtcacaatctctattcgggtacttgttaagtatcgcgacgcttggttgacatgatgttgaggttgtgtcttgtgggtacagtggtacacctctggctagagttaaaactattcgaatagccgtgcccgcggttatgggcgggtctaacaatgtctttcgtgattagtctcacacttcttaccatattaaatgatgctgtttaataacttgtttaactcctggtttggaatggtatattcctggcttggagatagaactgtgcagccgaggttggttgttcagaatggttgggcctatgcaacagggtatgttgtatagcgttggattaatattgtttaatttaatactctactgttttattaaattctgaaatatttattaaatgctatttatgcaaatgagactatactatgccatcctttgttatcctatgcacttgcatatttgctgcgtggcttactgagtatgtcatatactcaccttgcaatcattcatcagaggaagagttctactgtgatgctgatggtgtggaggattaggcctagccctggtcaagctgcctgtggagtagagtcgtctgtgctgtttcttttattttccgctgcttagaactttattgtttgagaggaactatctacctctgtaatgacattatagtcgcttattaataattgtactctattatcaatttgttattgtgtgcctcggctgattcctagacgagggtttacacacatgtaagcgtttggaattttggatagaaatttcgggcgtgacatgtaatttttaatacacacgttcaatacaatctcggcgcatcgccatccttttgctttagttttattttgacgagttcttgctttcgggttgagctgcatggatttcgatcttcaacaagaggtaacattcgccgtgatggattgcgttcttaggattaatgcttccatcctcatgacactctagtcctgtttatgtaattcatcaagttatcatataccttatataatctctaacgatattgccatctaaactactatcggtcaatatctgtatgcagaaggcagccgattaggttagatctagatgttgatctagattatataagatatctaccattctatgaaacagctagcggcttgattgtctagatatggttcttcttttcatacttaatgctgcatcagttgagtttgatctattaagtcgtgtttagaatatcgatctctggcctgctttctagttgccgattagaatagcatcggggtttcagccaatcgtatctgatttagccatatttattctacatgtctcatcgatatgctaaatctgcccttaatatcaagatattgctgcatctaaatatgttagggctttgtttgatatattatacctgctttaatatcctgatatgagttagtatcggagtattagccgatacacgctagatctatctgatcggctacgctataaacatatataatcatgttattgatatatatttcgatctaagtgatttatactgtctcggcatggtgtccgatctatcccaatcactcgatttaagtatataccaatataaggagtatatatcgttaacatctacagccgatcgagtagatttagtgtttatttactttttcatgactgccgatcgatacacaaatgacatcggcccaaagataaatgatatgtcatcggcatctagccaatcggctatcatttatagatttaaccatggtttctttgcttttatttcttgttgattacaggatcaaatcaactggcatgctaatacatccgaaggcgagttttggacctgcactggagttaagcagatctcccaggccacgtgttttctgtcaacacacttttggcacgcccagtgggagttgattagaagtcagatgtcagttcttcctcatggccgagaaacaagcaccaccaccatcaagcccaggttccattaaaggcaaggcattgaagccaggattgactgacatcattgatgacaatgtcatgccaatcgatccagagaaattcacacttgagatgaagcaggagtttgaagcaatgatgcagcaagcacgggatcagtatctgagctcgtttggacatttcccaatgtcggttggagggcagtttggacatttcccatagccataactgtcatatggagcttataaaatgaggtctccatccacacttcaacacacacaactttgagctgaattacaagaggctctattgtatctcttgaacattagaaaataggtagagagtgaggggaagctttggaggactgcccgaaagtttggcgctccatccgacttctatctcaacgagtgtagctttctaggaggaattctggaggagtaccggagttgtcggcacatgtcacgcccagaaatttagcccaaatttccagactattttgtgtattaaatccttgtccaggaccagccagggtacacaaaatgacaagtaataaacagctccaaacgtaaataaagcataaaatacttatagaagaggcacttagtcctcacaccgaaacaaaagcagcagcagcggaaaaggcgatcctagcggggcttcagctccactccacaggcaaaactcaactggggtctgagccttggtcttctaacttcgtcttcagctcagaagcactacacttctgaaaagggggaataatagcaagactgagtacaaccaccgtactcagcaagccacaccaacgatgcagacgtgcaaggggatacaaggacggtttgtggctatttgcataaatgcggttgtaaatcattttattgagcaaaacagtaaaatagttgagtaattaaggtaatattaaatctccattgatcaacgctacaccacgttgaacaggcccaaacaacccacctgaactacagtgcattgggtcgatttattaggggtgagactaatcacggtgaatctggtcgatcgcccataaccgcgggcacggctattcgaatagttttactctggccagaggtgcacaactgtacccacaagacacaatccaccggcatgtcaccgtgccatcatgtgcccatgatgcacacgtcaccatgtcgagtgattgtgacaaaaccctccgcataaccctcccctaaccatccacaccacgctaaggtttcacccccacccctcaaaaggcagtgggcggtcccctcttgcgccgcggtgaatccggcagctggacaaccggacaccccggccgacccaactccatcacgcccaccctcgccaccggtgcctaggaaagggtcgagctatacttcagatcaagcagttacccactcccgcttgtggcaagcgctgtaagtcttccagggtttcccgtgaaccggtccttaattgccatgggtgcgactcacaaaaccatgcacccacagcccaccattcagtcacattttagttggataattacgaccatgaaacatggccagatgtctcgagcacgcagctcaacaagataatagaatgtctaatactgcaattatcccttcgactgagctagtggtaattaagcatggctaagcatatagttctagctaggtcatcaaagtaacacaagctaggcgatctattacccatggttgacaaatgacagatatcaagtaaacatggcacaagcgagcagataggtaaaccctgatcccttgtaattagcaaaacatgcatatttatttacaaacggtaaaacatttataaattgggaacaacatgctcaaggggaatgtgtgacttgccttgcttcttcacttggattttttgaactcttttcctcgcgaccgcgatcttccgaaacgacggattctacacgctggctcgcaaaacgaggaaaaaaactctaataaaaaccaaggaaacagtacataaaaagtaaacaaacatgtagaactcaattttagatgaattttgcaatttgaatggcccaattcggagttcgaatgaattagatatgaattttagaagttttgagccatttaaatggatttctataattattaatgatttattgcgcaattatcaattattttctcaaaggaaaaggcattcgctgatgtcagcaaggggcgccggcgctgacacgcgggccccgcacgtcagcgacacaaaaggggcgggcgcacggtggactcggtccaccgcggcctggcggcaccgtggacccagaccacgggagtggtccatgggtggcgaacagagcggcaaggggcgggctcgccggccagcccgacaaggcggcggcacacgcgcggacggccgccggcgatggcagcacgacgcggcgccggacaagggaggcagaagggaaaagggaggaaggaggcctcaccgtgcgccgggcggcgaggggcgatgagcgcggcggcgagctcctcaggacgactgcgggatggtgctcccgcggcggctccacggggtggaaacggcggacggaggccgggatgacctgggagggcgatggaatgattaggggaaagggaggaggcgcgaggcggtggaaaaaaagcggccagaggccggcaacatgggaagtagctcacctcgacgggaaggagaggactccggcggtgaatggcgagggcgaaggggcggcaccagacggagaagccgatggaggcgacggcgcatattaaggtggtctgggacggcagcaggaggcggctggaggcggaaaatgcagcgtcggcctcaggttggcggtgggggtggttttcggtggtggaggggaaaaactgatcggtggccgggcttgcctgcgcggcagcgaagccggctgcggtggtggcaggacgcgggagcggctcaggcgacgacgacatgcgactggaggcggtttagggtggtggcgactcgggtgcatggtggaaggggagtttcggcggaggtttgtgcaaatggagcggtggccggtgtgcggcgaggcatggcgaagccggcggtgtaagcagcgcagcgtggcggtggctacggcgacggcggcgtgcagccggagctcgccggaaagcggcggagcacgggctcgcgcggggagcacgggagaggtaacgaggagctcggggaggggagggaaacggaagaggagagcacgagggtgcttttgataggcttggggaggagaaatcgtggccggacgtggcggatttgaagcggcaacggccggcgacgtgggcgacaccgtgggcgaagtggggctcgatttggcgccaaaaattggggaaaagtaggggatttggtggaggaggtggaggggtgacgtaagagtgcataaatgccacaaccacgctggcagaccaataaggagtgatctctcggtagtacctaggtgcttggaacaaagtcctatgttgtcaggatatatatgttaagtgatactaaatatgattactatagaagtacagttatatcatagtttcctaatgttattttccactagacattattataaaggtgaatctcctgtttgttcactacattatcaattataggttgattcatgagatataaaccatatatttataccgccgccttcccggtggaatataaatacgatacccttgggaatactcatgggagaaatgctacaacggtatccgtgcgcttgcagatttatctatgaacgtacgaaataccaacacatgacccacgtgccccaatcatgcccaggctggcatgcgacacctcaggaataagtccacattgactccctcaactatagctctaatctgattcatatccctgaagagcaataccatatatctttttttagtgtaaaatactaccagagctttgcctaataattatatattaaaataaaaagagttatttacagaggaaaaaacaaaaagcaaaaccaatacccctttgaaaattacaaactttgtagctagctaagaatggaggagctaagagaatccttcattctgcagaaatgtagaagaatttcatttgtaaaagcaacaaaccacctattaagataaggctgaacattataaaaaacatggccatttcgctgcttccaaatgtgccaacaagcaaatcaaataatatccagaaaaccttttcttctgaataaaattcgacatttgggaaatttccaagtttcgattccaactgaggcgctcccagcacaacttactaaaaggacaagtgaagaaaaggtgaatcaacgtctctctaggaccaccacaaattacacagtttaaaactgcatctttaggagcacaatgcctcctatccaacatgtcgttggtatttagcatgtcccacaaaagcaaccacataaaaaccttaattttcttcacacatttggtcttccaaatctagataaaaggccttggaacatagagtcccacaaaattagtcctgtaaaacttttggccagagtagatgtgtgaattccagaagaaagtccataaatctcccttatttggactgagagacagaatgactaaatcagattgcaactgaagaaactgtctataagcctgatcatctaggggaagattaaagtaatcttcaagttgtaaattcaaaaagtgattcacagattcccatcttaaagtagtttgggagaaaagatcacgatactttagtttcttaatctcaccattccagagatcatcccaaaacaagactgaagtgccagattgtattgtacattgggaaatagctctataaatatcggccaactgaattatgtacctccaccaaaaagaccctttattgaaaaccatatgaggtacttttgttctgtagcaagaagcccaaataagtctaacccaaggaaggtcttgttgtaacgtcccgcctttgcctctcccaggctaggcccacttacattcataccattttgtcacgtcccgcctctcccaggctgggcccacttacatctaatagcttttatagttcatagactaccctcacagaccaacacaagtcttttctgcacactttatcctcactcatgtgcacccggaagaattttccggtcggtcacccatcccaaattgctccaggccaagcacgcttaacctcagagttctttggatatcggcttgaagttgcaacttgttgatatgagtattctattaatcctattaagccctgggccagaatgtcacacttgtgctgtgtaaaatttatgcaaatgcttcaaaagcaaagccacattctaaatatacagatttaatacacctagaccacccttgtccttaggtctacagacttcatcctatgctgccaaagattttcttttaactaaaacattagaacctttccaaagatttcttcttgcagtgtcaatggcctctataatagtctttggcaatttaagggagcacatgcaataggttggaatggcagataaaacagagtttatcaaagtaacatgcctccataaggaagagaagaagcaatggcagtcaacctcctttccaccctatcaaccactgctgccatatcaaccactcttggccttgtggaaccctttggaaagccaagagaagtgaaaggcacagagccagattttccaatttctcgtcaaggacattcaaaggataaatattggacttatgatagttaattttcaaaccagtgtcttgattgaaagtgtgcaagagggccttaagacaaagcaattctctttgtgaagcctttaagaagatgagagtgtaatcggcatgctgaacaccaggaaaatcacctcctccttgaccatttataggcttagataacaaaccaagactcatggctctacttaaaacatcctgaagaagttcagcaccaatcacaaaaagcaagggagagagaggatcaccctgcctgacccctcttttgcacctaaggaatttcccaggaatcccatttagtaagatagaagaacttgctgattcaaaaaccatcttaacccaattcaaccattttgtagggaacccatatgtttcattattttcaaaatggtcgaatgttcgattgtatcgaaggccttttaaaagtccaatttaagaatcaggatttccctcttggattgctgacactgatgaatatactcaaaagacccggctaaatagtcttgtatagtcctctctttaataaaaccatattgattttcatgtacaatcttctttataactccttgaagcctatcagccattagcttagtcaaaaattttagagtgatactcatacgagaaataggcctaaaatcattaacacattctagattaaccttcttaggcacaagaataatataagaagaattaatgcattgcaggtcaaccaactcagcatgaaagtgagcatccagtctgtaataatcttgggctataattggccaacaatttttaataaaacaaccattaaagccatctgggcctggagctttgtcaatcggaagacttttaacaaggtcatccatttcaagagtgaaaaaatgatctaccatgctatcaaggttatcatttcttggaataagatcatattgatcaaaactcatagccgataagtagaaacacccattctagattgaaaagtgtcagaaaagagagaggctttatcatgatgtgctgagacaacggatccattatcattaatttgagctatcaagttatttttaaacctctctgtagccatggcatgaaaaaacttagtttctattcaccaagttggatccatctatttgtgcatcttttcttccaatactcttccaaactgaaaaaagtttcaaagctgttttttcacaatttctctaaaattccattccatcagagataaagctctaacttcttcaattagatcaagaaaatctaggactttattgcaagacttgattaattgcaataatttagaaaaaccattactccaaatcagcagaccctttgttaaccgtttaagcttaaaagtgatacgcttagccgaataaaaaaactagggtcaacactctatacttgtgccacatgatcaaagaaaccctctatctggacccaataattctcaaagcgaaaaacattcgattttggaatagaggattcaattttgatcacaaaaggaacatgatcagaaatagctctaggcatagtataaaccacaatgttagggtactttagggtccagtcattagaggtaaagacccaatcaagctgttctaagaggtgattactttgcatattactccaagtaaaacttctccctttaaaaggttctcaatcagccgtaaagaactgataatattgttgaaaatgaaaatgttattcatatcagcccctggtttatttctattctccacatatctgtaaaaattaaaatcactaagaaaaatccaggcttcatcatgctgaatttggaaggattttaaccaatcgacaaaataaactctttcatggcctctacaaggaccataaattgaagctaggaaccaagatttagagttatgcctagaagtaaattttaggcaaagtgcaaaattattagaggttatcaaagaacccctaaaaatggaaccacaccaacagaccaaaatgccccccctaagcaccatgagaaggcacaaagtgaaaactatcaaatcttttgggcacaacttttttaagagaagcacagtctacaatctctcttttagtttcctaaaagcaaaccctagctggtagctactatcatcaatatttataagagcagcccacttgtccactgaattcatcccccttattctaacataggatatttgagctacgctgctgattcataagtaaaaagatgaacaaagagagaaaacagaccaagcaaagcaagtctggcataagtggcatgatacagaaaaaactagtgaccggctgagtacaataactatcattacaaaataaccacataaaaacaccatatttaaaacaaattgttttttgaaacgaactgccattgataaacaatttaaactaatcatcttcttcagctggcctgggcaccaagtccaatttagctcctcccagcttgcttttagccaccttctcaagagatagactgcacgtttgaactcccatcttttgtaaaaagggaaacagacaatcagatggggaataatcagtttcaaaataaatatcagaatcaaagttagattccttaaggatactgccagaagataaaacattagaaatacatgccaattatttcaacttctttgcaaattttcccctaggtttaccaatgcccatcctgggatttaagtccgcaacatcaatcagcaaggccctcaacctcgagctttgcattctcacttgatcataaagaactgttttaccatctcttttcttagcaggagcctttggaagcactaaatgttagtgatatgccctagaggcaatcatagagatgattgtatcacatactatgtttacatatttatccaactttgttccttgaaatagataactcattattggttaatgaatatgtgattctttcatgaggctctttatgttgtgtgttgctatttctaaaggatccctgatcaaatatcatatgtggaacaaatatgtttagatgatcagcacatatattaattgatgatcatgtctcatggatcatggtatagagataccaaattaataatgtggacacatgttggtgaacatgttgttggatatacccaacatgagacactgcaagagccatatgtgttgtgtcatcattgatctcagttagtgttggtgttgaatccttagacctgagattatcatggttcccaacatgtgtagtagcttacttagggactgctaaacgctactccgtaattgggtagttataaaagtagttttcgggcatgctatgaaacatgtagtgggatatgaataatcaagatgggatttacccctcctatggagagatatctctatcgtgaggcaaagggattcatacaagtatacactagaggttcagccaatatggtttttatgtatgcccggtgggtcaatacgttctgctgggggccgctgttgacgcgtggaccgaaaaggagttttcgggttacagccgagtgtacatgaacctactgggtcgcacacttaatgggccggaataaggagattggatggagatccaatatgagcttaattcggatagggatccgaataggagtcctacgggccttggaggcctgagtgatggatcctatatattcgtgaggggtgtgaccggcggaggtattgcatcacgtgagaaatcctagccgtcactcccctccccgagcaaaaccctagccgcgcgcgggtgctagcacatctgcgcgtggcgttccgtccctgtacgtgtggataccggtagcggcgctgctggtttgcggtgctgatcagcgtaggaatacagcgaggagaacgcacgaggaggagaaggtcgagctggtgcgatcgactacttcttctacatcgacgcacgctacttcgtgagaattccttcgacttcttagcgccttcttccgctgcgcagcacgtcgagtggtaacgatctatgatctaatacttgcatggttcctggtttacgcgatagaaaattttgatttctgctattgtagcctacgcgtaacccaacactaaagtaacagagctagaggcaacaagtgaacttgggtgcacatccatctcctgagaggcagaaatatcaacagggggccacgcagtagagggacttcatcaggagcaaaaatatccagaggggtagggggtagaatagccaggggaactagagaaatcattagatcccctaaagcatgcatgacatcatcaaccactaatagactttttttccatggcccaacttgaggcctcacccacgttgtcccttttaataacaggtggagaacagtcagtgatagctttccttttagggaaaggagcggattgaaaagagcagctatttgaatgggcattgggatgggggctctattttgcaaagagctcaaaagtttcaccctcaaaaggaactcatcaatcttctcctgcatctcaggtgttatagaaaactgtggaaaatatttagtattgtcagccaacattatgatctgcatattttcacttcctccatgtgagcttataccagactgaccagtcccctgattcttagcctgttgatcctagttatcccatccccctacatcctcttgctgctcattaatatcatcccaagctggaccttgatgttgagtggggcctggtggcggtggcgggacaccaatagggggcaaatcttcatcttgcggttgtggattagcaaacttattatttaagttaagcactccaaaggtccacgattccccttgaccaccatgattaggaatctatttaagaacaattcttccttggaccaaatcaacaccatcaaaatatgcctgcaacagaacacgaccagggatagcatcaacctcctgcaagtagtctaactttccaaacaaacccatagctctagagatgtaacttgtagagcggaagtctagaggataccctagaaacataatccacactcctttgtcagcatgagcagctctccagttagtacctctatcatggttcacaaacctaaccacatgacccccattataataaaaaccaaaggctgcaactaatgtatctctaataagagttgatctgacagcaaaaaggccaacaccaaggggatgcggagcgtaatgagtgaccataatacccagttcattctagagatggttacaaatctgcaatctgtgaacatcccattcatcttttgcacttggggttcaatcttatcaagcacgtaggcttcatgctgcttttaacgagcaggaaccgtaatgtcagctttgtgcaaacgatttggactaccatcttgaacatgatgaccagctcccacgaatcaccccggattgaagacaatcttaggacctgtttagtacagctccaactcctaaatttagctccaggagttcgatccagagtagagttctggagctgcctaaacctagctccacaactctagttcattttgtgagagagctccacctagctccactcccagttttggtggagctgaaactgtttggttgagctccagatctaggagggatggagcaggagctggagctatgccaaacatgcccttagccatggcaagattttccgacagcatattggattgagaaggattggggttttctagagcaacagtaatctgtcgagaagaagtaggtgaagaagatggaaaaatagatttgttaacgcctttccactgtcaagtctctttaactatccacttggaagtagtcttactcttttgggccaaacactaatgggccttatgtccataactaaaacagaagttacaccggataggattagaacaatttgaaaccccatgatcctgcctaaggcatcgtgaacaaaactgattagaagatttagaggcctttggggaatcagaaggaaaaactagcctatcaaaaaccgaagaatgatttggcacattgaaatcaagctgatctttgacagatctagaattcttatccagtatactctttttcaaagaatcaaaaaccttttagacagggatcatagatgagggaactgaacgctcagattgaacaacatttgcaaaagaaatactaggctatactacgactgaagatctcagatccttagacttcggtttcacttaagtccactcacgatcttgcttaatgatccattgagaatattctttataccaatctggccccccatttctccacagatgaaaaaataatttgaagtggtgacgagagaaagatttaagagaatagatgtcggcgggtgaactcctccaccagggaaccatgaggccccccttttttggttcggccgggggtagtgattggtattcgaggattctgtggtggagtgtgaataagagggggtcgggcccccctagggagatgagacaatagcggtttatacaggttcgggccgttgagaagcgtaacaccctactcttatgctatgctgattgagagagtgagattacaagatctccttgttggagtggaaggtgttgatgatgaggggaggcgactgctctagtgaaaaagggctcatcccctccctaagtaggcctgcacctccttttatatctcaaggggttactacatgggcccactgagcctattcagggaggataatcacattaaatgcatgtctcgttccttgccttggaagtctcttgcatgccatgttgcggcgtggggcccgtcaaatccatctggctgacacaggggacacgtatgtcattcgatatttaataaatgaggacttttgggtcctcacttgtgctgggaaacggaaaccctaccataaccgggttaggcaagcctcacttgtgcgacaagaggctaagcggcctcccatcatcacgatgtgacagggggtctcaggcggcacgtgttggtatttcttagcgacactactgaaaatataattcccagcaatagcactagaaataatcctggtatattatggttacagatgtgatctgcaagcgcacggatataccattgtagcatttcacctgggagtattccaaggtatcgtatttattttatcccaagggaagatatgataagatagtactatgctaataattcaaatattacttatatacatcaaagtctatgcaggagttaatttagttcaaagggtagggtggcacacagaagaaagaactaagatattctcactaaaatatagtctaagctaagtggagaaagaataacaaaaagtatcattcctgtacttctagtatatatacatctttagtctatacttgttggtatacaatcatgcaaccaataccctctaacagtgtcctcctggtgttttgagagaccaccccttgttgctgagttccttacgacaatctgtcatggccatccaaccgaggctaaatacggaggagtaccctccccaggaaattgtacttaggataatatacacatgcagaggaacacccgtattgagctgtcaccatcagtggccagcctctgaaccattgcatattaccccaattaatggtatataataatctaagcatcgcacttacattactaaatactactctgtatccttgcaaccgacatagagcaaacgaatactcggacactaaacccacaccaatacacctctctggtaagctagtcacacaactatattcgtacaagtataaagtaaagtcggtactcaattatatgaatggaataagataacgaaagtgtataaagaagaatattgtattaattcaataagtcttacaaaagaaaagaggaaagctagtagagccatacccgaaatctcctgaagagtcgaggactatgaagactattctatttcctactccactagtactagaactactaaactaaacttgggagagctcttgatcttcttcttgaggtgtgtggagaatggaatgagataacctcccaatgacggttttggcggttggaatggtcgaaaatgccctccaaccatcattggggagtgatccacaccgtccatcgcaaaccctgcatcgaacggcttcaaggtgggttcggccgaaccatgggctgggctactctggcccatttttggcaggtagcccccataactcctctcttatccagaatagtgaattttggtcctattggatcgtgtcatatctgagttctcagcccatctatccataagtctgattctcgacagcgtctgattgatcgttcatctattttttgtcgattcttctctatttatatgtgcttcttctacatagatgttagtagcatagtacatagtggaagtagatattttattcgggaattatacatcgcaaacatagctagtatttactaattgggtaatattgacggtcgaaactggtcgataacgaccgtcaacaaaccccccaagcttgaacctttgctcgttccgagtaaagggctcacaaaaatttaaacttggttgtcgattaggagttgctactatgctgtatatctcaaagatacagatgcaaggtatgtgtactctctctcaaaccaaataagtttggcattatggcttacccttacacctaattcccgcgagacactgcctttccttgtcttgagcggttgagagacagaacaacaattagagcgctagtcacccaatctttatttaacttttatcttggaagttttcaaatgatttttcaaaagaaatctaagttcctcaaatgattctctcgatcactcagagtgtttgaatatgaattcctcaccaaatttgcctttttgaatcctactctaaggtttgatatatggagcttggtagggatcaaacatggcatacttgtattcacatttattactaagtcaaaaacttggactaaaatagatgactaatcatactcaagatcaagattgtgcaaagtgtgtgtgacatatggtggaaatggaatgtggaaaagaaagaaaattcttctcctttgtgcttactttcttctccaaatcctcctttcataaatatagagagggcatggctacattttttttaacatcttgctcaatattttgagagagcataagtttattatgattattattttcataaccatgcctttccctcctttttctcttttcttttttattcagaaaggattttctttttaggagaagaaagcacatataagcatgaagaatttattttgatgatggtataatggaaataaagatagaatggatgctagcttgcagtgtagaagtttagcatatgcatatatgtgggtgtatgatcttgatcatagagcatgaaaagtatctacagaagtcacaaagatttgacaaatttcaatggacttacaagtaaccaaaatgtatatggcttaatcaatatggatattttttggctctagtaggaactcatatcaaatgaggaactttgaaatttatcatttcggaaaataaaacattcggaattcaagtcaaacttagaacaggatcatagaaactcttatttactatctcatatctcgcaacaacctagactcagatcaacaaagtgcagctagactcagatcaacaaagtgcagctcacttacctcaggttcctgataattgttggttattcttactcaaattttgagagagcacttaaccatgacccatatatgagagatataaaacagaataactattcatcatttcaatatgaataactaagcatgtcttacctagcatattaccctatctttttggtatttttgattttgcaaaattttatgttgtttttaggtgtataaatgcaatgcaaaaatttaaacatgcaatgaaaggaaagatacaagtcaccttagtgagagggggaggggggacatctccccccaagcttgcttcttgctatggctcatggtagggattgaatccctggtagcggtagtacgcttgccaatcagcttactgttgttgcatcgtggtgttgagatttgcaagttgtgcatcaacagattgctgccactcccgtgtctgcaccacatgtccctccagcgtgtgctgcatgctccctgtctgcagttcaagtatgcccatcctttgggtaagttcacccaaatcccctcgagaggagactgagcgacgcatccgggaggcaggaggtagaccacttgaactagaggaacgcgagtacccccagtgctcctatgcataccaccggttgtcactggcactctgccaggtcgaaactccggcatcatactgcaggactttggtccaaccgggggcatccgcggttgggtcccaactgtctctatacatccgcactggtggtgaagaggaagacgcctcctggggtgcttctatcgccattcgtcgtgttaccctgcgtgggacatcacgatacaactcctcttggagagaaatggttagttcttggcagttatacaaataaaaccccgggttaggtagcgggatctcatttgtataaccgaggaagaaaaacacaagagtatcatttggaccatgcttgagtatgtggccttgaaccaaataggcctcatcaacataagagcggggagtagtaatataagatacttgcatattaatcaaagccccaactctacatgctagacgggtaaccaaagatgtacactcaacaggaccggtcaaccttatgttttctaaccactgactaatcatgcactgaacgggtgaaaccttaattctcttaaccatggcatacaagaggataagttcgtctttacgaactatctggacatcggctctagggaacaaagtaaaaccaagccacttatgcataagcctaagagtaggattatgggtgtcattagttctaggctttttacagaatgggagacccaaaatactttgccaaaacatacgtttgttaaaattaggaaatgcgttactgaaattaactttgcatgttttgtcaaagcctagatgcaagctaaggtctttccaagaaaggtgatattccttgcagaataaccggaaattaacaccatcgcctacctttagcaaggtacataaaaactgcatggtaagcaaacgggaaccggttcatctacacatgcaaatttatcccatcctaaagcacgccaaacagtatgaaactcagcatccatacctatccttttcagaaggtccaggtcgtatgcttgggtgtgagcaagcattcggtattttagcatgtaataggcttgcagttcccggtcgcccatgaggtcgagatcggagttgtcgtatagccttggtggaacgtccgcctcctccatcgatgtatcggcggaagagggtgtgctgggctcatcgtgtcgccttaactgtgtgcttgatcctctcttgaatatgcccgaaaattgtttcttcatggctacaaagagcaaggttacaagactactcgagcgggggttaagcaagtacccgccgattaaccttgcaccgaactaaagcaaacttgtatatgccaagtgtctaaactaaatgcagcaaatgaagattgagataggctaagttgaaatgaacttgagagcaaatgaatttgggggagagtattagaattgagttgaattggtatgaatgtctcccccctagccatgcggctgaaaattttattttatttttgctcataaatttattttaaatttgttgtctccaaattcatattaaaatgcaaaactttgaatggaaaaactaaaaaggtaaatatgcgctaatgcaatgcggaaaataaatatgggataactacaaatttacctgttggcaagggcgacatcgttttaggtccgacgagcatgatcgtacctccatcgttttagcttgatgaggtacccggttccagagatacagggacgggtgccttctccttaactcgccacaccttctttgtttttggtgcggtcggtgacctcttcgaaactgggaacgcaggttgaccggcctgtattcccggcttcttgaatgccaacttgaggtatcgacggatcctcgtttcttcccgctccaggaagttcaccatgaaatcgatgaggctatccgtcagggttttactttgaccttcctcatgttctgttggttttggttcgtacgtaatattccctatggagcaatgtaccatccttcatctctttgtggacgataccgttgttgttattcatgaacatgacatccttatgggtttccggacgatctgtcccagagtgaccgtcatttccacagaccttacatgtcatgtgagagcccagggccttaacagtaccctgcttggcgtatttctcactgttgtctagtctctttttaaggagatccaacttagcagcgagcatttccgtctccatgatggtgtgcatgccgcgttgatgggttaagagtcgttccttgctccaacctatgtttgagatcatcttctcaatcaggttagtggcacctctaaccatatttgagaagaatgtctttccagcagcagcgtccatgtgatcccaggactagaggattaatccattgaagaaattttgcaggatgagccactcgtccatccgatgaggacgagtggtgacgtactactgcagcctttcccaagcttcaggattggtttcatccctcatccgctgaaagctggatattcttccacgaagagcgttggtttttgcccattaggaagaattttgagaggaatgtcgttgagcacttatttctggtattcaccattgcacggttggcgtagaaccactatttcgctcctccaaggaaggagaacggaaacagtcggagcctgatagtatctggactgactccgtgctacagatatctaggaattactggagatgagcacttgcatccttattaggcttgccacataatgggctagcctacaccatcgtgattaggctggttttcaccatctcccatgctgacttcgggagtccaacgggcatgttgtcagcagagggagcagtgaacttgtgaagggtcttcttagccatatcgttaagtgttgatgacgctggtatgactgatctggttgctgataaagtcacttgaggagagatgactctgggtctggctcttctcaggagtgattccggattctctttgaaattgatcagcaaatccaaaccagtcatgcactaccctgttttcacataaaagagaaaacaaatatgggttgcctacaaaggacaatgatcatacagaggtaatatataaaattattagcatgtagtaaactcttaaatcatttatccttgttagcgaccaaatttggtaattcaagtatcgaaggtgaagataaaatcaaagcggaatctaagagatagatcgttccggaaacagagcaagaatcggccgaagtccgaatcggctacgaccagaatcgacagagttcgagtcggacaaggtagccgattgagccgattccgacaatgtgactcggtacacgttgtcgggttgagttaatgtgcttcatatggattgccatgcacggattgagtcctgaaaaggcaattgtatctattaattagaatattttatgtaacttccttagagataagtttgggcaaaagtctgccgtaaagacttatggtgtcttagagtttgttaaagataagagtcgtgtccgacaaggacatgttttgtatctcgggtataaatatgactcgaacctatgtaatcaaacaacacacattcaatacaatctcgacgcatcgccaccctttttactttcgtttcatctcgacgaattcttgctttcgggttgagttgcatcgtttcgatcttcaactagaggtaaacttgtcatgacggcttgcgttctcgggattagtgcttccatctttatgacactctaatcctatttatgtaaatcgtcgagttatcatatatcctatataatctctggcaatattgttatttaatccttaattagctaacatatattactggaaggcagccgattaggttaaatattaacgttgacctagattatatagggtatccaccaccctatgaaacgtccaacggcttgattgtctagatattgtccttcttttctgtcacgcccggaatttctatccaaaattccaaacgcttacatgtgtgtaaaccctcgtccatgaatcagccgaggcacacaataacaaattgataataaagtacaattattactctaattaataagcgaataaaatatcattacagaggtagatagttcctctcaatcaataaagttctaagcagcggaaaataaaagaaacagcgcaggcgactcctctccacaggtagcttgaccaggactaggcctaatcctcaacaccatcagcatcactatagaactcctcctctgatgaatgattgcaaggtaagtatatgacatacttagcaagccacgcagcaaatatacaagtgcacaggataacaaaggatggcatagtatagtctcatttgcataaatagcatttaacaaatatttcagaatttaataaaacagttaaataataattaaacaatattaatccaacgctatacaacataccctgttgcataggcccaaccattctgaacaaccaatcccggctgcacagttctatctccaaaccaggaattaaccattctaaaccaggagctaaacaagttattaacatcataaattaatatggtgagaaatgtgagactaattacgaaagacattgttagacacgcccataaccgcgggcacggctattcgaatagtttaaactccggccagaggtgtaccactgtacccacaagacacaacctcaacatcatgtcaaccatgtgtcgcgatacttgacaagtacccaaatagagattgtgacaataccctctatataatacaattcaaagcagtgcaccgttcccggatcataatcacccccttataaacaaggtatggactccccagcgacccccgtgggcttatctctgccacttcacagtctggtgctctactatgaaccatgctatacataaagtaaagccgttgcccacgccggcttgtggttggcacggtaaatgtttcacaaccgaaaatcgtgaaccggtccttaattgtcatgagcacaaccatcaaaatcatatgctcacaacccaccattatcaatttttagttggcaaattaattaattaaccaatcatgattaaccatcatgagctaccattaagccatcattaaataatagtgaagcataagttatcccagtagtgtgctaatgtttctaagcataagttatctaatatccagctgaacccatatatataaagctcaactagtcaagttataataacccaaggtatcaaagaatagggtaatcaagaaataacaaagcaataggttatttccacccaatgacattcaaaaataaatgcaattgttgaatagaaacaatagctttaaacgagatcaacatgctcaaaggattgtttgggatctgtgtgacttgccttgctggccttggaactcttcaaagtcttctcctgcaaattcggactctccgggaacgtcggaatctaaagagaaaagaacaaaatcaccaaaacagcacataaacaagcatgaacagtacatgtggatatttttaacatgtagatctcaattttagaaaaatttagagacttgaaccaactaaatccgagctaagatgaattagttatgaattttcaaagattaaatcggattaaaacatttatatagattttaattgaattatgacacaataatgaattatttttgaaaaggaaaaaggggattattgcgtcagcgggtcggctcacggtggaccgggtgcatggcggcggatcacggaaacgaacggccgtgatcaatctatccaaaacgggcggccaagatctaacggtctacgaccggtctacgacggacggcgtcgatgacgtcagcgatgacgtcatcaccaacggcggctcggcctcgcgtgctcgccggtgaacgacggcgtggcgacgcaaatgaaggacacctacgggttgctggcgacgcggcgaactcaccggtgaccaaaacaacggcagaaggtcatcggatggcgacgacgatgaggaagaagcggcggcgaccttcggcttgacgacgacggcggggctccggcgatctacagcgacgacgaaggggcggacgaggtcggcgacgacttgatgatcacgacggcggctttcccgagcgatgacgacgaccggagcgacggcggcgcacggctggacgaacggcggcgacggcggcgctaggctacacggcgctagagctctaccggcggcgagagacgaaagcgagggtggcggcgggtagaggagacaccggggtccttttatagcggctaggggtggcggcggaggcccacgacgaccggcggtgtgaaggaaagtctagggttcggggagagagacgaatccgattcgagatcgaatccacagatttccaaacgattttagccgacgatttcaaaagagaaaaggtagagtggatctcggggatcattttccctctatcaatttcaccggatcgagaaagggatgaacgaatttggaagggcggcggcggcgcggctcggctagggttcagccgggcgacggctggaggttgacgacggccctctcagcgggaggacgcgcgagcacgcgcgagcggcgctcgactgcgggccggcttgggccggggagagagagagagaggtttgggccgactttcggcccaaagccaaaagagaactttttaaaacctttttcaatttaaattattcatgaaatgcaattccatttattaaaaatacttccttggctcaaataaatctcagaaaaatctaggaactatagaatcaagcaaagtatttaataaaattttatctagcccacttttatattggaatttattatttaaaattagatcttctcttctaggcttttaaaatcaattctaataattctaattaaacaacaatttatatatttgggatttttagggtgtgacaaacctatccccctaaaacggaatctcgtcctcgagattcggaagaactggcgaacaaatgcggatagctgactttaattcatcttctcgttcccaagtagattcttcctctaagtgattactccattgaaccttgcaaaaacggataactctattcctggttcttctctcatctgtttccaagatacggattggtttctcaacatatgtcagatcctcttggactcctatctgttcaagattagcttcttcggtaggtacccttaaacactttttcaactgcgacacatggaacacattatggactcctgccaaagattgaggtaactccaactgataagcgacctctcctcttctactgacaatcttataaggtcccacaaaacgcggtgccaattttcctttggtgtgaaaacgatgaacccctcggagaggcgtgacacgaaggtacacatgatctccttcttcaaaacttaaatctctgcggcgattgtcggcataactcttatgacgagactgagccacacgcaatctttcttgaatgatctttaccttctcttctgcttcccttaggatatcagtcccgaaaacctgacgttctcccgtttgatcccacaaaagcggagtgcggcacttccgaccatacaatgcttcataaggagccatttgaagactagcttgataactgttgttgtacgagaattccgcgtaaggcaaattcttatcccaacttccaccgaagtctaaagcacaagctctcaacatgtcttctaaaatctgatttaccctttcagtttgtccgtctgtctgcggagataagcagtactaaagttcagcttggaacccatctcttcctgaagcttcttccaaaactttgaagtaaactggctacctcgatcggatactatcttcttaggaacaccatgcaaacacacaatccttgccatatacaattctgccaaccgacttccggaataggtggtcctcaccaggatgaaatgagccactttggtaagtctatcgactatcacccaaatagagtcatggcccgatgacattctgggtagaccagtgatgaaatccataccgatttcctcccacttccattctggtatcttcaaaggctgcaaaaaacctgcgggtttctgatgttctgccttgactcgctgacaaacatcacatactgctacatattctgctatctcacgcttcatacttgcccaccaaaatcattccttgaggtcttggtatatcttagtactaccagggtgaatggagtataaagtatcatgagcttccttcaaaattgcatctttcaaatctttgttgtctgggacacagatcctctcacccaaccatacagttccttgctcatcttccaagaaaccgatagcttttcctcgtctcatattcttcttgatctcatgaatatcaggatcattgatttgagcttctctaacttgatcaatgtcacgcccagaaattcccgaatagaattccaagcagaatgtgcattaaaatccccgtccaggaccggccggggtacacaaacgacaatgttgacattcagatccacgtcttacaaacattatcaaagtcttacataaatgcagcggaaaaacgagatataactggagcaaagccttgacttgatctgcagcgggaacaccactccacaggcatcctcgacggcacggacgaagcctactcctcggagaaaccaccatctgacacatactcatactctagggttggggtaaatagagcaagactgagtactacccactgtactcagcaagtcataccggaataggggtatgatgcagggaattatcaaggggtagctataatggttcatttgcataaagcaggcatttataaacagaagtttaaagaagtaaacagttgtaataattaatcaatattaatcatccactgtccaacgctatcccacgttgcaacaggcccaaccatccacctaaactatccaatttcattagactacactagggtgaaactaatcacggtgaatctggttgaccgcccataaccgcctgcacggctattcgaatagttttactctgatcagaggtgtacaactgtacccacaagacacagccccacgacacgtttccgtgtgccgacatgccaccacgacatatcggaaagaggccgtgacaggacccttcgcataaccccctctaaccaagcacaccacacctcaggtttcacccccactccttgcaaggcagcgggcagtcccctctcgtgcctaggtgaatccggaagcgacaaaggccgtcgtagggcccgccccgctccatcacgcccacccttgcctggatgcgtcagctagaggaaaactacactataagcccagccgttgcccacgctggcttgtggtaagtacgataagttcttccaaggcatcccgcgaaccggtccttaattgccatgggtgcgactagcaaaaccatgcacccacagcccaccatgtgattcattttaattaatcaacaccaaagcggtggtactaatccaacattaccattagaacctacagtctaaacagtaataggatctccctcattgtgtgctagttgaactaaacatggctaagcaattcctagtccaaagtctattcatgttataacccaagctaacaaggagcatggtaccaaaatagcatggttgtaacaataggtgaacatcccatagtaacattataaaacaatgcagtatttgaagaaaaacaatagagcatttgcaatataggatcaacatgttcaagtgacaagcatgacttaccttgctctgctgctggaggaacctcggcgactatctcgaagtacaccggagcgtcggaagaaccagaatctaagcgacatacaaggcaaacaatgcaaacaggctataagactactgaaacagagaacaaaaccatttttaatggattctacaattttttcttgatttactaagacatgattgggcttaaacggagcacggatgaattagttatgatttttagaagattcactgtgtttattactataacaaaaagtccttaaatcatttattgcgcaataagtcctagggctgacgtcatcaagggggggggtcagcgccgacaggcgggacccgcatgtcagtggcgcaaggggtggccggtctaccgtggaccgggaccacgcgggtggtccaccaccggtccacaggatcgacggtccggatcggcccagggccgatcggacggtgcggtggctgcctggctcggctcgactcggcacaaagccggccggccggccatggcaagggcggcggcggcggacggctccccggcggcggcgacgaccgaaggcgacggcaagtgcgggtggcggcggcgcacggggaaacggggaaggaaaggaaaggggagggagtcctcaccggagggggcggcgacgaccggcgacgagaggcgatggagggaggtcgacaagcggtggacggggtccgagacgacctaaagaacgaaaaggacaagattagagagggagagaggggccatagaaggcgggaacgccggccgaaggcgacggacatggcggctctcaccgtcgcacggcgggaatggcgctccggcggcgaacctcgacgaaggaggggtggacggggtggatctcggccactcgaaccaacggaggcgacggcgcggtgtggcggcgagcctagcggcggctagaggcggccggagtggcgggaaaggcggcagcgggtggatgcacggtgcgggagcgatggggaccacgagagagttcggcgagatggggaaaaagagagaggggatggcggtggagcttatataggggagggggaactcggacatggccagtaggggcatgattcgccggccgacgtgggggaggtggaggtggagagagaggcgggattcggaattcgaatcccggccatctcgggcgcgggcacgagcgggagagaggggggagtgggtgtgggagatgcggcgcatacacggacgtggccgacgtggcccggaggaggcgggacgtgggcgcggcggcggttttggcggtggtggcgacgtggggacgggtggccggaggaaggggacgaccccgacaggtggggcccacctgtcggcgtcccggggagagagggaaggcggcttgggccggcccacaaggaggagggcgcgcgcggcggcggcggatggactgggccgacggcccaagaagaggaaaaggagggaaaagaaaaagaaaaggaggaaaagattttccctgggatttaaaattgcatgtgctcaattttaattagttaaaattatttcgagggctctgaaaattcaactaaaaatcttgttagcgtatttcgacatgtagaactcaagaaaaattccacatgccaattctgattattatttgcattaatttattaaggtttactattgctttacactggtattttcttgagaccatttaaaactccaatttaggcttgggaaagaacttcggggtgtgacaaacctactcccccttaaacggaatctcggccccgagattcggaggggctggcgaagaggtgcggatgggcggcgttcaactcatcttcccttatccaggttgcttcctcctctaaatggtgactccactgaatccggcaaaacctggtgaccttgtttctagtcctcctttcgctggtctcaaggatacgaactgtcttctccacatatatcagatcttgttggatatcgatgtgctccgaattggcttgttcttcgggtaccctcaagcacttctttaattgggatacttggaacacgtcatggataccgatcatattggatggaagttatagctgaaacgcaacttctcctcttcgttccaagattttgtatggtcccacgaagcgtggtgccaacttgcctttcgtctgaaaacggtgcactccccggagcggagtaacacgaaggtacacatagtcccctgcttaaaacgtgagctctcgtcggcggttgtccacgtagcttttctgtcgagactgggcaatcctcagcctctctctgacaatcctgactttctcctctgcttctgttaacacttccgttccgaacagttgacgttcgcctgtttgatcccagaagagaggtgtgcggcacttccggccatacaacgcttcgaacggcgccatttgtagactggcctgatagctgttgttgtacaagaattcggcataaggcagacttttatcccatgctccaccaaagtcgagtgcacatgctcgtagcatatcttccaagatttggttgaccctttcggtctgaccatctgtctgcggatggtaggctgtgcagaaattcagccgggttcccaattcctcttgcaatttctgccagaactttgaagtgaattggctccctcgatcagatactatctttttgggtactccatgtagacacatgattctcgagaggtagagctctgccaaccttttgcccgtatacgtggtatgtactggtatgaagtgagcaaccttagtgagtcgatccacgactacctagattgaatcgtgacccgatgatgtccggggcagtcctgttataaagtccattccaatctcctcccatttccattccgggatttgaagaggttggagtaaacctgctggcctttggtgctcttccttcactcgttggcaaacatcgcagagcgcgacgaattcggctatttcccttctcatgctgactcaccaaaacttttctttgaggtcttgatacattttggtgctgcctggatggatggagtactgagtctgatgagccttggtgagtatcagatccttcagttacttgtcgtcaggtacacacaatctttctcccatccaaattgtgccgtgttcatcttcgtggaagtcccaggcttttccgaccctcatattctttttcagttcagctatctcaggatcattcacttgggctactctgacttgatccacgagcgtaggtcgtgcctctagggcagccacgtacccgtgttcaacaagtcgcaagttgagacgctcaagctcctgctgcaattctccacacatgccctcgatgcatagggcattgcagtagcttttcctgcttcgcgcatttgccaccacattgactttacccgggtggtagtgaatgctcatgtcatagtctttgattagttccaaccatcttcgttgtcggagatttaggtccggttgggtgaagatgtatttcagactcttgtggtccgtatatacttcgcagcggttgccaatcaaatagtgcctccagatcttcaaagcatgaaccactgctgccaattccaggtcatgagttggataattcccttcatgtggacgcaactgccgcgaggcatatgcgaccactctgccctcttacattagaacacatccaagcccgtggcgggatgcgtcgcaatagacttggaagtctttcatctggtcgggcagaatcagaactggggcggatactaatttcttcttgaactcctcaaaactcttgtcacactcagctgtccatttaaacttctcatctttcttaagcaactgagtcatgggtcgggcgatcctcgagaagttttcaatgaatcgacggtaataacccgcaagtccaagaaaactccgaatttgcgacacggtcttcggtggggtccatttggtaactgactccacattcgacggatcgactgccacgccctgagctgtgatgacgtgacccagaaatttgacttccgacaacaagaagtcacacttgctgaacttggcatataactggtgctccttcaacttctcgagtaccagacggagatgttgcttatgttcttcttcagattttgaatagataagtatgtcgtcgatgaacaccacaacaaacttgttgagaaattccatgaacactttgttcatcagattcatgaagaatgcgggtgcgttggtaagtctgaaagacataaccgtgcactcatatagcccgtaccgagtggtgaaggccgtctttggaatatcctcttcccgaattctcaactggtggtagcctgatcacaagtctatcttagaaaacactttagctcctttcagcttatcaaagaaatcatcgatccgcggtaaaggatatttgttcttgattgtgacctcattgagtgcgcgatagtcgacgcacatcctcttcgtcttatcctttttctccacaaaaatgaccggtgcaccccaaggtgaagtacttggtcgaatgtaccctttctgcagctgctcatcgacctgcttcttgacctctgctagctcgttggccgccattctgtacggtctcttgtaaataggggcagttcctggtgccaaatcaatccggaattcaatctctctcttgggtgcatggtagtgaggtcttcagggaacacttctggatactcgcagactatggggatatcctccaatttccgcgaacccttctcctcggtggtcacagggttttccaccttaatctgattcaaggaaaccccttgctttggtgagactagtgacttgtacaccacggtttctcccttctcattggtcaaggtgactgtgcgattcgcacaatcaatgacacccttaaacctggtcagccaatccataccaagaatgacatctaggtctttggattcgagaaggatgaggttggccagaaagagtgatctttgaatttctatcgttaccgaggggctgaattgaaccaaagtggagctattccctggggtatgaacccgcattggtgtactaagttcctctcttattaacccatgcatcccgacaaacttctttgaaatgaatgaatgcgttgcaccagaatcaaaaagtactgttgcagggattgagttaacaggaaacgtacccagtacgacctctggtgctacttgtgcctcctccgcagacgcgtggttgacacgagcctggacaaaccttggcccagcacgcctaggcttcgggcatttgttagcgaagtggccaagctcgccacagttgaagcaggaccctggctttgtcccagtctccttcttggcttgcgtggacgaagctgactgtgctggtgccattggtgggcgtggagctgcactgcggttgggctgaccgccatggtggttctggctgccactagcgccctgatggaagttgctggcattgaaagggcggtgctagtggacgatcagggtggtaggtccaccctgctgtccgggagtgaagcgcggtcgctggtggctcccttggttggaccggaactgcgccgccttcctcttcctatccattttgttgcgctgatcctcctgacggattgccttgtcaaccagcctctcgaagtcggcgtagtctccagatatcaactggttggttagctcatcatccagacctgctaggaatttctcctgcttctcggcgtcagtacggacatcctccggtgcatatcgcgcgaggcgattgaactcatggagatactccgtcaccgtcctgttgccctggtggagtgctcggaattctctcttcttttgtgccacgaccccatctggcacctgcgccttcctgaagctgcggcagaactccacccaagtgacttccgtgcctggcggacgtgtggccatgtgattgtcccaccaagctgatgcgggaccctggagctggtgtgtggtgaaggcggccttctcctgatcattgcactgcaggagatttagcttcttctctatggcatggagccagtcatttgcctccatagggttggtggtgctagaaaaggtgggtggtctgacgcgtagaaactccggcagtttggactgagggggagagggaccaaactgctgctgctgctgctcggcttgctgccgcatcctctggtacatctgctggtgctgctgctgcatctgctgcatcatggctgtcatcatctacgtctgatgagccattacttgggcaagggtcggattctcggggagtggtggcggaccattgccggaaacgctgttgggatgcacaccatcagtgcgctcttcgccgttgctgccctcgcctgttgtacggctaccattcctggtgtagaccatctggaggaagagcggacggtggaaaagaagaaaagcagatgctcaagaactaagctttattatataggaatttaaactacaattgttctgatatgaattaaaacacttaaaaagcaagcaaaaatccttattaagacagccatatcataggcacatgatatcgactgtcgactaacccacaagcaagcaacctaaatacgcaaactaacaagcagaagctagacagtcgataaactaatggaaagcgagcctaatgcttggaacggctcctgcggtcggtggagtcgaaggcgtcctcctgctcgtcaccaggtccctctaagcggctcctggagtctggcagatacgtctcgccactgcccggctctgtgccactagaactgctgctgctatggtcgcggctgccactgggagtagcaggcaaccaacccccgttgccactagctgggcccctggctgctgacgctagagcgaaggagagagcgaacgcgggagctgacactggaactggagctggggctagagctggagctgcaggaattgcgggcggaggtgggttcctgggcgcaagctgaatgcacacgggtgcagtcgtcgtcttgcggggcgtggtgcggatccggactcctgctggcgctgggagacccttcaactgagcattctccttcttcaggcgtgctatctcatccttcagagctatgatcctcacgagcttcccatcgttcaaggccttggacgccttgtgtagatccgagtgcatcctgtccatccccctcatcacggcgcacatgtgaccaaaggtggtgtcgttctcgccggctgtcggatggaaagtactgacatcatcaccgctggctcgacgagggtgaaatcggtacgccgtgtcgtggaagatgtagttgtggtgctcctgtagtctggccatcatcaggtatgctacctcctgacaggcgtgatctgctgtgcctccggacgcctcaaccaccatattagcgaggcaggtgcccacaaagccatggacctccaggcggacacggtgaggaagctcgccactgagcggtggaacagtcgtgtactctggcgcgttggggtagcccaccaccagtgtgatgcgagccaattctgccacgaaatcatccatgccttctccgcggtggttgggtgggtggtcggccatctagagaaaacaaaggagtaggatcaatgcatgctcaaacccaattttaaacaaagcaataaaaactcaaataagagaagcgaataagaacgaaattttatgcatggatcattttgcatgagagcgaataaataagacagacttacataacgataaaataatggggaaattagagacatactaataataacaataaaagcataaataccttgcaacccatattcctgagctaggacctaatgcatttcacccatcaaatcccaactgactgtcgaaaatatctcaaataattttactgaaaccctagactaacttgttttgacaaatctcacttaaacgagtgaccaagatttttcccttgaaccacaagaacagaccccaattttcccgaaacaaatccaattgcaaaaaacatatgcaatgaaaaggattcagagggctcttaggtttttccatttggcttgtcctatggtcaaggtcggctctgataccaacttgtcacgcccagaaattcccgaatagaattccaagcagaatgtgcattaaaatccccgtccaggaccggccggggtacacaaacgacaatgttgacatttagatccacgtcttacaaacattatcaaagtcttacataaatgcagcagaaaaacgagagataactggagctaagccttgacttgatctgcagcgggaacaccactccacaggcatcctcgacggcacggacgaagcctactccttggagaaaccaccatctgacacatactcatactctggggttggggaaaatagagcaagactgagtactacccactgtactcagcaagtcataccggaataggggtatgatgcagggaattatcaaggggtagctatattggttcatttgcataaagcaggcatttataaacagaagtttaaagaagtaaacagttgtaataattaatcaatattaatcatccactgtccaacgctatcccacgttgcaacaggcccaaccatccacctaaactatccaatttcattagactacactagggtgaaactaatcacggtgaatctggttgaccgcccataaccgcctgcacggctattcgaatagttttactctgatcagaggtgtacaactgtacccacaagacacagccccacgacacgtttccgtgtgccgacatgccaccacgacatatcggaaagaggccgtgacaggacccttcgcataaccccctctaaccaagcacaccacacctcaggtttcacccccactcctcgcaaggcagcgggcagtcccctctcgtgcctaggtgaatccggaagtgacagaggccgtcgcagggcccgtcccgctccatcacgcccacccttgcctggatgcgtcagctagaggaaagctacactacaagcccagctgttgcccacgctggcttgtggtaagtacgataagttcttccagggcatcccatgaaccggtccttaattgccatgggtgcgactagcaaaaccatgcacccacagcccaccatgtgattcattttaattaatcaacaccaaagcggtggtactaatccaacattaccattagaacctacagtctaaacattaataggatctccctcattgtgtgctagttgaactaagcatggctaagcaattcctagtccaaagtctattcatgttataacccaagctaacaaggagcatggtaccaaaatagcatggctgtaacaataggtgaacatcccatagtaacattataaaacaatgcagtatttgaagaaaaacaatagagcatttgcaatataggatcaacatgttcaagtgacaaacatgacttgccttgctctgctgctggaggaacctcggcaactatctcgaagtacaccggagcgtcagaagaaccggaatctaagcgacatacaaggcaaacaatgcaaacaggctataagactactgaaatagagaacaaaaccatttttaatggattctacacatttttcttgatttactgagacttcaatgggcttaaacggagcacggatgaattagttatgatttttagaagattcactgtgtttattactataaaaaaagtccttaaatcatttattgcgcaataagtcccagggctgacatcatcaagggggggtcggcgccgacaggcgggacccgcatgtcagtggcgcaaggggtggccggtataccgtggaccgggaccacgcgggtggtccaccgccggtccacgggatcgacggcccggatcggcccggggccgatcggacggtgcggcggcggcctggctcggctcggctcggcacaaagctggccggccggccatggcaagggcggcggcgcgcgcgcgtcgaccggcgacggcaagcggcggcgcgggcggcggcagcggacggtgccccagcagcggcgacgaccgaaggcgacggcgaacacgggtggcggcggcgcacggggaaacggggaaggaaaggaaaggggagggagtcctcaccggagggggcggcgatgaccggagacgaggagtgacgtagggaggtcgacaagcgtcggacggggtccgggacgacctaaagaacgaaaaggaaaagattagagagggagagaggggccatagaaggcgggaacgctggccgaaggcggcggacatggcggctctcaccgtcgcacggcgggaatggcgctccggcggcgaacctcgactgaggaggggtggacggggtggatctcggccactcgaacccaacggcggcgacggcgcggtgtggcggcgagcctagcggcggctagaggcggccggagtggcgggaaaggcggcggcgggtggatgcaccgtgcgggagcgatggggagcacgagagagttcagcgagatggagaaaaagagagagggggtggcggtggagcttaaataggggagggggaactcggacgtggccggtaggggcgggattcgccggccgacgtgggggaggtggaggtagagagagaggcgggattcggaattcgaatcccggccatctcgggcgcgggagcgagcgggagagaggggggagtgggtgcaggagacgcggcgcatacacgggcgtggccgacgtggcccggaggaggcgggacgtgggagcggcggcggtttcggcggtggtggcgacgtggggacgggcggccggaggaaggggacgaccccaacaggtggggcccacctgtcgacgtcccggggagagagggaaggcggcttgggccggcccacaaggaggagggcgtgcgcggcggcggctgatggactaggccgacggcccaagaagaggaaaaggagggaaaagaaaaagaaaaggaggaaaagattttccctaggatttaaaattgcatgtgctcaattttaattggttaaaattatttcgagggctctgaaaattccactaaaaatcttgttagcgtatttcgacatgtagaactcaagaaaaattccacatgctaattccgattattatttttattaatttattaaggtttactcttgctttacactggtattttcttgagaccatttaaaactccaatttaggcttgggaaagaacttcggggtgtgacaatcaatgagggtgggcttcgcttctaaggctgcaacgaaacctctactgacaattcccaaatttaatctttcaaattccttgcataactccaacggcaactgtcgtccttctgtagcattacaatagcctttcctgctgagagcatctgctacaacattagcctttcccgggtgataattgtcggctcccaaaactaatgattcggaaaccgacatgtttaactgtttcaagccctggatcagtagattgatacaggttcaacaatctagatcttcatcgcatacatttggtaaagactccaaaggagatatctttatataaaataataggacatttacaagtttgtggctaactattacagcagaagctatatgatgactcaactctgtcgttttactatagaattaaaccatctaactatactactagacttgaagactaggtttaaagggaactaacttatgtgattgaactcccagcttcggcaaaaactccaattaaactctgaaaaagaggggttgaagcaagggtgagtacaacgtactcagcaagctattatattattcaacaatgaatgcatgagaggtaatatctgtgtagagctagatttacttgcagaaggctgagaataaagaggtagaactcctgaaatgtttgatatgcaacagtatttaagaaaatcttgaattatatttctaaccaaagtaccatatgagtcccgatgctcaatccgtaagcacggctattcgaatagattcaaggatattcatactgcagtagatgtacgctttacccgcagtccacgacttgccaataatcattagcttagtcatggcccagtattatgttgttaacaattgtggcacctgttccatgaactctagtccccatgcgctctgaaagtaacgttatcagcagcgagagaagttctggcgttcccagggtttttagagagaactggatgagagaccccacgtcatctcaaccaggttctcataaattcacacacacatcgcgcgataatcaagatatttacctgcgcctcggtaaatatcacatttgcccttcgcggcatatatttgcctccttcgcgaggacttacataagaaccactgtacagaggtaccacattgttaattaacataatatctaggtctgtccccattctagaagctgcggtcgtactcgttcgtttgacataagtacttggtaaacttatatcgaccgagacagtactagccacccggaaatcaaccaaatcttacgtactgtcccaatctaagttcattatgttttatgcagtctaactaggcagggctaagcaaaagctagcatataaccgatttgctatatgtttagattatgcattccaaatcatgaatgactaatgcatagaatagaaatatagaatacaggacatttatgttcaaaggggaggaataataacttgccttgctccaacgcaataaatccaacataggcaacctgattatccgattctcgaaataccataggttgccatccaaaagacaatagactctactgagaaagaggaagaactaatttcaataaaagccataaaataataagaaaacgataaacggttaagagggctagggtttaaggtataacctatctcttttatagggtatagggattatggggctagtatttgctagtggtaggtttaggtggtataatacctagggtttagttgtatgggagtcgtttgtggagtaggatagcatatcggctaggctctatattttatgtggaggctctcgtggtttggacgataggaaatacactagatagttgatatggttaaataggcatgtggctaacatgggtcaaggttggctttgatagaatagtggctaggatttagttgtttatgccgatatcgaggtaggataaatatcggctagggttttaggtgtttgctagtcgtcgctagagttgggcagcatgacgactaggtttggtatcatttctaaccgtgtcgatagacagcatatcggctagaagaataggaggtgggtgcaggtttagtgggacggaagtgttactccgacaaccgtgagtggcagcagagcggctaggatcacacagagctcaagagctaacagtgcggcgtgcaatggaggtcgaggggatagtgaagctccgaccgctgtacgcatcaaggcgtggggtgccaggagcagcacttcgaccttgggtttggttgatgccgggctttacaaccaacgatccgacgttgaggtccgtagactgcgcaaacgtccccatggaaggcgtaaagttccaaccggcggctttttagtggctacagggtattttggaaataaaagaaaatatttgaaaagcaaatataagtttaagttgtaaattcaattataacattaaatcaaatatttattcaaatggtatttgaataaattaagaaaattcaaataaaatcttaaaatagaaaatttgacatcaaaatgaagagtttgaaattagatgaatttaggtccaaatttcactggaatcggatctacggtttaggagacataggcttctaaagattgggatttgaattaaatctagaaaatacgaaaagttactgttgatgggcccacctgtcgatctccttttctttttctctctccttctctcgtcttcttcttcttctcttctctgttccagagagagagccgagagaagagagaggagaaggcgagcggggcggcggcgctccggtggctggagggcggcgacgtcggcgtccacgcgtgttcccgagcaagacacacccggggagggcggtggctggcggagagagtgaaggagttggccggaacggcgcagtcaagagcttgtcttcggcggcaaagagaggtggcggtggtggttgctatggagtgggggggaaggggaaaacgggaaaaatggaatcacctcgtcgaggcgaactcgatggcgcgatggtttggcttgcgaagctccggtgagggagatcgggtggtggcgaccatggccggacatgggagagaaagagagagagatggagctctgattgtatgtagagaaggggagggatggccagctatttataggggagagaggcggtggtgaaaggcggttgtggaggaggagatcgagaagtgcacgggcgacgatggcgtgaagattcgaactacggcggccggcttcgtttccttagcggcgaaggaagaggagttggcggcggcgtgagccgtgcacgacacgcgcacgggaggagggggcggctcggttggggtgtgggctggtttgggccggctcggcttagctgggccggcagcccaagaaggaggaggaaaatagaagataaaagaaaaggaatttggccaaaaaggaagaaagaatggagtttcggcccgatgacaaaaagaaagaagtctaatttgaatacctgatttggataactaggttttgcaaagaatttgaatttggaaagaattcacaaaagagatttcctaatttatttgagtgcaatatttagaggtggagtttgagggaatttatttggaagcactcaaataggaagggaagttaataatattcctcaaaatatttttgggaatattgaagggaattagttgaaggcaataaataggatttgaattctaaaattggtgtgatgtgtatttgtggctaaaagagaaagttgaatgaagagtataagttggaattttcttagcacaagagcaattattcacaatatttgcaataatactattcttgtgccgaagaggaaatcaagccacataaattaaattggtggctagatcaaaaggaggaatttggatatttggatcgagaatcaaaggatgggtttaggatcaaaggatgggctaacaattaattccaatgagattggaattactttggtctaggttcaaggacaaaaattggaggatttcttggaccataatttgcaatagtaaaaatggttttcaaactaaatttgaataaaagagttttagtcgaaagaaggtttaatattcgaaaatagaattccaacaagaaataccaaatatgtttttaaatgaaaaacacaaaagggattaaataccagagaggttttatgcgagttaattttaggaagtcccgctaagtatattttcctaggtttaaaaggttattaagaacataagaatcagcatgatgcaagattagaaaatgacacattttcaggatgttacaataatgaattcccatatcataatccttaatcaattccaaccatctccgctgtctcatgttcagatccggctgggtgaaaatatacttcaaacttttgtgatccgtatacacctccgtacgagtaccaaaaagatagtgacgccaaatcttcaacgcatgaaccactgcggctaactcaagatcatgagtagggtagttcttctcatgcgggcgtaactgacgagatgcataggcaaccaccttcccatcttgcatcagaacacaacctaacccaagcttggatgcatcgcaatacacttggaaacccttctttggatcaggcaaaatcaaaatgggtgctgatattaggcgacttttcaactcttgaaaacactgctcgcactcttctgaccacttgtacttcacatctttctgaagcagtcgtgtcatgggcttggcaatcttggaaaaattctctatgaacctccagtaataacctgcgagacccagaaaactacgaatctctgaaactgtcttcggttgtttctagttggttacggattccacattactaggatcaacggcaactcccccggctgagatgacgtgatcaaggaacttcacttcagacaaccagaattcacatttgctaaacttggcatacaactgatgttctcgcagcttctctagtgcaagacgaagatgttcttcatgctcttctttggttcgggagtaaatgagaatgtcatcaataaagactaccacgaacttgtctaggtattccataaacaccttgttcatcaagttcatgaagaaagcgggggcattggtaagtccaaaagacataacagtacattcaaacaacccatacgtagtggtaaaagctatcttaggtatgtcttcctctttaatcctcaactgatgataccctgatcgaagatctatcttggagaaaacggtggcacctttaagctgatcaaacaaatcatcaattctgggcagcgggtacttattcttgatagtcacatcatttagttcacgatagtccacacacatcctctgggtatgatctttcttttccacaaagatcactggagctccccacggagacgaactcggtctgatatatcctttctgaagcaaatcatctactttcctcttgacttctgctaattcattggctgccattctataaggtctcttatggatcggagttgttcctggtaccagatctattctgaattctatatctctcttgggcggcataccaggtaaatcatccgggaacacatccgggtactcctgtactataggaatctcttccaaagttatttggttcagacttgaccttaaaggctcagaaggcaatgcatgaacagttacaacttgaccatcattgctggtgagagttacttttctattggcacagtctatcacacctttatatttggctaaccagtccatccctaggatgacatcaaggtctttggattctaacagaataaggttggccaaaaatggtactccttgaatctctattctgacagaggggctacgttgtgatgagagtgcttggttactcggtgtactaaccatcaaaggacgtctaagatcttctacttccatctcatgatttcccgcaaaactcaaagataaaaaggaatgcgtagcaccagaatcgaaaagcactgttgcaggaactgagttaacagggaacgtacccaaaatcacatctggagcaccttgggcttctgcggcagcaacatggttgacacgagcctttgtcgctggtgcggaggggttgttctgagcagggacaaccttcgcgcggtggggcttcggacacttgtcagcataatgtcctgggtctccacagttgaagcacaccccgggcttactgccttgctccctcttggcaggctgatgctgtgtcggagctgcaacagggcgtggagcttggttgcggttgttgttgccagcattgttgttgaagaactgacgctgcggacgaacaacagacgaagaacctccctgtggcactgactaaggtcccatagcaagacgcggcctctgactattcccctgctgagccttgaagtgagcaatccggcgtttcttctgctccatgcggttgtacttgtcctcctggcgaatagccttatccaccaacttctggaaatcatgataatccccagtcatgagtgggttagaaagctcatcattcagcccttctaagaacttctcttggcgctcttcatcaatgcgcacatcttccggagcataacgagccagacgattaaattcatgcagatatttagtgacagagcgagatccctgagtgagcgccctgaactccttcttcttgagagacactactcccgagggtatatgcgtcttacgaaaagcagcagtgaactcaagccaagtgattggttcagctgtagtcctgttgagacggaagtgatcccaccattcagaggcagggccatgaagccgatgtgaagcaaaagagactttctcttgatcagtgcactgaagtaggtccaacttcttctctatggcgtgcagccaatcaccagcttcaataggattggtggtgctagataaagtaggcggcctcacgcgaagaaattctaccagcttattcgggggaggtgcatggttgtttccctggttctgctggttctggagttgctgcatcatcagattcttaagctgtgcctgttgggccaggacttgagcaagcgtgggattctctgcattgttgttgtttttgttggggttggggccattcccgttgctgcgagtaagcaccatctggcatagataggagcacaagaagagaaacaggggaaaaactacttaggacagggaatttactagtttaacttttattgatcttaactgagtttcattattacaaaactgaagactctcacaccattaaactcaccagctccctaacacacgaaagcaaacaaacgcatgcatttacatcccaccaatgattaaatcacatgcaagacccacacacacaaccaaacttaaacaaacaaactaacacaacgatctaaggcaacgacttgacaaggcgttctaggtcttccgggcatcagagttgattgaaggctcgttcgcacatccccatcatcttgagtagctccccactcgaccttggaatgggtgcgcttggattcttcttcatcatcatcactcacgttgacgaccggaggatccactggggctggggtagcttctttttccaccacacgaacctttggcgccaactggtagcgagggacgaatagagctctcttccttgctgtaagacgaaccctggccttctgcggtggtgcttctcccttcaatgctgctagctccttctccaaacgatccaccttgtcctccagcttgcaaatcttcccgcgattccggtcttcacaatcttgagctgctatcacaatctcagcacgggtttcatccatggcccacagcatctcaaccaaatgccttgtggtagcatcattctcaatctctgcaggttcaaggtagctgccacggtcacttccctggggttgacgaggatggtagcgatactcggtgtcagccaaccgatcgttgtagctttcgtggagctctcctatggcgatccttgccacctcctgacaagcatgaatgtagcttccccctccagcctcgaacatcaccgaagggatatcttcacgattactgttcaaagtgactttgacacggcacttctcttcatcacaatcatgaggaatctgggcatacaaaggggcagtcccaaatcctatgaggaaagacatcgtacgcaactcctggacaaatcctggacaaatccttcagtaccaaacaagtactcaggcttgtagcacggcatctaaagacagtgaagggagggagttaagacatttatccaattaatagcacaagtttttggattaatttgaataaagttagaaaatcaaagtaataggtaaataaataaagtaaaccaatcttgcaagataagttgaaacagttagaaacaggatcacaaactttgcacttttgaataacagatatcaaaagaaataaaataaaagagagttataaaatcaatatgctaagcttagtttattgcagcaaaattaaataaaacaatgttataaaacttttgctggtaaatggccattagtacagtaatagatgtacagtactaacaacaccggaataataaataaattttgaatgagaacaattaaaggaattataaactgcatgtgccattagtttggtttaaataaaagagaaagagaggagaacaattctacttttcaacatttttagagggcttctataggtaaccatttggcataacctagggtcaaggaggctctgataccaacttgtcacgcccagaatttctatccaaaattccaaacgcttacatgtgtgtaaaccctcgtccaggaatcagccgaggcacacaataacaaattgataatagagtacaattattactctaattaataagcgaataaaatgtcattacagaggtagatagttcctctcaatcaataaagttctaagcagcggaaaataaaagaaacagcgcaagcgactcctctccacaggcagcttgaccaggactaggcctaatcctccacaccatcagtatcactgtagaactcctcctctgatgaatgattgcaaggtgagtatatgacatactcagcaagccacgcagcaaatatgcaagtgcacaggataacaaaggatggcatagtatagtctcatttgcataaatagcatttaacaaatatttcagaatttaataaaacagttaaataataattaaacaatattaatccaacgctatacaacataccctgttgcataggcccaaccattctgaacaaccaatcccggctgcacagttctatctccaaaccaggaattaaccattctaaaccaggagctaaacaagttattaacatcataaattaatatggtgagaaatgtgagactaattacgaaagacattgttagacacgcccataaccgcgggcacggctattcgaatagtttaaactccggccagaggtgtaccactgtacccacaagacacaacctcaacatcatgtcaaccatgtgtcgcgatacttgacaagtacccaaatagagattgtgacaataccctctatataatacaattcaaagcagtgcaccgttcccggatcataatcacccccttataaacaaggtatggactccccagcgacccccgtgggcttatctctgccacttcacagtctggtgctctactatgaaccatgctatacataaagtaaagccgttgcccacgccggcttgtggttggcacggtaaatgtttcacaaccgaaaatcgtgaaccggtccttaattgtcatgagcacaaccatcaaaatcatatgctcacaacccaccattatcaatttttagttggcaaattaattaattaaccaatcatgattaaccatcatgagctaccattaagccatcattaaataatagtgaagcataagttatcccagtagtgtgctaatgtttctaagcataagttatctaatatccagctgaacccatatatataaagctcaactagtcaagttataataacccaaggtatcaaagaatagggtaatcaagaaataacaaagcaataggttatttccacccaatgacattcaaaaataaatgcaattgttgaatagaaacaatagctttaaacgagatcaacatgctcaaaggattgtttgggatctgtgtgacttgccttgctggccttggaactcttcaaagtcttctcctgcaaattcggactctccgggaacgtcggaatctaaagagaaaagaacaaaatcaccaaaacagcacataaacaagcatgaacagtacatgtggatatttttaacatgtagatctcaattttagaaaaatttagagacttgaaccaactaaatccgagctaagatgaattagttatgaattttcaaagattaaatcggattaaaacatttatatagattttaattgaattatgacacaataatgaattatttttgaaaaggaaaaaggggattattgcgtcagcgggtcggctcacggtggaccgggtgcatggcggcggttcacggaaacaaacggccgtgatcgatctatccaaaacggatggccaagatctaacggtctacgaccgatctacgacggacggcgtcgatgacgtcagcgatgacgtcatcaccgacggcggctcggcctcgcatgctcgccggcgaacgacggcgcggcggcgcgaacgaaggacacctacgggttgcgggcgacgtggaaaactcaccggtgaccaaaacagcggcggaaggtcaacggacggcgacggcgacgaggaagaagcggcggcgaccttcagcttgacgacgacggcggggctccggcgatctacagcgacgacggaggggtggacgaggtcggcgacgacttgacgatcacgacggcggctttcccgagcgacgacgacgaccagagcgacggtggcacacggctggacgaacggcggtgacggcggcactaggctacacggcgctagagcagagctattgatgtctccctgtacatgcatcagattgccacctcggaatatgcatggcaagtgcatgcatgtatccttgccgtgcttccaatacaatgtgccagcaactcctctgttctctatccgttgcattgctcattggtgtagcttgtgtgcatatgacgtgcactttgtgtacgccgtccgtgcctctcttacgcatcgcagtccgcagccctcgtggtcaccgtccacgaccccatcgtcccggccctgcatgtccgccgcgccatgccgcgctcgctgacttcacccttccatcactggcctccctgccgtcgctgatgaaccctgagttccactcgacactcaaggctgttgttggcccgatctttcggtgagttgagataactacgatttgggagacacgttgacgacccgactacaaccgtacgagacgttgtgttgcgccttagcgatcgatacacctctccgtgggttgttgatcttgccggtgcagatcaaccctattcctgcaagcaaatcgaagaaacaagcaagaacaagataaaagcaatctgatattgcaaataggaatttaatacaaatgataagttggggttccgaagaacaagcagacggacggtctagccgacacgtgcgctgcaagcaagtagcaatagctaaactttaatctatcaaaacccaagaa

SEQ ID NO: 6035 - DNA, 3119 bp, Oryza sativa
aggatttcgaggatcaagctccagatctcgagcaaggcaagccacctttgaacatcttgagcctatatttgaaatttaattatgttgcttgaaaaatattatgcattgataggatcgcacttaatctgttgtcccgtctgcaaggcagatcggcggacctacctaatttgttgcatttgatccttcctttgctaattgatataccatgtccccttgtaaccatctagttgcgtcccgatattcgtgcaccctgtgcgagtatcgacggacgccttcaaacttaaaattctgagtaacttcttgggtaaaacttgggttttacaaaagacttggaaaacccgacacctgggtcggtgcttgcgaactaaatgaatttccaaaaccgcggaccggggaacgtaccgggtgtacggttttccgctcttgcacttaaggaccgtttccttggaatttcatccaaacataagacaagtacgaccacatgggtggaataggacacccctggctgagtaactagcttatcaggggagccttgatgccgagagacatgtggattcgccggggtggtgtcggggaggacccctgggcttcctggcacagtatggtctgggacctaacctgttgttggtctgggacccctctcgtcggcatatggtaaacctgtgtcggctttggaaatgccttgtcatgaaagcttggaggtctcccgacgtggctgatccccacgggttgggtgatccgggttagtaatgtcgtgtgggtaaagtgtaccccctctgcagaggttaacaaactgttcgaacagccgtgcccacggtcatgggcggatgtgaggtgattcctagcgtagttttgcttgactactgcttgtgaaattgctgttgtggaaaggggttcgatgattgaaaaatctgtagctgatggaatcagctaggcccgggtggccgtttgaaagttgttggcccgggtggccgtttgaaaagctgttggccgggtgccaaccttgattcaaatctaaagactgatacattgcacatactccgaccggacgagacgcactgtctcatccgtgtcatttgagaagcgctcacttagttgatttcagaaaagagttcaaatgaaatcaattgcaaaaacaacagcctttccttgaagcctgcaataaacacctatttcccatggcatgctgagtactcctgtactcacccttgctctatataaataattccccccccagttgctgaagaagatgaagcggatcccgctgacgaggagttcttccaggagcaagccggctacgatgagttttagggtttcggcctagttcccaagtcgcgcctgtgttgtttggtccaagtcctggcttccgtttcccttttgtaatgcagttgtgagctcgggatctgtccgcagcccaacatgactgtacctctactctataataaagagacctctgttgctgtgataatctgtcttcctatgataccagcactgtttcctgggtctggtatcaatttacaggttaatttggagcgtcacgggctagttccggtcggtactagttcggggcgtgacaagagatggtattagagcacaggcttggccctagggcgaaacccgacgtttaggacgaccctaaggatactaagttcaaaactacttgcgaaaagctaaggtttcttttgttttctttatttccaatagtttgtttctaaaatggttactaatattttctccctctttcaaaattgtagatggcagtgaacgcaagcgtcagctcccacggttttggtgagggtcaccacgtcgctcagcttcgtgacctcgcccgtttccttggcttctcgtgtcccgagtacacggggtactccgtggaccgtgttccccctcgctgtgagctctctgtgtacctttacccccgtggaggtatacacggagctggccttcgcccacaccacttcactgtggccaggcccactctccagatcgcgtaccaggacctctcctggactgcgcttcgtcgcctggcccacgactacagccaccgtctcgggggctccgccttccggcagcttccacgccttccttctggccacgcagacgccaggtacccttgtccgtacagcgagtctcagccagtgctgactcgcatggttgagctttcggaggctcaggccactcagcacgacctactccttgaggcttaccgctcccttgcccgccgctacgccgctctggaggcccatatggccgaggagggtgtcacctcagttgacactgtctcttgggactcaggccgcctctgtcacgccagccacctgtcctcccacagctcccgcggctctgcccgcactcccagtggcccgcgctcccctagctcgcgtgcgccgtactcaccagtgtactccccctacccacacccagttagcccctcctacacccccggacacaccccagttgcttcctcccgccgtggcccacgctttatccgcaccgcgcggaagcgtgttgttggttcttccaccgtgttccgtttccactacccagctcccccaccgccagcggcctgtgctgctgccggccctcgacaggttccgccggtcccttcgcgtcagccgatcgacgtttcttcgactgaggagccgactacaggaggcagccaggctgacgaggagtagaggaggcagtcttcaacagccgtccgtgtgttaggcccttttgttccgccgccaactcttttggagtcgtggcgaggtagtgcgtgcgtgtgtttgttgtgggtgttgtttggtagtctggttctcctaggtggtgtgcgcacagtcaagctcggcgtagctctgtgacttgtccacacccgttgtatcaggtgtttttatgatttgaaaaatccagtttatgcctagtgtgtgctgtctgaggtgctatttactttgctccttgccctcctaagtgcttacctgattcttacctcgccctcttctgggagtttagatggctagccccccccccccccccccccgtgcagcccgtgcgccagcccgcttcggttttgaagaaggtagagttgtgacagaagcaaatcatgagtcagctaatgagcagtctcaccacagcaa

SEQ ID NO: 6036 - DNA, 5205 bp, Oryza sativa
aaaaagaaaagaaaaagaaaagaaggaaaaagaaaacagaaaagagaagagagaaaaaaaaagaaagaaaagaaaagagaaaagagaggagagattagagtgggccccacgtgattagagagtagtaatccccttcttaatcttcattagttgagtattacatgtgggtccgggtggttagaaatctaattaagggaggttctgtagtctcgggtctatgacaagcgggccctaccgggtttaatggccggtttgaccctagtcaaaggagtcgggcccacctgtcatttgcccatatggaattcctttagaaagaaaagtaaaataaaagaaaagaaaataggaagaccccacctgtcagtcactatagcttgtggataaggttgtattataaataaatgaattaggaacagtaccatttcgcaattattagaattaattcaaattggaatctttacactagcataacttattcattttagctccgatttgagtgaaacttgaacctaaattaatctaaattcataagctttccaatggtatataattcactatttgataaaatatatttataattattaaataattaatatcaagatgatgcataatagttaacttaaaaatgtgctaataaataaaattgatattgtactgtaaagtagatgtgagaatatttgtctctagcatgtcttgacattgtagcaaacatgtaaattaattataattaatgtttcaaattaataggagcataggaaatattagtgccattaactaatagatgtccatatataattatacccataacgtccaaactatatataaataatgtttagcctcatattttgtgactaaaacatgaacacacgttgatgagtctttaacttgtttatgagaaataatagcagagcttgtatgattaaatcaccaatatgaaattaattaacgacatctcctatacagtagtatatgttttgggatggaaatcgacccttaagttgtataggcagtaactcactcataaatccacttaaaatcacatgtactatatagcttaaagtaaatagcagctgtttaaataaatgattcaatattaagatattgtgcactcacatatactgtacagtccattatagctatacgttgtagtattaaatcgcttgattgcatatattaaaattaaagaggatatatgacaaacatgtatggtggataaatactaattataaaccttgacctaatataacccaagttcaattgtagattaggattattcattgtaaaattatgtgatgggataatctgtaaccataatatgattaacctaaacaactctaacatacaaagcatggataaatattaaccttttataatttattgtgacaagtaaaataggttcataattaaagtaaagcctccatcaagtaaataataatacaaatgattcactgtaattatttgattgatcctaaatccattcgacaacagaacctctagtatatgaccattttgtttagataaatgcatgtgtagccataatccttccatagccatttgatagactaaaccaccgattagccaaatatatatgtatcccataaatgctatgttggttaactcctaaatagaccacgatgacaatagaaagattaagaaatcttagcccttagcatgattggaatccattagcaaacacgaatagtacattttgttgtgcatatttgattgttgtttgaatattggtttttctcgcgtattatagaccttgtgtatcggttagtcgtgaggcaacgtctgcaacttctaggaggtgaaggttgatcaagattatatcaataataagaattatcctgagcaggcaagtcatcactattctttgaacatgttgatcccaattgcgaaattattttgtttacaaataaaattgcatgcaatgatgaacatcctacttgtgattatgccatgccttgattattgtttaccccttatgccttcgtaaccatgtttacgtatgagtccctagtcaattatgacaattgcttagaaatgttattctagaatcatgcatactcatatttatcaaatgctatatgcttgggcaattacctttgggaaggtaattgagatgcggcatgtggagacatgagcgccacattgccatgatattgatgacatgatttgtgaaaggaaaataaagtaaaacaactgttttcgactggggcggctttgaggatttgggtggtgtccggaaaaggctagtgccgtccctggtcaattaaggaccgagccatgaagttaagcatgaaacgacccccgtacaaccgcacttctcgtatgggtatagacctagcggagtagatagctgagcggaggcagtatccatgcatagtggttttctttaggtgtgtgatgcggcaagcagtctgctggcggatgcccggttcgggtggccaggtagatggcggacgccgttccggatggtcagaggctggcttggcaatactacatgaggacacccataagagaacaatcatgatggactgggttcaacgacaagaagcaatgtaggaatgtgtgtgtttttcccttcccgggtgcgccagaactcctctcactgctagaaactgtgtacgcctagagtgcatgaggatgaaaagttcatggagcgggtactgccaatgcgaggttatcgaaaagctttgccgtgacgcgtctcatgtgttgggacgaggctcatgtgttgggcagtgtggagtgcgggtaaagtgtacatccactgcagtgtgagtaaaacaaatctattcgaatagccgtgctcgcggttattgagcaccgggacatgtattacacttggctagactctaaattcttaacttgtgtgggatgggatattgcatgatggattttatgctgatggagccacttcctgagaggagggaaggtggacgttctcagaaaaccatgacgactcaatggcgggaagctatccttgggattacaatggatggtggacagaaccgtcgttgtttaatgtgaacactggtattaaaacttgatcagtccatgctaggtcttaggcttgtgaaaagaattgcaaaactagctttatgcaaaaaaacctgaagccattccttgaaatacctcatatcatacgcattgttgttgtggtggcttgctgagtacggttggtactcacccttgctatttatatatcttttaggagagtgttgaagagaagcccttgtcggtacgcttgcgtatccaacaagatgatcagagtgcggtcttgttctaggtctcattccccagtcgactgcctgtggcatgttaaccgggcctttatattattttgtcttccgctgttgatctctgatagttgttggcctacctggccctaatgtaagtatttaactcttttagcctgaattcattcgtgatatgttgtgatccaactatgtatatgtgtaccaactactgatccagggattggtacggataaacacagaagatttccgatttccaaaattgggggtctacacctatcctacgacttatggaatatacagatacggtataccttcgcgcatacggttcgtttttgtacgcgttaaggaaatttatctctaattatggaaaatatctccacgagtcaagtgatttccaaagtcctactcggaggggataagatttctgttatatcgtaccagatccgatgtctccaggtttgacttggagatcaagatgatccacgctataaaagggatccctaggcgggggtggaggagatcgaccaaaaccgccaacacacccaccatagtttacgaagccggagtactcggagccaagtcgccgtgagatctcgtcgatcctcatcgattacgatctcgtcggaatcgtcagtttcgtctacttctttgtaatctgtggtattctcatataatcccatactaattggactagggctattacccatcgaggtgcctgaaccaatataatctttgtttcttttgcttgttcgatgtcgtacaacgcagatccctgttccaacgtaacccaatacccaaatcatccggtccgcgagtatcactcgtcgacaattatttttaatgttgtgtttcttttttcacacgcgataagaatttgttttttacttttttggtcgccgggccgaacccaccatgtatctgtctcccgatgcgttccctcctccaattgattgtaaaaattgattcctcactactccctcattatttttttcatgatttttccttttaattctgcttaatttatgtctggtcccaaaactaatgattcggtaaccgacatattaaaactgtatcaagccctggatcagtagattgatacaggttcaacaatctggatcttcattgcatatatttgatcaatgctccaaagaagatttctttacataaagtaatagggtatttacaagattgtggctaactattacagtagaagctataggatgagccaactctaatgttttgctatagacttaaaccatctatctaatctatacttgaaaactaggtttaaagggaactaacttatgtgattgaactcccggcttcgataagaactccaaaatgactctgaaaaaggtggggtaaagcaagggtgagtacaacgtactcagcaagctattatattaatcaacaatgaatgcatggaatggtaatatctgtgtagagctaggtttacttgcagaaagcaaagaatatagaggaagaaagcctgtaatgttttaaatgcaacaatatttaataaagtttggacttatgtttctaaccaaataccatatgagtgccaatgctcaaatccgtgagcacggctattcgaatagattcatttatactttactgtagtaaatgtacgctttacccacggcccacgacttgtcgataatcatcagctttagtcatagcccagcattaggttactaacaatagtggcacctgttccatgaactctagtccccatatgctctgaacgtaacgttatcagcagcgataggagttctggcgttcccggggtatttagagaggactgattgtatgacaccatgtcatcgcaattagggtttacaaacaagtcatatgacatcataatttatctcaaacaaatatttacttgcgcctcggtaaatatcacaattgccctgctcggcataagttttcctcctgcgcg

SEQ ID NO: 6037 - DNA, 2281 bp, Oryza sativa
ccagatgtatcataaatattggctcgaggatatattccacatcgtacctcgaaatactaaacatttcaaggtatcgaggatcatatgatattaaaatgtatcacagagatctcattatgatattgcactagtatcgattaatcgttttagcacaaacgtttagcctataatcgtcaaaccaaagcacacggcccaaaacttagatatatgctttgtgtttcacgatcacatcatatcagagacgtgtatttactgaaaatttgagagagagaaaaagtcaaaagaagataaactagtccaaataaattatccaacctacctcctcgtgactcgtgagcacacctgatcatgtacacaagcccaaccaacacactaggtacaatcacggctagtaaagacatgtatgcatgcattgttgcgctaggtgacaggtgactgtcaagaaaaggcactactctgatgtaggcctcgcagaggtgagcaaagatggtaaggaaggcgaaggagttggggttgaggtgcaagagagaaaggccgtaaaagttcaggatcaacaggaggaactctgaaggaggagggagaaaaccgcagcagacaaaatcctctaccgctaccatgcaccctagaatgggggaaggatccatacctcctgcttcccaggccatggtctgcttcggagggatagccccctccgtgtacagcttcttcagggcggcagcgtcggtggtggattcgttgaggtccgccatcggttggggatcgccggaagaaggttggggattctgggatgtgaaaggtgcaaggaagccaaggaacagtgagggttctgggcaaacggacttaaaatgaatcccagaattcctttaaataggcacactatctgacggttcgtattttgaggaaggagagagattgccgccgaaaattttggagacccgttgcgggtggctgtttgacttcgatttaaattcatatcttaaccgttgaacttccttcagcgttgtcgacaacctcatgtctctacggttttacatcgggatcgatcaaatgggtacgacaagacgctatcaggtgaagtcgcggacgacaacatgaattcatttaagttgaagccgggggttactgtcaaggttacggataaggcatgcctcctattgtaacgtcctgaaaattcctaacaataaaaatcactaaaattttgaatttttttaaaacttttgcatcatgctggttgttatgattgctattgcttgccaaaccgtaaaatatcacaaagaaagtaaagaaaagatctaaatttaagcaatagatataatttacgagaatatgttatttattaataaccctacaaatattagtgcacaagaaagcaagccaaaccaagtataagtcaaatattaatttctattataaatcacagatcaaatattaaatattcgaaccatgattgatagcttgatgtcacaattagctaaagaaatagtaagattaaatccaattcatttgaatccaatctcacatgaaatataagaacacatgaaatgatgatcaccacccactataatgatcgtgtttataaataagtaattcaccggaatatatagattgatacttacaacatttcgccgagctcctcataacatgaaaatcactcatataaaataatggtcatataaataaaataagctttatatataaataagattatgtgagttttaattaaacaattagattaataatgtaccgagtctcaatttactatttatagaataaatggattaaacctatttgtgtaaaatgtattgctatacaaataaactcgaccaatctaccattgtattattaaggacacaacgttatattaaatagaatattacccccaaaatcttcaaaaatatataagttcactttagggccaataatataaaaagaaattatttgtgagatatataaataaaatatgggtaatattaatcttgggtgaatccattggttggaataacataaatattgagtaaacctcatttatgcaaaaattaggatttatagaatagaatttatatggaaaataggctaaaattgggataaataggaaaatacactgctcattgcactctaggtgctcgacgaggtccctagccctacccccttctctgccgtgccccctcgcgtcccctgccccgcgcgcacgccgccccgagccccgtgccgccgatgctgcgccgtgccgtcagccgcctgccgcagctgccacgccgacgctgcctcgagccccgtgccg

SEQ ID NO: 6038 - DNA, 10008 bp, Oryza sativa
cactagcgtcgactatgtcttgatgatctgcatacaaaacaaatgatcggaccctaggtacaagagcgaccatactattagtgtctgcatcacacttaaccctcctcaacccatcatttaattgtttgccaggaagcaaccagtaaattttggtgttatcagatttctcatatcctagttcttcaatgaaatcatcaacccacaacagtgaccaagaatctgactcacaatggtcaaaccagcttactctaccatcaacataagcccggtttacactatctcctgatttatctccttttgttgctaactcaattggcagtaggctatcgtgaaactgatctctagcatgggcatcatcgtgggctacaacacaaaagaagattcggaggaatcggaagatgtatgaggggttatttacaaatatgtgtagccaactcacgcccccataacgtgtgtatgcgccaatgtggcatcctaatcacgagccaactcaataagattggtgatgaagtcatgtcttggccttggttcgcacgcactacgcaagtttgtgtaccgaaacgagagtttttcaagtttttacactaaattgcacccaccttacaagtttgtgtaccgcgggcgcaatttactcaaatattaactaaagtccctttttctaatcatggctttcatgagccttaaacccaagtttttacagacaagtgacaggtcgatgaatcaggtcactgtaagagcctgtcaatacattgtgcagagcgtgcagcatcagtgcaccttcagccgtggcttatttctatgggacactatgtcaaaattttgtcgaaatgctgtcgtaattttattcaaattttggtcaaattttgtatctgcctagtatttgtgatttttatttgttaaaatataaaaacatcacaagagatgctcacatttgaattatttataacactcacaaagctgaaaaaatgggggcaaaatcacacaaagctgaaaaaatgagggcaaaactacaataaccaacaagggtatatatgtcattttctctataactaacaccgttagttgtggctgttacaaatgggggtccatggctgcttcaaattcaaaaagtggggtaaaacaaagtgggggtatggatgcaattgccccgaaaatttaacacgaggtagaacgtcatgaaaaaaaatcctttggatctttatatctccttgaatttctgcgtttttcccatggcttaatcaaacggtcattcatatgtttttcttatgtttttcttgtattttgcaattctttattttacacttgcattcctatcataatcatatgttttttctaattgtccgtttttgttcatctatgtgattcaaggaggcccttaaattaatccaacaagcagtatgctactccctccatttctaaatattcgacgttgttgacttttttaaatatgtttgaccgttggtcttattcaaaaattttaagtaattattaattcttttcctatcatttgattcatggttaaatatatttatatgtatacatatagttttatatatttcgcaaaagttattgaataagacgaacggtaaaatatgtgctaaaaagtcaacggtgccaaatatttaaaaacggagagactagtatcggctgtgtttagttccaaccaaagtttggaatttggttgaaattgaagacgatgtgactgaaaagttatgtgtgtatgaaaggtttgatgtgatagaaagttagaagtttggaaaaaaactttggaactaaacacacccatggatcaggatcagtatagagacagatacatgcaatcgatccaacactcccctgtacgaggacaaagcttaggtgcaacaggttacttcccgcggtggccaaattcacacgagcagacagaaaaaccgccacgtacgcttgccaagtcacgggacgatgcttacctccacgctcatcgtcacccaccgtgaatgccttgctgctcgatctctgcacctgcgtttgctgccgccgacaagcaagccacggccacgagcagccatggattcctcctcgatcgcatcggtgaccatgtcctcacgccattgcaagcactctgcactgcaacaacctataaagactcagccgccattgacgccaccgttgcaatctccatgaccagcagcagatcaagaaaatggcggcggcgacggcgagagcgagacggcctcatgtcctctgctttctcctcctcgtgatggtcatgccatgcgcgatctcggccgctgatctggcgtcggacggccgtgggaggttgtatcaggtggccatggaccaggccgcgcgcgccctcgccgaggcccgggcggcgcgccgggacgacccgcgcgacggcgtggcgcggcggggcgccgcccaggcttgggccgactgcgaccagctcgtggcgttcgccgtcgggcacctgaaccggacggtcgccgcggcggcgaggggggttgacggcgacgacgtggcggcgtggctcagcgccgcgcgcacaaccgtgggcacgtgcctcgacgggttcggcgagctcggcgcgtcccccgggccggagttcgccgccgcgctggcgaacgtgtcgaggctggtgaccgacgcgctcgcggccaccgcgctccggcgcgggacggagaatggcgcgcgcgctgcaacaaactcaggcgatggcgacggccggatgctcccgctcgacatggcgaggccgggagacgccgacgtggtcgtggcgaaggacgggacgggccatttctgcaccgtcggcgaggctctcaaggcggcggcgaggcgggcgacgaacggtggcgggaggaccgtggtgtacgtcaaggcgggcgtgtacaacgagaacgtcgaggtgtggaccaccaacttgatgctcgtcggcgacggcattggccggacggtgatcaccggaagccgcagcgtccggggaggctacaccaccttcagctccgccacattcggtacgccacgttcatctctctctctccttgcgagctgtgagtgtgagtgtgtgacactgacatggatggatgtccatgaagccgtgaacgccgacggcttcgtggcgtgcggcgtcacgttcaggaacgcggcgggcgccgggtccgggcaggcggtggcgctccgcgccagcggcgaccgcgtcgcgttctaccggtgcagtttcgagggacaccaggacacgctgtacgcgcacacgctccgccagttctaccgcgagtgcgccgtcgccggcaccgtcgacttcgtgttcggcaacgcggcggcggtgctccagcgctgcagcatccgcgtccgccgcccgccgctcccggggcagcccgccgtggtcaccgcgcagggccgcgtcgaccggtacgagcgcaccgggttcgccatccacggcggccgcgtcaccgccgcggccaggttcggcgcccccggcgcggcggcgtcggcgccgttcgaggcgtacctggggcggccatggaaggagttctcccgggtggtgtacatggaggcgtacatggacgccacggtgggcgcggcggggtggctggcgtgggacggcacggcgttcgcgcagagcacggcgttctacggcgagtaccggaactccggccccgggtccggcacggaggggagggtgaggtggggtgggtaccatgtcatcaccgatcccggcgtcgcggcggagttcaccgccggcgagatggtgaacgccggcgagtggctgggctccaccggtgtccctttcactcctggactctagctctgtatgtatattggcattttgtgctagggactggtgattttgtgtatacagggactagattgaggtccccatcatttgtaaaatcagccgcggataaaatttaaattttaaatttaaagttgattttttatagaagtttattttccagcattgacttttaaatcactaataactaataacgtatatataaaagtttaatttataagttatactgttatttactaatataccgtatactatgtattatcccatttatccgtatatgtccaactgatgaggaactaaaactactgacggtatcctatcttattataaagttataacccactaactctaacactcaacatgcaaatatgccatctcatcatccactaacaataattacatgcaaaactaatacaaacatgcaacatcatctataattcattgaatttacaagtcaacatctaatcatcctccttcacattatttttcagaatatttttaacatgtatatatccaacatttttataatccttaacatatattcatgcatataatcaaagtgcgggatatcatgtatatttcatttacaatctcatacagagtctattaaatgtatttatcttagaacatagtttgacaaactatttttatttgttgttagtaactaatataatttttatttttatctcgattattaaaaaaatttaaaagtcacttaggaatttccgtagaaaagcgcggggaatcacctagttatctcatagctgttccaaagattgaaagtatattgtaagatacacgacgctagcaaaaatagcggcccagaacatggaccggcttgtaaacatactggaccaatatgcaaaggaaaaagttcacctgccatcccttacaccgagtttgttagacatcccttatcctcaatatcagaaaccggcgatggtcggcgctgctccaggtattatccgggacacgatggagcgacatggacggtggcggcggccggagatggcgccgctgcaaacccacgccgccgacacgagccacagcgacagcgacaggagaagaagaacggcgtgccggcgctggggcaggaggagcaggaggcgtgcacaccgcgtgtgccaactccctcttcgctgcaggagctcaccaacgacgccttcagcggcgacgaaagaaaaaggaataagaggatgagaaaaataacaagagagtatgggagattgacaagtggacccatgggcaaacttgtctttaaccaatatttctctctccgttttatagaaaataataaattaatcccgcgggtgtccagcaactaattaccacatttttacagtgtccacgagtagatttactttatttaggtgtctcacaacaaaggtcacaaattttgagttttctatagcaaattttgcctaaactttatagtatttgctctaagtacggtccaaatcctgtagttctacagtatttgtaaagaaattcaaatgcaaggaagaaaacagttaaacagttgaaggttgtatttgcaatttttgtagatgaaaggggaaacgctagtctgtgtgacacgtcactctcgttccggctcggccagtcgccgacggccaacctcgcctcccagtcgctcaccgccgctcgcttcccggcggctcaggcgggcgcggcgatttcgctttactccatataacgccgctgcgggccggcggccgcgggcgtcggccatgtccccgcatggggctatgggcgtagcggcggctgggacgccgctgaaggcggaggagatggccggcgggtgtactggatggatctccgtcggcccgtcggcgacaggatggaacggcgaggtgaggtccaaccgcccaaattttctcttctttttttactttgtcttcaaatctatattgagagcacttactgtttctgcgatttgcattcagtgtccatcttggagctacccttagaaattttgggataagttgcttgattcatgaggttatgcgatttacaagagcatataatgcagttgttttctgttgtgcatctgcatcctagtctaaattaatataattgacatggtttgcctttttcttttttgaaagaaaaagaaggataatagaattcagaatagacatttgtgtgcactgtgcagaatttggcagcaaattgttcagctggaatcaattattgcaaatgggggtcattcagccgcaaagccgacttgtttgaatggccagatgcagcgaaagtctctgacagagacaaagaacatgcaagcaatgaagtccaccgagaaccaaggactgtagtagaagtagcaaagtctctgaagaagaaaatgttagaacttagtccatgaatcacggaagacaagttgagtttgctaaccgagcatcagatgattggcacgcctataaatcagagaatacggtgcagtagcatacagtctgtcagagctttgctactagatgacttcaaaatcaggctgccgatctgtaagcatttccttgtttagttcattcctttccattgttcagaattgagatatcttttcattaaagaagataagtattgaaaactataaacttataaagatggcactaagccaagaatccagtttagaattggttccctgacagtggcttgtcactctagtatatatttgatcagaaaccgcttgtgttttggaattgattagaccaggaaaatagctgctaattctatgcgttgtctgataaatgatccatctgtgctaaaactgtagggatcagaagcgaacttgaagtgaactgagtggcagctacatcagtccagattcaagacagagttccattccttctgtctggccacatgatccagatctacatttgaacatagctagtcaataatgatggttattacaactggaaagattatcttgattttcttagcttgcactgcacatgtcgtcacctgcagttccttatatggaaacgagacagatcgagtggcactgcttgaattcaagcaggcagtctgtcttgatccaaaacaaaccttgatgtcctggaatgacagcatccacttttgcaattgggaaggcatcttgtgcagcttgaggattccatatcgtgtcacttctcttaatcttacaaatcgaggtttagtagggcaaatctctccttcacttggaaacctcacatttctatcaattctatcccttacagagaattcattcagtggacaaatccctgcatcccttggccacttgaaccacctccaaactctctggttgagtaacaacactctgcaaggagttataccagattttacaaattgttccagtatgaaggctctacggctgaatggcaataatctagttggaaaatttccgcagctgcctcatcgccttcaaagtctgcaactttcatacaatcatcttagtggaaccattcctgcttctcttgctaatatcacaaggctaaatgtgcttacctgcacatataataacatccagggcgatatcccacatgagatcggaaagttatccagcctgcaattcttgtatgtaggtgcaaataagttggttggcaggtttccacaagccatcttaaacctttctactcttattggtcttagccttgggtttaataatctaactggagaggcaccatccaatcttggtaattgtctacccaaccttcagctacttgaattagaagacaactgctttcaagggcaaatcccctcttcgttgataaatgcttccaagctatatcgtcttgagctagcaagcaataacttcaccggtgtggtgcctagatccattggcaaactaaccaagctatcttggttaaatcttcagtccaataaacttcaagctcgtaacaagcaagattgggagtttcttgacagcttagccaactgcactgagctgaaagctttctcgatagctagtaatcatctagaaggacatgtgccaacttcattaggtaacctttctgttcagcttgtacaattgtttttgagtggaaatcaattatcaggtggttttccttctggcatagcaaaccttccaaacctgatttatattggactggacaacaaccagtttactggtgcagtcccaaaatggcttggaactctcagtaatttacaacagatattgttacatgagaacatgtttactgggtttattccaacatccctttcaaatttatctgtactgggatctctctggctagactataacaaaattggaggacctttaccagcaagcttgggaaacctgcaaacgcttgaaacattgagcatttcaaacaacaaactccatggtagtgtaccaatggagatcttcagaatcccaacaatacggttaattgatttgtctttcaacaactttgatgggcagcttagtgccagggtaggaaatgctaagcaactcatgtatttatatctttcatccaacaatttatctggagatattcctagttcactgggcaattgtgaaagtttggaaggcatcaaattgggctcgaatattcttagtggaagcattcctacttcattaggcaacataagaagtctgaaagttctcaacttgtctcacaataacttaagtggatcaatacatgctaatcttggaaagttatggctccttgaacaagtagatttgtcatttaacaatctcagcggtgagataccaacagaaggaatattcttgaatgcaactgcagtgcacatcaatggaaatgagggtctttgtggcggggcactcaatttacacctacccacatgttatgtcatgcctttgaattcatctaggagtgaacgatctattttgctgtatttggtgatattatttgctagcctggtgtcagttatattcatatatctattattgctctggaggggaaaacagaagaaaaaatgtacatctttgaccccatttgatagcaaatttcccaaagtttcttacaatgatctcgccaaggcaactgaagggttttcagcatctaatataattggaagaggaatatacagtcatgtttacaaaggggaattgttccaaggcagagatgtggttgctgttaaagttttcagcctggagacagaaggagcagaacatagttttatcacggaatgcaatgctttgagaaaagtgcggcatcgcaatctagttcctatcttaactgtgtgctcaagtctggatactaagggaaatgatttcagagccctggtgtataagttaattccacaaggagacttgtattctctactgcactcaactagagatagtgagaatggtttcacttcgaacatcattacattttctcaaaggctaagcattgttgtggacatagcagatgcattggaatatcttcaccatacaaccaagaaactgttgttcattgtgacatatagcctagcaatattcttctggacaatgatatgaaagcttatgttggagatttcggtcttgcgaggctcaaagctgatgctgcagtaccatctgtcggtgactcaaactcaacttctatgattgcaataaaaggaaccattggatatgttgctcctggtattatttcctgtttttcaatttaacttgagaattttttgtgcttctaccaacatttggactaagttatccttgattgatgtctacagagtatgcatctggtggtcaagtttcaactgctgcggatgtttatagctttggaattgttctccttgaagtattcttacggaagggaccgacagatgatatgttcaaggatggtctggatattgcaaaattcgttagtatgaactttcctgacaagatactagatattgttgaccctgtattactacaagacgaactggattgctcaaaggaatctccagttgccatgaaggaaatcttttctgagggtttacattcagtgctaaacattggactttgctgcaccaagcagtccccgtacgagcgcatggacatgcgagaagtggctgcaaagctacatggaacaaggaggcatatctctgaggcaactaggtaatataatgtaagatatgtaccctgcctatagctgtgagatactctgctaccttctcgcatggcatgtttaatattgtcactctctcttatataatgaaatcacaactcttgttattgctgtaataatccgagcactacatttggtttggaatcttacacaattacactgcagatacatggtattgttggaaactctgcactgttatcatat

SEQ ID NO: 6039 - DNA, 13893 bp, Oryza sativa
tgattcctagcgtagttttgcttgactactgcttgtgaaattgctgttgtggaaaggggttcgatgattgaaaaatctgtagctgatggaatcagctaggcccgggtggccgtttgaaagttgttggcccgggtggccgtttgaaaagctgttggccgggtgccaaccttgattcaaatctaaagactgatacattgcacatactccgaccggacgagacgcactgtctcatccgtgtcgtttgagaagcactcacttagttgatttcagaaaagagttcaaatgaaatcaattgcaaaaacaacagcctttccttgaagcctgcaataaacacctatttcccatggcatgctgagtactcctgtactcacccttgctctatataaataattcccccccagttgctgaagaagatgaagcagatcccgctgacgaggagttcttccaggagtaagccggctacgatgagttttagggtttcggcctagttcccaagtcgcgcctgtgttgtttggtccaagtcctggcttccgtttcccttttgtaatgcagttgtgagctcgggatctgtccgcagcccaacatgactgtacctctactctataataaagagacctctgttgctgtgataatctgtcttcctgtgataccagcactatttcctgggactgatatcgatttacaggttaatttggagcgtcacgggctagttccggtcggtactatgttgtttatatatctataactaactattttatggatgggttattatattgcctatggatgatatgtatgaacttttgaagttagccgttggctatattattaaacttactctaagtatttctaggtttttcttagcaaaattaagttagtgggaaaatattcccttttactagttaccttagtggtcaaattttgaattgtttgtatttttttctcaagcatttgattggctaaaaatgtactatagattttcatgcattaaaatcaatgctatagaaaatactactatatatctgaatatacaaattttgaattctattccataaatggttagagcaggttcaatagcagactataagccagctataaacgtattttaaagtgataaaagaggagaaataagagcagtatgctacagatttatagccagctgtaacacgtactccaagatatgtgtgtatgacaggtgagactaaacattaattatgtagtatatgtttataggtaattattatatcaattggttattaaattgactatagataatttgaagtcagtagttggctatacgttagtataaagagagtactactagtacaaagttttaaaaggttcagagtaggaatacactcctcctagtatcaatcaataatgttgaggcctggtttaggccgagtttagttctaaaatttttttttcaaacttttaacttttctatcatatcaaaacttttctacacacacaaacttccaacttttccatcacatcgttccaattttaaccaaactttcaattttgacgtgaactaaacacacccttagttcccaactttttattcaaacttccaacttttctatcacatcaaaactttcctacacataaaatttcacctttttcatcatatcgttccaatttcaaccaaacttctaattattttagcgtgaactaaacacaccctcctaagtagagaaccgtatttatgtaccctcctcaagtagtatgcatcagctcaagctgcacgaacactgaccagtccgtttttttttactgtcagtacacaggacatcccgatcccggggtacaaaaacagttgtccactgtcacccttgccccagccatcaatctgtgtctggacctgatcctagtacaaattttggtaccctaaacattattactgcattcaaccttgcaaaatactagtatgcccatactgtactggattgccattgtacacaaacaatgcaacaccctcggcctaaacctttgcaatctccaggcgatttgctgctattgcaatactagtactgcattgctgggccttgctgccgctgcatgtgtgaccctggttcactgcaccgggggacatgtatatgattatctagtacttgattgtagaaaagtgataaaaaattaaagaaatgatacaagcagtataatagaataaagttttttttgaaaaatattttttaaaagtgaaacaaataatctattttaataatctagtaaaataagctgaaaagaacatgaccttagggctctattggagccgaacaattttacgagaactttgtaggaaacaaactgttttctatgaaaattctgtaaaatttccgtgttccaaataagcccaaattttgtcacttacttatactgaaacttcactatactgcttatcacagttcaaaagtccctcctgattaacagcgatcaaactaactgctccatataatgtagtagtaaccttgaagcaggttactagacaagcaaaagcaactccaatttaatttgtccacaggaacacctttttactgaacaatgaggactgctgctatgtagtactcctacttgtctgacagagagacagaaaggaacagttggtaattaacctgtgttgacaacacaacgcaaaattgacgacggcaccacctttttgcactcctcaaacagtcgccgcattcaattaattaagataacattactacaattaattttggtaattaagctactattataataccaggttagctgtaagatgaagcttacaagatactaaaagaataactgattctcaaccaagacttcatgccaaactaaatacgcacttctctgaagacaaatactaccagatgatggcatcatcacaccaatctgaaaaactacctttgaagctacgtacaacaacaatggcttccaaagacaaaagagaaaggattaatcatgagattccaagctacagccacgagtacattcctatcaggtgtccctgacacacgatctaaatggattaattatgcaaagatgacaagacatcacatacataaaagctaacagaaaaaagataaaggtttcacttccattgcatgcaagccatgaaaagtaaatagacacctcaactcttttaatcctttttatttgtactatgaaaacgattgtgcaatagataaatttatatataattcattatcattatcaatccatcacacgctaaaaggactggaggcccctctaacggggacacaaaaacttttggaaaaagaaaggagaatggataaataaaggtggcatgcacctttggatggtgagcaccttaaaattgagggattaccggtttactcacgactatttgtcttgtccttctaacaatatcgaatatgttttgtcttttgttaatgaatgtatcggccaatctagttttgttttcatgcgatttatatttcaatttacctcttgctgagacaaagtgtgaaaaccagagagagatatactatatccggtcatattctattatattccctccgtctcattttaaccgcagttatgaatttctatgtccaacatttaaccgtctgttttattttaaaaaattaaaacctatatatcaagagaagctcaaaattgttaatgtgacttagtggttcccattgaatttggactctatatctacctgggtgaaaactcaacttatatataaatttgtttgcggtaataatttgtttgaaatttattatttttatatctcacaaataaagttgaggttagataatattttttataatattgtgtaacatcaacttatctatatgtgcgattctttttataatttaggtgaccttttagttaggatttccaacggatatttaccctattttacctttacatttacatgttatctcccctctctatctctctctctacttagaaatgcagaactacaaatctcgaaacatggccggttactaccggtatttgtgcttatttcgtttcatggaagcgagcatctgtcttgtgtcctatgcctcctgtctagcacatatatatgttgccctttgcaaaggaaagtttgtttaaattcttttctgctctcgagaaaggattcaaagtaaaatccaaagtaggttcccttctaggggtccatacgggacggaaacaaaatgatatgtatttttcattctcgaaaagagaaaactaaagaatttgagtttctactctagcattggatacccgtaggaacatgacaagttttgggtttgatgcatgttggagcattttgtagtattgtactcctagctactccctccgtcccataaaaaactaacttctggctacgaacctagacgtagtgtgtgtccagattcataaccagaagttgattttttctgggacggagggagtagctaagagcgctactatgtatcatttggctagtacaaatgtcaaagggttggctccacatttcatggcgaaattaaaacactatccctattatccgaaggtcatagtatttgtcgatgacatgggaccgggagtatcatgactagaggcttgggcaggagcaatcacccacgtggcctgaccccctcggggggtcgggcccgagggtgatgtgaccgcccctctctttgtctccccgagggatcggaccgctcccgtttcggccccgagggccgaggcgcgccccgaccccttgtgggttttgcgtcgcgtatgggttaggtgagcacagcggggctcacctaaccgcatttattgtggtttgaacgagcgcgtcacgccgcatgtaacgcagtgcagcgcgctcgtttatccggtctgtgaccggtcacagaccgatcagatcgcgggttaggtggcaacaggcggtctgacacacgcctcgccccatcccgtcaggatgagagcctccaggcactcgtccctagccggagccagcgtgctagctcctgaagatggcacgttggtcccggtcagatatatgccaggcttcatcccaaccattacaagcaagacattgtatgaagaaggacgaacatgcagattgataaactgacgcgtggtggacaagaatgaccgatttgtgaccggtctgaccctggtcatgtcgtcggcagacagccatgatcccacgttgcacctgcttccggcggagtagaggtaggtatgggccatcccatcagaaggtcattcggacggcaaccattgcaaatctccgcccattgatgaaggaagggcgggccaagttttagtaaaaagaggatgggtccccatcgaaaggagaaataggtagaagtggtgcatgtggtatccccttgagatataaaaggaggacctagcccacttaggagggggatcagaggttggagactcccggagaatccaggagaagatcccacgagaggcaaaaagaaggaagagggtttctagagtttgatccctcttgctctccagctctttgtagcttcttcatacacagatccaccataacacaggagtagggtattacgcttctcagcagcccgaacctgtatacatcgcccgtgtcttgtgcgtttccactttcgcgaacattccacagaccaggagcttagaacctcacccagggcccccggccgaaccggcaaagggggacctgcgcggtctcccggtgaggagccccacgctccgtcagtattattcgagataatctgatctatttatctatttatttttggtcttataaggcgttcatgtacatattatttcacccctcaaactttagtttgatttgtaagttacatcctattattactcccaaattgttatatgaaattaaagtaccttttgttcaacataattcgataactgtggacaatatccaaactcctctagaaaaagaagtacggtgcgatggtggtgaatttggcatgtcaccacataatccttccatatatattgttctttttaatcacagtttagaacaaaaatacaacttttattggaaaattgattctagtcacaagtcacaagggcatcaagcaactacatagacagatgccatcaatcacaacacccaattagtccatccatgtatcttctcaaatatgcaattgccccttatgtttttgtaccagcataacgtacaacagttcatatctcacttctgtagttctgttggagaaaaggtagcaaaaggtagatctattattggttaatcaatgcatcaattatagagtactaagatgttgcagtaaacttttttgggcaatcaagatgttgtaataatgaatcactacgtactgtactattctttttgtgtggtgagcaaggttaataaaagtagaggtgattgatatatctaattttatccacataatctctcattagtaattaggagacagcatacatagtatattacctctatcacactaatattattttattcatttgctcccaatctactagtaggtctcttgtgagaggtagcagctcatcctcacttctgtgagttctctcttcacctcataattcaaacttacataaacattcttatggctagcaattcaacgcgtattttacttgctctttaacccatataacactggcaaccctcctggaattaccactaatcccaactttaggctggcttatggaaatgtagcctcattatgagaaaaccaactacttgcgccgttaaattttgataaaaactacattgaatttatttttcttccaggagacgaatgattatgtcggcattagccatttattccgatttatgatagattcagctatcctgatgaaacatgatgtggctgataaagaaagaaagaagggaaaaaaaagaaaaaaaaagaaaaggagatcaacgaattattgttagttaaatctaagaaggaagatctaatgttgttttcagggattaaaaaagaggaaaaaatggtcaacacaccattaaagtgaccaaagaagaaatgctggcgagttgctacatagctttcagaacagatagaaataagtggcaacgcatcatttagtctagaggtgcaacaaggtaaagaaaaatgttgcacaaacacattttcctgagctaaattttgcagcagcaaactgagactgatgaatggagcaaaatcctatcataacttcttatcagccacatcatgcataaagtatttccaggctcgaagagatgaagataacaaaaaaaaggacattaattctttctcacattaataaagaatgattatactgcatatattaattctttctcacattagtaaagaatgatcatacattgttgtattcttcatatcatttcttgccttcttgggttctgtcagggaagaatccactagattcgtggtgaccagtaattcataatttcatatagcaattatgcataacatgcatttcactacatctgtgaaaaatctgcatgcaaaaacaaaaatggagcaataccatattttgttagttccacttccagcccagttcctcagttcctgagaaaacctgagactgtcagttgattgcttttaggtccttgactccatgtacgccgtactttatcgtcgatgtccatctgtctcttcactcttaatctgttgataagctaagaagttcaatcgtgctgtttatattttaaattagagccatgtgtggaaaatttatctcagacaatcacactttagagcgtctcaagtaaatcatcaccacaacccctgttagaacaactgcacctgccatcaggccataatgagcaggggtcaactgacttgtgtgtgaagatgtcaactctggaggttgctttgtcacttcagaagtgtgctttgtcacttcagaagcgtgctttgttacttcagaactgtgttttgtcacctcagaactggaatttgactcatcagtgtacaacctcaatgactgaaattgaaaatttcactccggtgaagcaatagtcataatccaatgaacaaaaaaagaacgcaatgtgaaaacagagggaccaatctatttgaggattacagaaaagacaaaccttcaatccagaagatttagcatggagcacagccccggtaagatcagtatccgtagtgagcaacaccctatcaccttcatcatcatcatactgtacggaacattatcaaaatttagcttgtaattgtggctgaggtgtgataattgagctgtaagtgaagtgcttgtaacagttaagggtgcattcacaatttcatgggataattagttaccagcgctactcaaaataagaccgctttatgccagtcaacttataaatttctataatacaggcaacactatatatagtctctatggtcaatataatgtctataagaaatcaggatactgagatacagatatggggtgacataagataaagataaattcttattcttgaagtggatggtggttaagtactttcttacatcagttagcattccatataaaacaacagaacttcttgaacgatgatcagactgacaacctttttttttttttttgcttccaaacactaacgaaatacataaaataagggacaacaaattaccaaaagttgaactgtgcccttttcgccatcaatgcctaatctttgcaccacagaagacaccagctcatgtaaactctctgaacctgcagagacggaacaaaccaaactgttagttagagcagtacaaccatagtttaacattcaaccaacttgtaacacctaccacatgcaaatctatgcatacgtcccttctggtcctcaatcttaaagacaaatgaattgccaacaacaggaggattaatgctactcctgccatctccagcctctgatggcatgagcaaagatatttcactgaacaatgcaaaaatgcaggtaagaattgcaaatttgaaaaagaggacaaaggacaaaaaaggaagcgttaattaacctgcgactatcaaattcctcatctgggggctccaaagcaagagctgagtcccaaaacttttgcattattgtgtttgccacaccattcgtggtctcaggacctccttcaaccttcacacagaatgatgttagatgaacggaaaccataaggaaaaagcaaggaatgagaagcgaaaaaatacgcatgtgcagagagaccattgaaatggctgcatgggtaatctgcagaacatccaagcaagcaacaactctcccttctgttcatttttaaaattaaaaagttcagtcagatataaaatactagtaccataaagagaaaccttaggctgaagaagagtcaagtgttacctccatcaacaacaggaatatgcaagaatttgccatcgcgcataatatgcagagcatcgagaattgatgtgtctaatgtagcacattcagggtgtgcagtcattaccttgagcaaaacagtgagtaatgctgttagtctagaatgaattgtataacccatcggtagtttaaatcatttaaaataatattcaatctggagaaacaaccttttctacatgagttaactcaggagagagattttgtgtcacaacgcgcataagcacatcctttgagctgaatttcacaatgacatagccattagtgccttaagaaatataaaataatataaactctagaataaagaattattccataaaagtattgaaatgcttacgtaaaaatcccttgcaatgaatttcctgcagtgataaccactgagttaacccgtaattcatgcatttttcgtgctgctacacaaacaggatcccatggtgaaacaattgctactctgcaagttaaaaaagaggtaactcccatgattcaaaccacattatgttggatgatccattttataccaccaagtttcattcagtgtctacaatatactactgatgtctcactgcccacatggccacatgtcatcctcacagtgagtggtctactatggatatgaataaaactcagtggcatggtgtggatttatcccaaaaatggaatactaataaaaatttcatgtactttgtgttctccgagataatggttgacaatgaaggtttaagcatcctttctcttagagtttctattacactggaatgatctgcaaatggtaaacacagtaatttggtcagctaaacaagaccagaaaacagtggttaagtgaaatctatttagaaaataatgtacaaatgtatacagtaaagcatcaaacatcaaacatagttccaatcctgagaatcatctcattattctttgggataaactgggtattacaaattgctcataacctagttcacatggctactgactgcagtatacattttctgttcttgtgtagcaatgaacatttagagtgaaacaaaggaaaataactagtcagcacaatatgcaacagaaaacctggcaagttgtctcccacttgacgctcaaccccttctacagcagctgctaatgcacttccctgttctgctgccttttccagtcttgatattgcatcatagaggcattttgcaatgtctagcatggcaataacctcaccattttccaccactgggaggtgcctaaattttcctaaaacgtgagtgtttcatattagctctaaggagaggaaaatgaacatacttggaatacggagagacagtatataaaacaattggaatgatgagcccatgttattaaaataagaaacaaactttctaacaatgaccattgatttcatagcatagctgttactgctttattaacaagtgaataatgctttcttaatatgcatacaggtcattgggattgtagaatgctgatgttcagaggttaaagatatgcagttgtcctatagtaaattaaatttagccaatgagactctcaatactggaagaatgtctagaaattagaaagttcctctgaaattaatttagattattgctaaaaggaaatgcaacaaacttgaaaagacaaactgatgaatgcataaaagactgcaagaaaagagaaaaaaaaatggaagtactcaaatagtttaatagtcttgaccgaatagattttcaaagagattatactgtaaacagggaaagagaatgctgattgaagcttctcagaaatacaaaaatagtgataattttaaacaatatggctagtccaacattgtcaacaaggatttactgatcacaacattattatccaaaacattctcacaataagtagctacaacaaagataactaatgcatatgaaatatactccacagcagcttgtaggagttaaaggaagtgagttcaattgacccaagtccgaagtatctgaaccaaacaggcagatcactgggtctatgctttaagattacaagataccttggaccattttctgcagtgcttcaatagcaagtgtgtcagacatgacataaacaggagttcgtgtcatgatcttggaggtgattgtttgctcaacccgcaacccctctgcaatcacccttttagctatgtcctgtatccaaattaagcaaataagaaacgaaacgataaagaatctccttatctcctttaagctagaagtaccagccatgtcctatatcccaattatgcaaataagggcgaaaagataaagcatctactttaagctttaagtaccataagcataagatactttggcatgtacttatagtattaaatcattgctgtgatttgtacaaacttacagtcgaacacataacataggcacccgcaaagaaaaaagaaaaaaagaaaacacaacatggttgggccgcagtcgaatacataagaagcaaaatacataaataacaattgattcatggagcattagtcaaagtatttaaactctcaacgattcattattgaacaagtcagatgtggcaaagaggagttgtgcagtcctaagaaaaagttgcaataacataaagcgtccatctttaagaaatctaggcacttgatgtagacacaagcaaaactctatatggagtttcgtagagtacaattataccaaaacccacttattagccaatcgcaaccacctccagcttagaaaacacatcacagattgatttgaaaaataaaataagaagaggaaaattactttatcggtgacgatgccggagagtaatccgttggcgtccgtgagcagcacggcgtccaccctcctcgccgccatccgctggcaagcctccgccaccgtcgtcccctccgggatcgtcaccgccttcgtcagccgcagcttcttcaccgtcctctcccctctgaagaaaaagaagaaaaaaaaatccaatctctgtaaggatcaaaggcggcgaggagagagagagagagaggcaatcttggtacgcggcgtggctgggggagggcgtggcttcggcggtggagatagcggcgaccgcggcggcgggatcatcggacttctgggaggaggccaccgacggcgggcggctgcgggtgcggcggttcagcgccacgccggcggcactcatggcttcgtccgccgccgcctccgctgctccggaatcagcgatgtagttggcagtgggcggagagagggatcgtcggcggcggtggcggccgccggaaaaattggagggggggagaggtggccggttcgactgggctcccacacgccacgattgatgaataccccacgtgggagttttttcacatcgatctcttgatgacgtgtcaatgtcaggtgggtcccacacatgcacttgatgggaactaataaccagatggaaaaagtccactttgaccgaatctaatagccgaatctaattcgtacccctcaactaaaaaaggggataggacgactcctcgaactattgaaaaatcagtgtaatttaactcctccaagacagttaagtacaaattgcggagattcgcacccgatcggaaacaggccatacgagaagaactcgacaaacttctcaaagctggtttcatcagagaagtcatcaatccagagtggctcaccactccagtaatggtacgcaaagccaacagaaagtggaagttgtgtgtcaacttcaccgacctcaacaagacgtgtcccaaggactacttcattctttccttgaatagaccaatcggtagattcaaaagccagttgtgagctcttaagttttcctaatgcttactccggctaccaccagatcagcatggcaaaggaggacgaggagaaaacagcgttcatcacaccctttagtgtgttctgttatatgaagatgccgtttggattaataagtgcaggcaacacataccagcgcgggatccaaggagcacttggcgatcagcttggacgaaacgtcgaagcatatgtggacgacatcatcgtcaagatcaagacaggcgaataactgatcgatgacctaagggaaacgttcgacaacctctgaaaaaaaaagatattcgaagtcatactttagtatgatttatcactcacctgtagtcattgttaagaaccttcggttttcttagaaagcggaagaaactaatattctgatgtgctcagattcatatgtgacgggtgattagagaaggttctagttttagcaggattgagatcaaatgcagtagctactaggactgcacggtaactactgcacacaatctgagccctctatgtcaaaatctaacggccaaaacggatttggcacagtaaaatcagaacagtacctttccatcactacagtgttttgctacagtgctcggatatatctgggacgtccattttaaatcatgcgatgctagtttgactgcttattttgcagtcccactggctactgcacctgaatcggatccgttttagcatgcaatatgtaaaagtgaaaagaaaatgaaatagtgctttgttttataagctctttattggttggtagatatgctgcttaaataaaattgttacggtggtaatatactacctccgtcccaaaataagtgcagg

SEQ ID NO: 6040 - DNA, 74145 bp, Oryza sativa
gcactgcttcaaattgtatttcattatctgacatgctgatgtgagtgaacttgaatcttgtcatatgcaatctacagaatgttcacatggtggtcaagtttcaactgcctcggatgtttacagctttggagttgttgtcttggaaatatttattcggagaaggccaactgacgacatgtttaaggatggattgagcattgcaaagtatgcggagatcaatttccctgataggatactagagattgttgatccccaacttcaactagagttggacggccaagaaactccaatggcagtcaaggagaaaggcctacactacttgcactctgtattaaacattggactctgttgcaccaagatgacaccgagtgaacgcatcagcatgcaggaggcagctgccaagctgcatggaatcagagatgcatatctcaggggaaactgaagaagcagtgcagttacctcaatggttttggttttgtctgaacgcattatatattatatatagcattatactagcatgcatgtgtgcatcttgttctggttaaatagatcggtattgccttgaataaagaagtggccattgtcctagagcagcaaatgtttttagattgctgtttgattcatttctaattttgaaacgaggttacataaacatcaggtgtttttcgtcgttcactgtgtgagttaaacttgagcttgtactgaaggatgaaatcctacacaaaacgacatcaatactcttgttttttagcagtttggaggtttggtcatctctggcagactggtactaattgaacctactcctatacggctaatgggttcaataccgagatacagtaagggacacaactataccgagagtgctagctggatagtgctatagagagacacccttctttcaaaaaaaaaaaaagctcactcaatatttatgtattttttttcttcttagagaagtttctcttaaattacttatccgatttataattcgattataccgttgtgttcgttgcaattaaatctttacaacaagatcttacataattatattttgatgaaaaattatatattacttttatcatatatctaaattacctttagatttcactaaattacttcttaggcatataaaagtaattcaataaaacctaaaagtaatttatatatattatagaagtaacttataacaaaaggaaagtaactttaatgaatacctttttccataggacatgaagtcatattttatccatacaacgaatttacttctaatgtcgtgacaaagttacgtccgttttattttaagttatttttataatatatgtaaattacttttagactttatttaatttacttttatatgtctaagaagtaatttagttaaatctaaaagtaacttatatatatgataaaagtaaattatgtatataataaaagtaatttacaaatataaatatgttttcatcataatataattatgtaagatcttgttatgaagatttaattgtaacgaacacaattgtgtaatcggattgtagatcggataagtaatttgagagaaaactttgtttgaagaggaaaaagggcatgcatgcatgtcgtacgagtacgatgtagtagactccatgtcttctccatatttaggtgtcgctggttaagataaaaacgagaggcctctccaaatagatttcacgtacaataagctattaggctaagcattattttcaaaaatacctaaaatacccttgcagacatacaaaattaacaattgatttatttcattagaagtttaaaaaaatatgaaaatttttacgtggcctcattacacaacatgggagtttgtatagatgtttcaagtttttttctggtatatttaatttttagaattttttttgtggtatatgagagaaaatttgcttatacgagagaaatatcttgtgtagtgtatgaaagatgatttatattaaaaacatcaataaaaaatattttatacagcatataacatataagttatactttttctaaaaaaatataaatgtaaaataacctatatacaaacttccatgttttgtaaggaggccacacaaaagtttggtaaaatttgctacagagtatccttctaaaatttgctataagttatacattaaacggtaggagatttgccgtatatattagaagaaataaaaccaagagagtgcagaaacgaaaacaacaacaggccacaacaagtcctgtgacagaaatttacaacccaagggaaaaaaaagactgtgaaccaggttctatcaacagcagtagagcctggattggttgattaggtctatattctctttaattagaaaggccacctgaagctcgctttttgaagaatcctggaaaatcctcctattacgttctaaccaaatattccaccacgttgttaaaaggacactcagaatttgcttccttcgtgatttaggcttgatcgtgcagagggtgctccaccagtcttcaatggaagctgctgtatgttgatgcggtgcttgaatgtcgaaccatctactaacatggtttccaaaccaaaatcgtaaaggggcactcttttgctagatgtgtggcatcctcgaaggccccccctgcataaactacaaatccagtagtttacagaaaacatgattttctctaatgatgttacagagcgacaaatatttatagttttgccgtttgatttgtttcttttcatacgaggtgatcatatttaatttacatcatggatctcctagttcatcgttcattaaattcatatatgaggccccattacaaatattcagaccgctatgattggtgaatttgtggatagatgtataatgtaaaacaaaacccgtttcatattataagtcgtttaatttttttctagtcaactttataaaaaatatagtattatttttaatcaaaaaacaaacgtattatcaaaatatatgtaattttatatccaataaaattaaatttgatattttagatgctgctaattttttaataaatttgattaaacttaacaatgtttgactaggaataatatcgaacgacatataaatatgaaacggagggaataccaatcaaggccactgctatttttttcctttcatctttaaaactttcatccaagattttatatgaaaaagtatccgctaagaatgcacgttccaaataccaatcaaagcggcgcaaaaaaaaaagacagaattgtaattctgggctttacgtgggccgtaattggacccgtcgatccccttgacggaaaacccaaccgacgccgccgcccgatccatcggcggccggcggcggccggtgggtgatgctcggcggcggacacgaggtcgaggactccttcgacccctgcttcaccgacgcccacaccgtgtcgccttcccgcacctccactccgcgcctcctagcttccgcctcgtcactccgccggcggtgtcgccctacgcgaccacatcgccggtgggcggtggcgtcaagctctgtcagggcggccggagactccgcgctcatccggataacctgcggatcgccggatcatctgcagcatatacaaggtaaagtaaaactactatctcccatttaattgctaggttacctaaataattgttagtacatatctgaatgcactactctacgattacaagacgagaaggacttattatctcataatttaattgcaggattattattatggaaaattacgggtctgagtggctgagattttcgtttctgatgaatctcactgatgttgaacaatgatcacagagcaagtcgcctgctgtcgtgtcgtcgtctcaggttaatcgtatcccagaatggagttaacatgggaccgatcaatccaccaattgttagaatcatataagaattcctttcaaaaaaaaaaacaaaagagagaaaagaatcatataagaattacttgtggaactggaagtataataaaaccgttggcgtcatgttgtcaagggtagtatactgtatactggagacggaggctacattattggccacttggtcatcaggtgagatgaacaaacaggttagctctacatagatcaataatataattgcctaatcaagacaaaactatggacaaaaagttaggtaatcctccattttcactgaagattagcctcctctctgaagaaaaactggtgttgagttgaattccatgggctggtagctggttgagttgaaggccttagcttgccatgatagtgcagacgccatggctcttactgctacaaaaatgaagcagccgacgatggccacgaggctggctgcaggctgcaccctctcgctggtaacccctcacgaatgcatatattgattgatcttttaatttgtttctatgttcatcattttgttagttccatggaatagtatataaatgttggatcaatcgtctgcttttggggattgtatggaatgagcctaactatacctacaggcttgtttctgtctgtaaacttattgcgtactagatacagatgattagaaacactatatttcccttttttggtgagattgtcagaaattattacttctgtgttacctagaacttatttgttcagaatatcagatagctttgctagctttctggctttcgtcctcctttcaggtctctgacactagagacttttattttccaccgattggtgatcatttatcttgctataagcctttatgtttcatccctgactcttctgtctcaatggcagttggattgatcagcccgtatcagcaaaggatttttcatgttgctgaatcttgccagaggaaaggatatcaattctgtctgtggagacgaagtaaataagaacaaaagctttcttggtactttacatttgtctatttgccaacattctctaaccatctaaaacagcttctgaaattttaggctcttgcatgttctttaaaaaggattactaaccgatatgtattaatccctttctcttttgtctatgcatataagcaagacctaaatttattcgtccaaggagctggtcatgaagatcactgcaattgggttgtttttgttggtgcttatagcgagctgtcctgtccaaatcttctgcagttcgtcgtatggaaacgagacagataagctctcactgcttgagttcaaaaaggcaatcagtcttgatccccagcaagccctgatttcttggaatgacaccaatcacttttgcagctgggaaggagtcttgtgcaggaagaagacaccccttcgtgtcatttctcttgaccttagcaaccgaggtttagatggacaaatctccccttcacttgcaaacctaacattcctaaaatttctttacctagacacaaattcattcacaggagagatccctctatccctcggtcacctgcatcacctccaaaccctctacttgagcaacaacacattagaaggaaggatacctgattttacaaactgttccagtctcgagattctattgctcaatggcaatcacctagctggacagttgaataatagctttccttctcagcttcaaaatctgatacttgcagaaaataatcttactggaaccatcccttcttctcttgccaatatcacaggactaagaggacttagtttcatgtcaaacaatatcaagggaaacatcccaaatgagttttcaaagttcgtcatgatggagcttcttgctgtgagtggaaacatgttgtcaggaaggtttccacaacccatcttaaatctctctactctcactaatctttaccttactttgaatcatctaagtggagaggtaccatcagatctccttgactctctacctaatctacaagaacttctactgggtcacaatttttttcgaggacatatccctctctcattgggaaatacttccaacctacgtttactggacatatcaaataacaatttcaccggcattgtaccaagttccattggcaaactaaccaaattgtctttgttaaatactgaattcaatctactccaagcacacaaaaaggaagattgggagtttatgaacagtttagccaactgctctagactacaagttctttcgatgggacataaccgtctagaaggccatctaccaagttcgttagggaacttatccactcatctgtgacaacttattttctcaggaaatcagctcaggattttttccttccggcatagaacacctctccgacttgaattctttaggactagataataatgaattaacaggttcccttcctgaatggcttgagaatcttaaaaagttacaaaagttaaccttgcaaaacaaaaatttcccttcctgaattgcagttattccgtcatctgtttcgaatctgtctcaactagcagttctcggactatattctaacaagttggaacggcacataccaagcttcgtaaacctgcaaatgcttcaactactagtcatttccagtaataatcttcatgtcagcataccaaaagagatatttagtattccatcaataattgcaattgatttatctttcaacaacctagatgggcaacttcctactgagattggaaatgctaaacaactcgtatctttgggactttcatccaacaagttgtttggagatattcctaacagtttggtaagttgtgaaagtttggaatacatcgcgtttgactctaatattctcagcggaggcatcaccacttcattaggaagcatgaaagagaggattaggctttcgacccaaaacgaggaagaattttcattaaaattttttaattataatgtattgcgatcccaatatttcattatatttctcatcctccaatagctattgtattactttaaaaaaacatcattacccgttgcaatgcagacattttttttagttttataaaaagaaaaaaaaggacatgcctgacctagcaaaatagatttgtagcttgttgttgttgctgtagttaagtactaacacttctctcatgcatagatacatgatgcaacggacctcgggtgcggtagaccccgcggtctcaggcggtccactgtccagcagcggcgataagccaccagccacacatgaagaatcggcagtggtgtggagctttgtttttcaaagtcaacgggaagtcctcgcgcccaaggaccattaccagatatgccgagcgcgcaatgtggctgtccaaacccaaacaagcctatccggttggttatcaaccaacaatgtggcggagacaattggccagaaccactcatgatggccgctcatttactcaatggtgtacaaaactacttgaccgaaagacgcgcacaaagctagctagtttcctctgagatatgaatctttgattccgtgtagcttggcagcaacctcctgcatgctgatgcgttcaatcggtgttgtcttggtgcagcagagtccaatatttagcacactgcgcaggcagtgtatgcctttctccttgactgccattggtgtttcttggcaaaggtccagctcgtgttgcagctggggatcaacaatctctagtatcctgtcagggaagttcatctctacatgctttgcaatgctcaatccatccataaacatgtcttctgttggccttctccgaataaataattccaagagaacaactccaaagctgaatacatctgaggcagttgaaacttgaccgccctctgagcattctagagtttcatccagcaagagttaagttcacacaaatcagcatgtcagataataaaataaaacttgcagcggtgtaatacaagaaaaacaaactaatacctgatgcgatatatccaatggttccctttattgctagggaataagttgagcttgaatcccctagagatggtgttgaagaaccggtcttgaatcttgcaagtccaaagtctgcaacatgagcaatcatatcatcatcaagaagtatgttgctaggcttcagatcacagtgaacaatagttccttggttgttatggtgcaggtactccaacgcatcagatacatcgaccacaatgcttatcctctgagccaatgtaatgtggttcagatatgaagtgttttcatcattttgtgctgagtgtagtaatgcatgcaagtcacctcgtcccataaactcataaaccaaggccttaaaatcatttccttttgaatcaatacttgcacatgcagttaggataggaactaggttgcgatgccgaacatttctcaaagtattacattctgcgatgaagctcttttgtgctccccttgtctctaggttgaatactttgacagcaaccatattatcatcttcgaataattttcctcgatatacataactgtatcttcctttgcctatcaaattggatgttgagaacccccctgttgctctgaaaatcatattgtatgaaacttggggcaaatgcctagcaaacgagggcaaagataaagattttctgttctgttttcttctccacataagcacagtaaatttgaccatagaaattgacacaatgctggctattgggatcactactttcagtattattgatttcttgtgcttagatgaaaccaaagccatgataggacatgcttgtaggtgtaactcaggtggcccaccacaaaggccctgatttccatcaatcctgaaagctgttgcattcttgaaaattcctttcgtgggaatctcgcccttaagatggttgaatgacaaatctagttgctcaagaaattgtaaattgccaatagaacctggtattgaaccagttaaattattgtttcagtcacagtctagtccgctacacttttctgctcaacatgtctctctttggcctagcccgcaattggagctataagcccagctcgcacatactgtcgtgttcaagctctagaaagtagtcccatgcaatccccccatcaaattcggccaaatctttctcaattttttaaaattgattgagggcttttgatgcactcgaccactctttttgtttttcccaaaattgaagtgaatcagtaacactcgggataaaaacatccagggaagctccagctgccggccatcatcggcaactgttaaataggggattgaatttggtgaattaaagcagtattgaaagggaaaatcacgaggaaaacaaagatggaggagtgaggaatcgatttttacaatcaattaaaggagtaaacgtacggggaggtacatgatgttgcggtggctgaggcgcgctgcgcacgcggatcagaccggaggagatcgaacaaaaaccgggcaacgaaaaaaatgttccacgtgaaaaaaaactgcgaaaaaactagacggccattgaaaaaaaagggcgacaaaataaaaaaaaaacgagcggagacggaccaaaccgtaactcacggtattatgaatatctaagaagtaatttaatcaaatctaaaagtaatttacatatatgataaaattaatttaaatatataataaaattaattatatatatgttttttatcagaacatgaccatgtaacatcttgctataaaaaattatttacaacgaatataatgtataatccgattgttgatcggataagttatttgaaagaaattttatttgaagcttacctattaggaatcttttatttatactgttgcatgcttgcacactttgacgtgagaaaaagatatattgctacattttaccatttattggtataatagttggttttgattaattagtgcacatgtactcggagaaaactacacgtcgggcgctcgatctgggggtggggaaatcgggcagcatgcaaaactaatttaaattgttttttctcttaaattatttatccaaattatgatccgattacaccattaaattcgttgcaattaaatctttgaaacaagatcacacatggatgtatttcgacaaaatttttttagcttattattgaattatttttaaatgttgcacgttgttccaccaagtatatcggaattgtttcactaagtagatcgaaaatgtttcaatcgtttaaatcggtcgttgtttcacctatataaaaacaatgttttagcaaatagcgaaagaatgtttcagatcactgcaacatttgatccatacatagtgaaacattataagtacactaggtgaaacatttttggtggaacaaaaattgaaatgaattcccttaataaagggtttccataatatgtaggtgatttgttgcaaaagaatgtttcaattcactgcaacattagatctatacatagtgaaacattgtgagtatactatgtgaaacatttttggtggaacaaaaaatgaaacggatcacctagttggacaactgaataataattttccccctaagcttcaagtgctgactcttgcatataataatcttactggaactatcccttcttcctttgccaatatcacaggacttagaaaacttgatttcacagctaacaatatcaagggaaacatcccaaatgagttttcaaacttcctcatgatggagattcttcttttgggtggaaatatgttgacaggtaggtttccacaagccatcttgaatctttctactctcactaatcttcaccttagttttaatcatctaagtggggagctaccatccaatttcctttactctctacccaatctacaagtacttgcattggactacaatttttttcaaggccatatccccagctcattgggaaacgactccaacatacgtgtactggacataacaagtaataatttcactggagttgtaccaagttccattggcaaactaagcaaactgtattggttaaatctttaatccaatcaactccaagcacataaaagggaagattgggagtttatgaacagcttagccaactgcactaggctacaaagtttctcgatggcttataaccgtctagaaggccatctaccgagttcgttaagcaacttttccgctcatctccaacgacttcatttaggaggaaatgcaatatcagagtcttttccctctggcatagaacacctctcaaacttgattgctttatcagtaggaactaatgactttactggtacccttccagaatggcttggaaatcttaaacagttgcaaatattaagtttatatgacaactatttcacagggtttattccatcatccctttcgaatctgtctcaactggtagctctcacactacaatttaacaagctggatgggcagataccaagcttaggaaaccagctgcaaatgcttcaaatattcaatgttttgtacaataatcttcatggtgtcataccaaatgcgatcttcagtcttccgtcattaatacaagttgacttatcttacaacaacctacatggacaacttcctattgacattggcaatgcaaaacaactagtatctttaaagctttcatcaaataagctatctggagatattctgaatgctttgggtgattgtgaaagtcttgaagtcatcaggttagatagaaataattttagcgggagcatccccatttcattaggcaacataagtagcctaagagttctcaatttatctctcaataacttaacagggtcaataccggtatctcttagcaatctacagtatcttgagaaactaaacctatcattcaaccatcttaagggcgaaatcccagcaaaaggaattttcaagaatgctacagctttccagattgatggaaatcaggggctttgtggtgggccaccagccttacacctaaccacatgtcctattgtgccattagtatcatctaagcacaataacttaattttactgaaagtgatgatcccactagcctgcatggtgtcacttgctacagtcatatctattatttttatttggagggcaaaactgaagagagaatcagtatcgttgccattttttggtagcaatttccccagaatttcatacaatgctcttttcaaagcaacagagggtttctcaacatccagtttaattggcagagggagatatggttctgtctttgtagggaaactttttcaagaaaacaacgttgttgctgtgaaagttttcagcctagagacaaggggagcaggaaagagcttcatcgcagaatgtaatgccttaagaaatgtgcggcatcgcaatatagttcctatcctcactgcatgctctagtattgattctaaaggcaatgatttcaaagctctagtgtatgagttcatgtcacaaggggacttatataatttactatatacaacaagacatgatagcaactcttcaaagttgaaccacatttcattggctcagaggacaagcattgtgctagatgtatcaagtgcattagagtacttgcaccataacaaccaaggaactattgttcactgtgatctgaaccctagcaacatccttctagataaaaatatgattgctcatgttggagactttggccttgcaagattcaaaatcgattcttcgtcaccttctctaggtgattcaaacttaacatcttcactcgcaacaaggggaaccattggatatattgcaccaggtactggttgggattttatcttgtttggtatatattgctacctattttctttttactattatgtgacatgctgatgtgtgcgaactcaaatattgccaatgaaattgtagaatgctcagagggcggtcaagtttcaactgcctcagatgtattcagctttggagttgttctcttggaactatttattcggagaaggccaatagacgacatgtttaaggatggattgagcattgcaaagcatgtagagatgaacttccctgacaggatactagagattgttgatccccaggtgcaacacgagctggacctttgccaagaaacaccaatggcagtaaaggagaaaggcatacactgcctgcgcagtgtgctgaatattggactctgctgcaccaacccaacaccgagtgaacgcatcagcatgcaggaggcggctgccaagctacacggaatcaatgattcataccttagaggaaactagctagggatctctcatagcattgtgttcatctttcggtcaaatagttgtgtacaccattgagtaaatgagtggccattgtcctagtgaaatactgaaatgtggctttgtcaccacctgcgacaaatgtttatgttctaatatactgtttgatttgtttctgcttgatattaggtggccaatacatcttgcatcttccataagtcattgtatttcagacctcatgttggcttaacagtaccatagcttgtatagtgaatgaccaagaacacaaaaaatcacatgatggaatgctcatgtcccgtcctttgcattgttagcagttggggcctttgcataaacattcatctgcttgcttgtcgtagtttatcgtccactcgtatagctttggcagacaccggttacagcacttgcaggtcgaaaggctttgatcctgctcgaggtaacaacgatggaagaaactagaaactagttaaactacattgtgcaagcatctgacatgaccatcagaatttccgagtactttgccctgaactgaactgatagttggcagatggcattgcaggatgcctcagccgctcctcactcacagcgtgtcttgtccagctctttggctactagcaagatagcggtgaatgccgtgcgccaggggcggggacgggcttggccgcggccgttgcctctgtagagcaccgcggtcttcactgccagagagggtggaccggcctccacctacgcgggccctagacggcgttgcctccgtagagcatccggccttcagtgctagagggggtggacctaactccacctacgcgggccctggacggcgttgcctccgtagagcaccacggcctttaccgccagaggggatggaccaaactccacctctcatgagctccggacggcgccgcccctttaagccacatggtctccaccaccgagggacgtcgccctatcgagcgttgtcatctgccacgactgaggaggtcgccccaccgttcacttgagccccttcagtgtggtctccaccgaacgttggggtatccaacgtaaaccttcaggcacaccacaacacccgagtaggggctagaaattatttgctccccccgaatcccggagccagcagatgagggggtaccgttggggaataaccccaagcctagcatatactattagagaggacctccatacttaggatgttgtataaactaatataataatagactagaacatcccaatagcattgcccctctaatgtaattgataagggtaacactataattttcagttacatataaataaaatgagccctccaagtgcaagggaggaggatcttctcgcatggcatcgagggaggagtgatcctctctcccccatcttctctcccaaggattcaagcttgggctctctcccacggaggaggggggcccttgccatgcatgttggactttgttccaataataacgctgcttgatcaccaatgacgagctgagccaaggtgcaaagaacttcggaggtgaatgcaataagcacaaatgtcattcatcggcctaaacgatgagcaaacagttcgaatggagagggaaaatcatgtggggatatcacgtaagtgtataataatttagaaaaatattggggccctattgaaaatttgtaactttttctttctttgcgaacacaaaatatgctaacttggaagtagaaagtttctatctatataaatttcttaagaaattattcataattcattcgtgttaccctcgaatagggatcacaacatcattaaaaaaagtaattcaaaaaatcatttgtataattatgaacaaactaaaaacaacaagagaaactcaaaatattatgaatgtataagaagtaatttaaatcaaatctaaaagtaatatatatatatatgatacaattaatttaaatatacaataaaattaattacaatatatattttttcatcagaacattatcgtataacatattgctataaaaatttatttacaacgaatataatgatatattccaattgttgattggataagtgatttaaatgaaattttatttgaagcttacttattaggaatcttttatttatactgttgcatgcttgcatactttgacgtgggaaagagatacattgctatatttttaccatctattggtataatagttggttttcattaagggtgtgtttagttctttgggtataaagtttttgaagtacacagacacacatttgaagtattaaacgtagactaataacaaaataaattacagattccacctgtaaattaactgtgagacgaatttattaagcctaattaatccatcattagtaaatgtttactgtagcatcacatttttaagtcatgacgtaattagactcagaagattcgtctcgcaatttacatgcaaaccgtgcaattattttttttcacatttaatgccggatgtacgtgtctaaacagatgtgacgtttttgataaaatttttttatctaaacaaggcctaattagtgcacatatgtgtctcgaggttttcgcaggggctcgatccgtggcgccggggagtatcgcctccgccatcgtctacgttgccgacaaccagctcggtcgtcgtcctcgtcagcgacgtcagctcgactggagaagactgctactccgcctctgccaaatcgatacccatcgatgagacgtatcagctacgccgcgctgaaccaatagcccaaaaactgaatcgttttccctgcctctgacctactctctccgttaaaaaaaaaatctagaataggtgtaacatattatagaacaacgaatttgaacagatgtatagctgtgtttagttcagcgcaaagtttggattttggttgaaattggagatgatgtgactgaaaagttgtgtgtgtatgacaggttgatgtgatggaaaaggactgaagtttggattcaaactttggatctaaacacagcctatgtctagattcgtagtactaggatgtgtcacatctagtactaggttgattttttatgggacggagggagtaccattttgtcactctctgtgaatttgggcctgtctagatccactggcaaaattttacacctgccacatcaaatgtttagacatatgcatggagtattaaatataaacgaaaaaataactaattacatagattgagtgtaaattgcgagacgaatcttttaagcctaattgcgccatgatttgacaatgtggtgctacagtaaatatttactaatgccgaattaattaggtttaataaattcatcttgcggtttataggcggattctataatttgttttgttattatactatgtttaatacttcaaatatgtatccgcatatttaatgtgacacgctaaaactttacccccttgatctaaacacagcctttgtctcacggaagtatatctgttgattgttgactacagtaaaatcgtggatggatgtgtggttgctggtacatcactcgttacaggaggggagggaggactggaggagctcctctgtagctctgctccttttcagcacaggtcgtcttcacaggtaaggctgtattagttccacgttaaaattggaagtttaaaataattggaacaatgcgatggaaaagttagaagtttatgtgtagaaaaattcgatgtgacggaaaagttaaaagtttgaaggaatctaaacagggcctaaaatgagccaaaagcctgtctcacattgggttcaaactaatgctgccttcttttccgcatatctaaatgataattttttcctttttcgttattataattttcaaattattaaatagtgtgtttttaaaaaacttgtttatctttaaaaaattcaaatgaactcaactttagagtttgtaaaagttaacgcttaatcattgctgcgctaatggcttatctcattttatgtgccaccaccaaatcgtatattcaaactagtcccaaatcactggttttgagcccatctttgactagtaatgatataaaaaaagggggaaaaatatgatatcagaaaatggtcaggactgcctatcatagttttggcttcacatggttctaagtttgtttcttgcgtcttcaccgtgttcgatccgttgaagtttctaccaagtcacatgaccagcgttttggaaagacaacaaatatggagatgttttattacagcctcaaggagttgtaaaatactattttgggggagttgggatggtgacaatttctgcaggctgagggagactggcgctgattggctccagattggccattgtcatccctgtaccaatcacaccctgcccaactctgcttgaggactctcccttttggttcttgcaaattttccatgtggaagatttttccatagcagcagcgaggacctgctagaagggacagattttcagataatgcttgcatcaaccatggatagaggttgagaggggttctgaagaggaacctattcccaagcaaatggctataagtaggtagcagctgactggcaccacctatgtactgcactctgcaccaactgcccagcacagcgtgtactccttacttggtaaggtacacttttcgtccctcgtctagctagtattcatcggcattctatctgattgagcttagtaggtgctgtttgccaaaattagaagtttggttgaaattggaacgatgtgatggaaagttgaaagtttatgtgtgtaggaaagttttgatgtaatagaaaagttgaatgtttgaagaaaaaatttagaactaaactaggcattaatatgattcatgtgggttttgattgtgcgactggtgtagtggtgttccacattacactcttcattagtgccaataggagttagtatagccatccttcaggggtcaatatttttccttttaaattattttctgtaggaacaactaagaaagcaagttttcggatagaggaaaagctgaatattaattaattcttcctatctgtacttcttgacacaccaatattaatatttttcgccaagatatttttaatcacatccactataaatatagtaggtgacgatcttccatgttccttcaaaaagaatatcagttcatactttttttttgaaacggaagccaggctaagctggagttatattaaggagaatagatagtatttacaatatcaccaacaaaggtgaaagagagagaaaacaagggaaacaaggaagaaaagcaacaaggaaaacctaaaagaaagacctaagtggatattctcgcgatgtttttttgccccacacatgctccaaagtttgatttcatcttgaattttggcgagtagttgcggcatggttttctcttgattttggaaaaccttcctgttttgttcacaccatatttcccatgccaccaacatgtggattgactcgagtgctttggccttgcttttgcctccttgagatgttcttctgatccaccattccaacaatacttcgttttcatcgtgttggtgttctatatcgctgcagttcagtctactcaggaccctctcctagatctgacgcacaaaattaagtgcaatctttgaaaagatgttgggcggtttcaaggttcctgtagcatagttggcagaaatagttgtttggccattgtctgatctgtagcctatctgctgtccaaactctattttgcaatagaagtcatgcaaagtgtttgcatttggaaggtgcccattgcttctaaatcagttttgcagccgctaagcttatcctgccattaaactgtgctatgtaggcggactttgcgctgtattttccatttgctgtccaccgccaagttatggtgtcctcaacaccttctgtgagtgcaacgccgctattccacacgtggtagaacacctcgaagaattccttgactagctcaaccgtgagattgtgcctaatgtctagtatccattggtcatttgctagtccttcgtagacagtcctacctttccttttggcatggttgtataaggctggggctaactccttcaatggttgctctccgatccaatttgattcccagaaactcgctttgcgaccttcacctattgtcaccttggtggcggaggcaaatagccttttgtccatttcgtcacaagggggaggtgttcctgcccaaggtttgtttgggctctcccaactgaaccatagccatcgcactctcaaagctcgtgcaaatttctctaagtccaagactcccagtccccaagtttggtgggtgcacatactgttggccaatttactttgcatttgcccccactaatctcttggtcgccagcccagaggaatctttttctaattctgcccctatcatgcaataaattttttgggggtttcagtgctattaggaagtatgttggtattgaggttagtactgaagagacaagggtcttccttcccacctgttgcaacaatttccctttccaacctgcaagtcgagagtggagcttgtccatgactggttggagatgcgctctcttgattcttcctattgtcaaaggtagtcctagatatgtgatggggaaaccagttcgatttccattgaaattattcagcacgtcctgaagatctatgttttcacatcttataggcaccactgagctcttgcttaggttcacctgtagccctgtggcacgtccaaagttttccagcaaggtgattagactgtccacatcagctcgacttgggttcagaaagattgctgcatcatccgcatatagcgatgttcggaactttgccaccctgtttgatattggcgacaagatcccttggtctttggccatatccagtatcgtttgcaatgggtcgattgctaatatgaagaggtagggtgaaagggggtccccctggcgcagtcctctcttgtgcataattacttctcatgttgttccattcagcattaccttagatgtggtggttgatagaattaaggcaatccaatctctccaccgtgtactaaatcctctccacggtagcatttccaacaaatattcctaggatatagagtcaaaagcctttgcgatgtccaacgtgaaaaggaggcttggtttccttttgttgtgcatcgatctgaccaagttgcgcacatataagaatttaccttgtatgcatcgtcttttgatgaaagcactttgggcatgcaagaccaggtcatccaatctcatcgcgaggaccttcgatatgagctttgccactgagtgaattaagcttattggtctgaaatcatgcaccagttgtggtgaatctttttttgggatcaatgccaaaatggctttgttgatgcatccaaaatttccgcctgcgagtctaaagaaactatcgaacatctgagaaatatcatgttttatgatgtcccagcaccccttgaagaatgccccagtgaaatcgtcaggtccgggtgccctctctgtcggcgaccctttcaccacattccatatttcatcctcagtaaaaggaccatccattgttccttgttgtattctctgcactcataacgcatcccaattaagtgtgcattctcttagtttcttttcgcctagtatggaggtgaaatgatcatgtagcagcttggccttgtcctcatgtgtgtatacagctgcatttctgtgttgtaagcagtgtatgaagttcttccttttcctagcattagcttttatgtgaaagaaacgtgtgtttgcatctccttctttcagccacctaacccgcgatgcttgttttattattgactatccataatctcttgcttttattatctttgcatttaactaagacttagaataatttggcagagaaggctggtcatgaagatcgctacaatcagacagtatatgattttgcttatggctagcaatgtagtccaaatcatgtgcacctcattatatggaaatgagacagatcgactctcattgcttgagttcaagaaggcaatcagtctcgatccgcagcaagcgctgatgtcctggaatgacagcacttacttttgcagttgggaaggtgtcctgtgcagggttaaaactccacatcgtcccatttctctaaaccttacaaaccaaggtttagttgggcaaatatccccttcacttggaaacctaacattcctaaaatttctgttcctagacacaaattcattcaccggagagatccctctgtcccttggtcatctgcatcaccttcgaaccatttacttgagcaataacacattagaaggagcgatacctgattttacaaattgttctagcctcaaggccctatggctcaacggcaatcacctagttggacaattgattaataatttcccccctaagcttcaagtgctgactcttgcatctaataattttactggaactatcccttcttcctttgccaatatcacagaacttagaaatcttaatttcgcgtctaacaatatcaagggaaacatcccaaatgagttttcaaacttcctcatgatggagattcttattttgggtggcaatatgttgacgggtaggtttccacaagccatcttaaatatttctactctcatcgatctttttcttaattttaatcatctaagtggagaggtaccatccaatatcctttactctcttcccaatctacaagtacttgcattggacttcaattttcttcaagggcatatccccagctcattggtgaacgcctccaacctacgtgaactggacatatcaagtaataatttcactggggttgtaccaagttccattggcaaactaagcaaactgtattggctaagtcttgaaggcaatcagctccaaacacacaaaaaggaagattgggagtttatgaacagcttagccaactgcactaggctacaaattttttcgatggcttataatcgactagaaggccatctaccaagttcgttaagcaacttttcgactcatctccaacgacttcatttatacggaaatgaaatatctgggtttctcccctctggcattgaacacctctcaaacttgattgatttatcattaggaactaatgactttactggtacccttccagaatggcttggaaatcttaaacagttgcaaatgttaggtttatatgaaaactatttcataggatttattccatcgtccttatcaaatctatctcaactggtatatcttggactacattttaacaagtttgatggacacataccaagcttgggaaacctgcaaatgcttgaagtattaaacatttccaacaataatcttcattgtataataccaactgagatttttagtatcatgtcaatagtacaaatcgacttatctttcaataacctacaccgaaaattttctactgacattggcaatgcgaaacaactaatatctttagaactttcatcaaataagctatctggagatatacccaatgctttgggtaattgtgaaagccttgaatatatcatgttaggtataaacagttttagcggtagcatacccatttcattaggtaacataagtaacctaaaagttctcaacttatctcacaataatttaacttggtcaataccagcgtctcttagcaatctacaatatcttgagcaacttgatctgtcattcaaccatcttaacggtgaggtcccagtagaaggaatattcaagaatgcaacagccttccagatggatggaaatcagggactttgtggtgggctaccagagttgcacctacctgcgtgtcctaccgtgttattggttacatctaagaacaagaactcggttatattgaaattagtaatcccactagcctgcatggtatcgcttgctttggccatatcaatttattttattgggaggggaaaacggaagaaaaaatccatatcattcccatcactcggtagaaagttccccaaagtttccttcaatgatctttcaaatgcaacagatagattctctacagccaatttaattggaagaggaaggtttggttctgtataccaagcaaaactatttcaagacaacattgtggttgccgtgaaagttttcaatctagaaacaagtggatcgcaggagagcttcattgcagaatgtaatgctttaagaaacttgagacatcgcaatctagttcctatcttcacactatgcggtagtattgatgctgaaggcaatgatttcaaggctttagtgtatgagttgatgccacgaggggacttgcataaattactatactcaaccggagatgacggtgatgcttcaaatctgaaccacattacattagctcagaggataagcataattgtggatttatcaaatgcattggaatatttgcaccataacaaccaaggaactattattcattgtgacctgaagcctagcaatatccttctagatgacaatatgattgctcatgtcggagattttggccttgtgaagttcaggaccgattcctccacatcttttggtgattccaactcaattttttcccttgcaataaagggaaccattggatatatcgctccaggtaatttgaaaattttatcttgcttttgtattactacatatttctttaacatacctagctatatgagctatactttggtcttatatatgcattttacagaatgcgctgagggagatcaagtctcaactgcctctgatgtttatagctttggagttgttctcttggagttgttcatatgtaggcggccaatagacgctatgtttaaggatggactgagcattgcaaagtttacagagatcaacttctctgacaggatacttgagatcgttgatccccagctacaacaagagttggacctctgcctagaagctccagtggaagtaaaggagaaagatatacactgcatgctctctgtgttaaaaattggaattcattgcaccaagccaataccaagtgaacgcattagcatgcgagaggcagccgccaagctgcacataatcaaagatgcctatctcagagggaactgaagaagtttttctggtaggaatacggataaggcttgtgtatatttgtattaagcttgggactgaagaagctagcagtgctattatactttgttgtttgttttcatttctctatgaatacattacaacaaaaattatcaacgagggatttcccagctggttgagtagatctcaaccattgtctcactaagacattgtgttccctttctcttagttacactggagaacaaatatttatagtgaagagtattgtttatttgtttctccttcatacaaggtcaatgaagtttggcaaatcagaaattcagaaaatactccctcagtctttttttatgtctaacgccattgaattttgaacataactttaataattgaattttgaacataactttaataattgaattttgaacataaatttaataattcgtttaattttaaaaaaccatataatcattttttattacaagtacattaagcatggtttctattttttacatacttagattaaacgaatggtcaaatgtatatataaaaatcagagatttgttctggtccagcaaattatacctcaatgcaccagtacttggtggtacctgattgaatctaaccgtccaatgtccaagggcatgatgggaatggatcgggatcaggtgcagtccctatagagactgcaactttggcagtagccaatctgaaccgttcaaaaaaaaaatcagacggctggctcacaccaccgcactagctagcacccaaaaggtcatcttcttcctcgagcggtagagccctctttcttctccatgtcaatggaagtgctctgtgcttcttcttacttcatgacaagttgacaactacgggaccttcgtacaaaccattgttgtgaaagtgttcaacccgtcaaggagattctatttttcgtgcttcatcatgatgttcttctatgaactcccataaagtgataatctgcactgccactgtcaaacgccaaggcagtaattaacctgcgagtagaccaagccaacctcgcctcctcctcgttcgatcctacctagctacccgtccaaatcaccaccaaaccacgagcatcaggcaagtaacaagctaagcagcacaactcctggccttgagcccttctcacccattgatacctccgccttgttggtgaccacgctccgggtgccgcctccaccgctccactcttgaagcccactggacatggagaggactaaagggttgttaattcgtagacgtcggatgcttcgtggatggttagatcaggtgctactgctaaagttgcagtaacaatagcaacttcacctgatccgaatccgatgggaatcatcctggactccacgccacccatcctctcgcaggcaccacaatccccccaacacttctccccactgcaaaatactccatgggcgtttgacgctgccgattcattccctcccatcaatgccgctgcagcacacctgttttgtcggcatgagtagtgctgagccatcagttccacctacatgcaggggcggatctatagtgcaatgaccaatgtcaggcgacactgatggcttttggtaaaacctatagcaaaactgattatctatatattataacaccatgatctaaacataattagtatattatgacactaatagatacgttatgacaccaacgaatcaattttctggatccaccactgcctacatggttgcacaagaacccacgcaggcttcccgccgatgtcgaggtgctgcagcacgccggcgtgctgtgtcgcgtacggcaaccactacttctagacaagcaggggcactagagatggttctcttcttccgctccgtcgtccggccgcggtggtgggacaagccagaccccgcctggacggaggacacacagtgacaatgcgatgcatgcacagtgaggattgattcggagtttctgactaatggtagtacataacagattaacagatatataggtacattactaatatggtactcccgaggattatgttgccatttgcaaatctctgcacaatgttgaatagttccacattggttgtggaagggcaaatgacctaagatataagtgggggagctcctcacctcaatggctagcttttagggtgggaaaaaccctttacaatcctacaattggtatcagagtctggctaggttaacatctctggcccgatggatacagtgtgtgaaggcccaatgtgtgaaggggccatgtacagtgtgtgaaggccggtagggcccgaatacggtgaagggctgagggacaccaatgtgtgaaggggacatggacatggccctcgacctcccgctttagggcatatcgcccagagagtgagtgcttgtttgctccattgacgacgactcccaggtgtgcttgtcttggtccggctcgtctgtagatagggacgacaccatggcagcgacggcagccaagggtcacacagcggcggcggcggcacgcatctggccatctgggggaggaaagacgccgctccaatccacttcccaaattttttttctatgcgaaaataccaccttacccttccaccggtgcggtaccacataaacgactaagcagtacatggtggtaccgatcaatattagccgttggatccggtccatctaacagctaggatttggtaccgcccaagcatgctggacagtaaaaaatctcacctacattttctttttgctacaaatcaaaaggacctaatgtgggctcttaattctcactagtaatctctctgagtctgtagtatcagcactgctggatgtaatttcattcaatgtaggtattgatctgcaaacaatccaggtcgttaacaacaacaacggttcaaaacaaggagcaaattgcaaaaatacgtactatcaacgacacagacagggaccattcgctgcatcccagaaacagcggacgaattattacagaaatccatgggcgtgaaaattcttgtcttttcaaattaggcttgttaaacgcatctataagtttttgcattcaatttttaccgtccgtcttatttgaaatttttttataattagtattttttttgttatgagatgataaaatataaataataatttactcgtaactcatgtttttaaattttttaaaattttcaaataagacggacgatcaaaattggacgtgaaaaaccatggttacgtacacttaaaatgggacggatgtagtactttgcttctactacatggagctgagccggtgagatagattgaagatgaggatcaaatcaacttcgtcaaacaagcaaatcattaattagcacataattaattaaattttaattatcgtgaacttgaaaaagttagatttattaataatattttaaaacaatttttatataattttttttataaaaaatacattgattagtagtttaaaaaacatattagtagatgccgatataaaatctatatcttaattagaaaagaattgggcaagagtatctatccacatgattgttgtggtgtcttacttccatttgataccagggtaatccatttcatcatgctcgtggcgtgcaatgagtggacaacagtgaacagttattccccaacaaactctttacgtatgtagttcttgccctactgctacataataagagaggcattacataatttacaaacgattaattcactaaaggaccgttatttctcccaaattgcttgaagacaaacgtctgtgatgaggagtcacgtcgtcatttgactggagcaagatcgaaccgtctgagttgacttaatagcactgatggtaatttatgctatagaaccgttcctgatgactcagtaacacacgctttgcaaatttacactcaaatgacccgtccgtgatgagtacaacttgtatacaggactgaaagtgtgaaaagaagcgggcaatccttagcggatttgtgctatgaagtttgggcgtaaactcgtagcaaaatcaagattctgcagtaactaattaacgaggtggtggaataatcaatggggatgttgctgccatcgccacgacgatggaagccactggggggtcctgtctagatctacactctctgcagtcgatcgagacgcttttttttttttttggcatttgcaaatttgacaccggtttttttaattttgcaagggtgccactcgaatggtagttctagtggtatttttggaattttctagtggtattcttacaataacgattcaaagtagtgttaaatttgcaattgcccttttttttttcatcgttaaaacgacaatacaacttgttaaacgcccaacaataatgtccttttcctctctgaattgctagttacgaattgttttagattggattgtttgtgatactaagttttcaatttaaatagttgtatatatttggttggatatagaagtcaggtaaaatatacccttctctaaaaaaataataaaaaaaagaaaacgaagtcaacagtatagctatgcaaactaagaattagttgcggagtgcacaatttgttcatcatattgcatccgttttatttacgcttggcatacatatagtccaatgaatataggagttctctatttgttgattaactgattcttttaaatctcagttactttttttagaaacaaatacttttttcataataacaatgtgtgcttcaacattatatcctcacattttgggataccagattaaaataaagagagaataaaactgagctcctcgacaaggtgatatgaataaatcgagctacatacatgcatgcatgtatggttgacttagaccagtcagtcgtcgattgatatcgccgataaatgttagtcatggcaatgtgttagcacgtaccgtggtccgtgggtagaaacttacaatcttatccttttttttataatagaaatatattatatctccatgcctcataagacatacaactataaatttgttacaatcttgttatttgggattatagacgatgtattaaataattaaagcatataaaccaacaagatatacagtacatcgtgatgaaatgtttgcagtactttttatctttcgtgcttgggaaaatgggagatgaaacgaatgagactggagggtgtactttgagaaccaagagctgtctgttttgagcacatatgaacaataaaattaaaaaaaattgacttaaaaaaagtcaagggagtatattctaaacctaccttttggtagaaacttacttttacaagcatggcaaagataattcttaactatcttccaaaaataaaataaaaaaaggatgccaaacatgcactcgcgactgccaatcgattgattaattaggttgtcctcatgcaatgcaaatgtcgattgacgacgtctacccttatcggaatgacttattagcaaataaagactaatttatgagtaattagtaattcaaaagtaaataataatgtaaaataaattatgataaaagaagtacaaaatcataaaattaagttataaaattaaaattttactccctccgttttacaatgtaagtcattctaatattttccacattcatattaatgttaatgaatctagacatatatatctatttagattaatgttaaaaaaatatctatttagattcattaacattaatatgaatgtggaaaatggtagaatgacttgtatcgtgaaacggaggaagcagttcatagctataagcgtaaacgtaacgacgaggccagtcaatctcacagcgacttcttccacttaaattaatgtcgatctcaaactacccaagtctgacgccttcctactaaccaccttattattgtacaagctgcaactcatcgcgacgtcgaagcaaggcccgcaaagtcagtcagtaaagtagtagtagactgatgagattacgtttcaattggttcgttgtgcctataaattaaggcacataccatgcgtgcaagtatgtatcattctgccctcggttgctttactaagctagttttgttgctcgatcgatccatcggtgttccgcaaaataatttgttattttggattcaatcaatcaggtcttcagtcgcctttaaacaattggacagcttgattcgagtgccggcagcctgcagccgacctagctgtaagcatctctgcttgtttgttccggctatttcatttccataatacattaataaaaggggtaacaattaagtatggaaattttgttattttttacagcctaaccctgacataatatttgtgtctcgttaagtttatttttcacctatcttacacgtacatatcaatataaaattaaaaaaaagactataataactttactttatcaaatcccaatacaatagccttactttatcaaactttgatgcaataattactctaaaaacaagggccccttaaatcgtaggaatgaaaaaacggaggaataggaaaatataggattctgacaggaatgtaaatgtaaaacagaggattgcaaaacacagaaaaaatataggaatgatcgtttgattggatttcaggaaaaacacaggaattggatgagagagatagactcaaaggattcttaccaagaggttagacctcttgctaagttttctccaaaacataaattttgtaggatttggaaaacttcaatactttgaattaaagggctacatagtaaaatttcctatagatttcaatcatatgaaattcctttgattcaaatgtgccctaaacttatttaggacaaatagaaggagctaaaaccaaacctattacggaacagaggaaatgtatcactacttggctgagttctttaccccactttcccaactcacatatctcgttttccgcgcgcacgcttttcaaactgctaaacggtgcgtttttttaaaaaaaattatatatgaaagttgctttcaaaaattaaattaatccatttttaaaaaaaattgctaataattaattaattacgtgctaatggatcgctccgtttttcgcgtggaggagacgtgggttcccaacccgaaggagctaacagagtgttagcttgcttttcatcgcatgtgccattatggagcatagtacttccaagctagtgtaagactctgcatctaattaggtttcaaaaataaaagactctgcatctaaaacctgcattaactagagggatcagttcctcagacgaagacgggggtgatggtaacatcttgccatggtttggtcccaagtgttccagatgtgattgtagtggtcatttttggtaccatattaaaagttcatgcggatgaaggcctgtttataatctttggtgctcaaaccatggtatattaggttaaccgccttacacgaaacggtttactatacatacgtgcatatctggaattttataaacatgctgttacaggtaaccattatgcaattgaaaaatgctatgtgtccacggggcgataaatcattgtcgtgatactataatatgaatagattcttttttctttgatattttcgatacaccgttttatgtgacagccgaaaaggtgtttattgcaactattgctaacacagattcagtatcaccatgataggaaaaagtaagaattacaatagtatgaattaccccctaaacgacaaaaatagacatttgacatctccaattcatcgaaccggacaaattacacccctaacctgttccagagtggttttgatcctacgtggtgtaaacttggtgatccagttagctaaaaaaattataaaaataagtaggctccaactatcagctacatctctcccatcttctcttttcttctgccttcttccccttcgatctctctctctctctacctctggacggagcaggcaagagggcggtggactaactccctccataggctggcgatggcgacaacctccatccttcaacttgtgtgactccctccatggagctggtgacggtggcggtctccatcctctacggtagaggatgccgccccaaatatccatgctggaggcagtgactgcagagcttgctggaggaggaggtgacgacggagcttgctagagaggaggcactggtggtggagcttgctcgaggaggcagcagaagtacgcgaagctcactagtagacggcataacaagcatgctatcgtgtcgatgctttcccgccacatgcgttcgccgacgagggggtgaggggattcgtccggtttgatgaatcagggtgtcaaatgtctaagtttgtagtttagggggggtcatacgtattatcctagtagttcaaggggtaattcatacttttcccaccacgatatgcatatgtttcatatgattttaagcttgttgcaactgttctgaacactaaaaacactcgcaaaaaaagttattcctttcgaattatcttttgctcggccacaagtgtttagaaaggaaaacaaatccgaatcataattaattcctcatgtaggtaactaagtactacttcttaacaaattaaaagatgaatacactttttaacacctttactagtaatatactccctcagtttcatattataagtcatttgacaatttttctagtcaaactttgttaagtttgactacgtttacagaaagattcaacaacatctaaaatatgaaattagtttcattaaatctaacattgaatatagtttgataatatgtttgttttgtgttaaaaataatactataatattctataaattagtcaaacttaatgtagtttggctagaaaaaaaagtcaaacgacttataatataaaacggagggagtactattctattcgttcgaaaatacaaggtgtccttgttttccacaaagtcaatactttaaaattttggctaaaaattaaataaaaatacatgtgtttagtgtcatgtatatagtatcactaggttcgtatttgaatgtatatagtatcactaggtttgtatttgaaaatattttcacgtgaggctaattttgtagttgtttataataaaaactaatggttaaaaatacaatgttgcagaccatgtagaaacctaatacgtcttatatttttaaatggagagagtaggtgacatttttccatgtttctttacaagaaaaaaaactatttcttcacattatggactatttataatatcttactttaatttattatatgtagaaataactaagacctagaatttggcagtggtggattggtcatgaagatcattataattggactgtgtcttttggtgattatggctagcagtgtaatccaaatgtcacaccctaaaaatcaaaaatatataaattgttgtttaattggaattattagaatttattttaaaagcctagaagagaagatctaattttaattaataaattccaatataaaatagggccagataaaatttcattaaatactttacttaactctataattcctagatttttctgggatttatttgagctaaggaagtatttttaataaatgaaattgcatttcatgaataatttaaattgaaaaaggtttttaaaatcctcttttggctttgggccgaaagtcggcccaaaaccttctctctctctccctcggcccagtcggcccagtccgaccgcagcccagtccgcccgctcgcgcgcgcgcgtcagcccgctgacaggtggggcccacctgtcagggccgtcgtcttcctcgcaccgtcgcccggccgaaccttagccaagccgcgccgccgtctccttccaaatccggctgcccctttccgtttccgatgaaattagtagaggggaaatgatcttcgggatcttctctacctttttccttttggaatcgatcgccaattcggtttggaaatccgtggattcgagttcgattcggatcgatctctctcctccgaaccctagttgttccttcacgtcgccggtcgccgtgggccttcgtcgccgcctccttgcccctttaaaaggacccccaagcccgccgctacccgtcgccaccctcgccttcgcctctcgtcgccggtagagccctagcgccgtgtagcctagcgccgccgtcgccgccgttcgtccagccgtgcgccgccgccactccagtcgtcgtcgtcgctcgggaaggccgccgtcgtgatcgccaagtcatcgccgacctcgttcgcccctccgtcgtcgccgtaggccgccggaacaccgtcgccgtcgtcaagccgaaggtcgccaccgcttcttcctcgacgccgtcgccgtccgttgatctaccgccgccgttttggtcaccggtgagttcgccgcgtcgctctctacgtgctggtgccctccgttcgtgccgtcgcgccgtcgttcgccgacgagcatgcacgcccgagccgccgccggtggtgacgtcgtcgctgacgtcatcgtcgtcgtccatccgtgagccgcggtggatccgatcgatcttggccgtccgttttggataggatcgatctcggccgcccaatctcgtgaaccgccgccgtgcacccgattcaccgcgaaccctagccgctgacgcaataattcccttttccttttcaaaaataattcattattgcgtcataattcaattaaaatccatataagtgttttaatccgatttaatctttgaaaattcataactaattcatcttagctcggatttagttggttcaagtctctaaatttttctaaaattgagatctacatgttaaaaatatccacatgtactgttcatgcttgtttatgtgctgttttggtgattttgctcttttctctttagattccgacgtttccggagagtccgtttttacaggagaagaatttgaagagttccaaggccagcaaggcaagtcacacagatcccaaacaaccctttgagcatgttgatcctgtttaaagctattgtttctattcaactattgcatttattttcgaatgtcattgggtggaattaacttattgtttgttatagcccttttgttcttgattactttattccttgataccttgggttattataacttgactagttgggctttatatattggttcagctagatattagatatgattgcttagccatgcttagaaacattagcactattgggataacttatggctcactattatttaatgatggcttaatgatagctcacgatggtcaatcgtgattggttaattaattaaattgccaactaaaacctgataatggtgagttgtgagcacatggttttgatggtcgtgctcatgacaattaaggaccggttcacgagtttcggttgtgaaacattaactgtgccaaccacaagccagcgtgggcaacggctttaccttttgtatagtatggttcattgcggagcaccagactgagaagtggcggagataagcccacgggggtcgctggggagtccatgccttgttttataagggggtgattatgatccaggaatggtgcgctgtggtggattgtgttgtgcgaggggtactgtcacagctcctttctgaggtaccgtggtggtattgaggcgcatggtgacatgttgtggggctgtgtcttgtgggtacagtggtacacctctagccagagtaaaactattcgaatagctgtgcccgcggttatgggcgggtctaacaatgtctttcgtgattagtttcacacttctcaccataataaaagatgctataactggtaataatttgtttagctcctggtttggaatggtatattcctggtttggagatagatctgtacagccgggtatggttgttcaggatggttgggcctgagcagcacgggtgtgctgtttagtgttgattaaaattgatgattaattactctactgttttataattctcaaatgtttgctaaatgctgcttttgcaaatgagccctatattatgccattctttggtatccttgtgcacttgcatatttgctgcgtggcttgctgagtatgtcatatactcaccttgcaatcattcatcagaggaggagttctacagtgatgctgctggtgtggaggattaggtgtagccctggtcaagctgcctgtggagtggagtcgtctgcgccgtttatcttttttttttccgctgcttagatctttatgattgagaggaactatctacctctgtaatgacattttattcgcttattaattagagtaataattgtactctattatcaatttgttattgtgtgcctcggctgattcctggacgagggttcacacacatataagcgtttggaattttggatagaaattccgggcgtgacaccaaaccatgtgcaattcattatatgagaacgggacagatcgactctcactgcttgaattcaaaaaggcaatcagtatggatccacagcaagccctgatgtcctggaatgacagcaattacttttgcagttgggaaggtgtcttgtgcagggttaaaactccacatcgtgtcatttctctaaaccttacaaatcgaggtttagttgggcaaatatctcctgcacttggcaacatgacattcctgaaatttctctccctatccaccaattcattcacaggagagatccatttgtcccttggtcatctgcatcgtcttgaaaccctcgacttgagcaacaacacactacaaggagacatacctgactttacaaattgttccaacctcaagtctctttggctcagtcgcaaccacttagttggacaattcaacagtaatttctcccctcggcttcaagatttgattcttgcatctaataatattactgggaccatcccttcctctcttgccaatatcacatcgctacaacggcttagcatcatggataacaatattaatgggaacatcccacatgagtttgctgggtttcccatactacagatcctctatgctgatgggaataagttggcaggtaggtttccacgagccatcttgaacatttttactattgtgggtcttgcttttagttctaattatctaaatggagaaataccgtccaatctctttgattctctgcctgaaatgcaatggtttgaagtagactataacaacttctttcaaggaggtatcccaagttctttggcaaatgcttccaagctgaaggtttttgatatatcgaggaataacttcactggggttataccttgctctattggaaaacttaccaaagtttattggctaaatcttgaaaaaaatcaactccatgcacgcaacaagcaagactgggagttcatgagctgcttagcgaactgcaccggcttgacagatttctcagtatctgataactgtctagaaggccatgtaccaagttcattaggtaacctttctgttcagcttcaacaattccttttgggaggaaatcaattatcaggggttttcccttctggtttccaataccttcgcaacttgattagcatatcaatcgatagcaataatttttcaggagtccttccagaatggctcggcagtctacaaaatttgcaattaataggcttatataacaattactttacagggattataccttcatccctttcaaatttatctcaattaggatatctctatctacagtcaaatcagttttatgggcatctaccaccaagcttgggaaatcacaaaatgcttcaagaattgactattggatataaaaatattcagggtatgataccaaaggagatattcaaaattccatcattgcttcaaattgatttatctttcaacaacctagatggaagtatcccaaaagaagtaggtgatgccaagcaactcatgtatttgaggctttcgtctaataagctatctggggatattcctaactctttaggtaattctgaaagcatggaaataataatgttggatcggaatatatttagtggaagcatccccacttcattagacaacatactcagcctaaaagttctgaacttgtctcagaacaacttgtcaggatctataccaccatctcttggcaacctccaatttcttgagaagctagatctttcattcaaccatcttaaaggtgaggtcccagtaaaaggaatattcaagaatgcaagtgccattcgaattgatggtaacgaggccctttgtggtggagtgccagagctacatttacatgcacgctctatcataccttttgattcaactaagcacaagcaatctattgtactaaaaatcgtcatcccattagctagcatgttgtcacttgctatgatcatatctatcttgttacttctgaacagaaaacagaagagaaaatctgtagatttaccctcatttggtaggaaatttgtcagagtttcttacaatgatcttgccaaagcaacagaggggttttcaacatcacatttaattggaagaggaaggtatagttctgtgtatcaagggaaatttacggacgaaaaggtggttgcagtgaaagtgttcaacttagagacaatgggagcacaaaagagcttcatcatagaatgcaatgcactaagaaaattgcgacaccgcaatatagttcctatcctaactgcatgtgcgagcactagttccaatggaaatgattttaaagctctattgtatgaattcatgccacaaggggacttgaataaattacttcattcgaccggagctgaagaattcaacagggaaaatcacggtaaccggatcacacttgctcaaagattaagcatcattgtggatgtagctgatgcaattgagtacctccaccataacaaacaagaaactattgtccattgtgatctgaagcctagcaacattcttccggatgacgatatgatagctcatgttggggactttggccttgcaaggttcaaaattgacttcatgggatccaatgactccaactcaatttactcaactgcaataaagggaaccatttggatatgttgccccaggtaatgctcatttccatattgtgtttttgtttccctctaaattgtgaattgtttcagcatagtatcatttcgagtaaaccgttcccatccatggcggtccatagagtatgctgcaggtgctgaagtgtcgacctatggagatgtctttagctttggagttgttctactagaaatatttttacgaaagaaaccaaccgacgatatgttcaaggatggcctcgacattgtcaagtttgtcgaggtgaactttccagataggttaccgcagattgttgacccagaattactacaagaaacacatgtgggcacaaaagaaagagtcttgtgttgtttaaattcagtactaaacattggactcttctgcacaaagacatccccatatgagcgcatggacatgcgagaagtggctgcaaggcttagtaaaatcaaagaggtgtttctcagtggcaactaaggtatatggccttgttatctatatctccatgattgtttctcatattatatgtgcattgttctttccttagtaaaataacaattaagaaggaaaactgatgctgagcttacattgcagatatcccaaaatcttaagtctgtggactggaccctgtagactctgtacttgtcaatacatctttggcaactgggatgagtgcctgaagctacatcttttatgtctcgctatatatacaactagctctgtactccacgaagttgattacatgcattttatttccctttgtgatgatgaccacaaattattgtacttgattatatttactaaactacttcttccgtctcacaatgtaagactttcttctagcattgcccatattcgtttagatgttaatgaatctagacatatgcatgtgtttgatttattaacatctatatgtatgtgggcaatactagaaaatcttacattgtgaaacagagagagtatcattgtgaaatggagggagtataatttaacggatgtcatgacacatgatttatgtaatttccaccaccgaaataagttgagtaactcatttaagcatcttgtaagagaagtgactaaattacacccacctcgcaagttatagtcttgatgtgttttactgttttttttataaaacaaatcatagtggtagaaaacagagacttatttgctaatatcctaagcggccatgtttgtggggacctaataaaaaataggactacctattaatctttcgatagacttgagcttcaaatcttacagaattttcaaccaatggatatagcttattttgaaagaattaacaaaaagaaagggataaacatttcaaaaatcataaatttagagaaaaaaacatttgtaaaatctaattttggtgcattgtaatagagcgtaagtgcactataactaagttctgtaacttaatataactacaagttgcccagcgaaaaaaatataactacaagttagatctacataaacacaaatcttgatgcaagatcttacggacaagaagaaaaatcgaaagacaggagcccaaaaatctgtagcaaagtgaaatagcaaaaccgataaaaaaaaaagcattcttatatgggcatcagatagactgttcagctctgcggcgagccatcgaacggcggcggcggcaatagtgaggatgcgtattggagcgtgacggctggagcttgtgctagccgatgccacatccgccatgcgagccggagttttaggtctccatccaggatcggacgacgtacggctaccaatgcggcgacctagccatgcatggccggcggcggcgatgagcgacgattttctccgctttctctggcccatatctcacggaaaatatatcaatccggcggccgcggcctcgattgatcacatcgccggaaaccagcccgacctgctccttgtcggcgatctgtaacctcaccaacgccaccgcactgcagcaggcttctactcctgcattttcttcgaatcgacgacacctatcagccagactgggattacagcgctgaggtttttgttttctgaaactctgaaccattttgtcactctgaatcttcttcagaactcttactttgtgaattggtctcgcagaatatggtgatttgttaactacagtgaatcatttacaacttgagttcagcagctgtatatctttttaagattggattaggtagttgctcgatctgttctataagcttcagtgcgaagtgacaaaggacatcagactaaaatattcagtagtacatatatactaatgttacaattccatgtccttgatcagtgaaagtgtactgaatatcagatgttactaatatatactacactaattttacaattacatatgtatttgatcaaggaaagtactaaccttaatccaacacaacaaattccagggaagcagtagaaagacttgacgaagatggacaggataggtgggtgactatgtctttgatcagtgaaagtgtgctgaatatcgaatgttactaatatatactaattttacaattccatatgtatttgatcaatgaaagtgtgctgaatgttactactaaccttaatcctacacaacaaattccagggaagcagtaggaagaaatgacaaagatggataggataggtgggtgactgaaccttgcgcactctggtacatacaacactcattacagggaagcagagtgcatgggagtggagatagtgctaaagccatcgacgttcgtcttcacccacagccatgcgagtggagcacttgactgacaatcacgatgtgttaggcagtcctccgcacttcatgtcttcaactgcagattgtgcatcctttctgaagaaaactggcgcctgattggaatctttcgtgcagttgactgcaaatcaagtctttgcatgccaagattgtgctaattaaagccacggtatccttctgttataaaaggaagcagtcgaattgtcgatgaccatgagccccatgagacaggctagctgctcctctcgctggtaatctcagtcatgcatatcaatctttcatttaattcgtttctgttcatcattttgttgttgggatagattggtgtatgttggattgcatgcttttggggatttgtgtgtagaatacatctaattatattcacagcacattctgtctagaaaggtaatgcatatatatacagatgatttgagacattttggttccattttatctgaggtgatgatcagcaattactaaatactactagctctgtttttttaatatatgacgtctttgactttttgacaaacgtttgaccattcgccttaattaaattttttatacggatacaaaaaaaagttaagtcatgcttaaagaacatttgaaaataaatcaagtcataataaaataaacgataattgcataaatttttaaataagatgaatggtaaaacatatcttaaaacgtcaacggcgtcatatattaaaaaaacggagggaataatacttgagattttacagtgtgtgtcataaccacaaaccatattagtttgcatgtctagcatattattacagtgcaaagtacattcagctcattaattggcacctaggagctgagggtttcccataacaatactcccctatatgttgattatgaagttcgatgagcgagctgacctctaagagcaagttttataattgaggtggctaacacctctaattccatacatatcatctccgtataacttaaaaggtaacttatataataggtaacctataacacacaaacctcaataactctaaaagaaaatctaagaagtgctatagacaagcgtctcaatctaagaaatgtcattgataaatctaacttcctagaaataccatcatatgagtgcctttgtcccaaaaatgtcatcgccattagattttcattagcagcccttcatgaaatgctataaaaagattattttaccatacgaattgttgaaagccgatgaaaacttccgccttttccgtcagtttacactaatttgtaggctgctctttacactaaattattgtaagttaacgaatgggagaatagctactttagtccctaaagtttctctgtaggatcagtttagtccctaaccttttaaatggtccaaagaaatccttaacctttgtcataaggcctataatagtccttgggtccaccaaaatcatcatatggatatgccatgtcatcattcatgcaaatctataatgaattgtccaatatacccttacgtatatcatagaaaaataaatataagggtgaattagacataaccataggaaaaaaatacctcttttttcacccttttgaggtatatttttgctcttacatgtaccatatatatttttttaacttttttcttttgttttttatttacctatgcataggaaggtgacatggcatgtccatgtggcgattttggtgggaccaaggactatattagcccacataacaaatttaaaggacttgtttagacaatatgaaagattaaggactaaaatgatccaggagcgaaactttagggactatattagctattctctcttaacgaaaagagcaaaagttttaatcgtaggggtaaaatggtctttttaaaccacttagcggatggctgctaatgctacctaaaggcgatagcatttcttggacaaaaacacttatagatggcatttctaggaagttggattggtcgatggtatttattggattggggcacttgttgatggtatttcttagattttctcaaactctaatactcccatatttgtatagtttgtataggggttgccccttatatgagggatggttccttccctctctcctttctccccacctcatcaaataagtctacaagacatcttaggagatttatagtacttgctctaaggtattggctcttactacttgggttcgagattttctagaggatgatgagttgttccatttcctgtagtatccctgtttggggatgtcagtcatttagaaccgaacagagacccttggatcgatgcctatatttgctctagttgcttactactccctccgtttcacaatgtaagtcattctagcatttttcacattcatattgatgctaatgaatctagacatatatatctatctagattcattagcattaatatgaatgtgggaaatactaaaacgacttacattgtgaaacggaggaagtagaaatctagaataaggaaagggtcttgcagaaggagagataagacagagggatgaaaaccaaatataaattgagtagcaatttcacaactcatcatcataataccagataatgtaacgattgtcacccatttcactgcaggattttgaagaaaatttgcatatctgaattgcacggcttttagaggactagagttacattatttcacatgcagtggcataaatcattggttttttctcaaatcttattgatctagaagagagagcgtgcgttcacttcaggaagtaaccattgaaatccctcaggtacttcgcatgtcaacaaataaatatttgccataacaccagtttgcaatttaagtttcgtgccttacttgtatcttaaccatgtcatcaggcacttcgtttgctagccatgaagtttattgaacccgggaaatttctcttggtgttcttggtttgcagtgcacatgttgtcatctgctcctctaatggaaatgaaacagatcggttatcactgcttgaattcaagaatgctatcactcttgatccacagcaagccctgatgtcctggaatgacagcaaccatgtctgcagttgggaaggtgtcaagtgcagggtgaaggctccacatcgtgtcatttatctcaaccttagtggtcaaggcttagtagggacaatatctccttctcttggaaacctaacattcctaagatatataagtctccaagaaaatttactagctggacaaatccccctgtcacttggtcatatgcatcacctcaaagttctctacttgagtaataatacactccaaggagagatacctgactttgcaaattgttctaatctctgggcgttattgctgaatggaaatcacctagtggggaaagtacctacagatgcccgtttgccgcctaacctttattttctctggattgtacataataatctgactggaaccattcccacctctctatttaacattacgacattaactaaactttctataggatttaatcaaatcaatggtgaggttcccaaagaaattggaaaatcacgcgttctgcaactatttgctgcttctggaaataagcttttaggaagatttcaacaaaccatccttaatatctcttcccttgctgatctagatcttgggtccaattatctacatggagagttgccatccagtcttggtagttcactgtccaatctacaggggttggctttgggcaacaacttcttcggtgggcatatcccaagttccttggcaaatgcttctaagctatccatgattcatctgtcaagaaataatttcatagggatggtgcctagttccattggcaaacttcaggaactctccgtgttgaaccttgaatttaatcaactacaatcaagtgataagcaaggcttggagttcatgaatagtctcagcaattgcaccaaactacgagcattatcacttgcaaaaaatcaactagaaggagagataccaagttcattcggcaacctttctatgaagcttgaactcttataccttggaggcaataaactatcagggcgttttcctgcaggcattgcaaatcttcacagcctgtcaggtctagcactgaattcaaatcgttttacaggtccagttccagattggctaggaaatcttaaaaatttgcaaataatattcctagcggcaaacatgtttacaggatttattccatcatccctctcaaatttatctctactagaaaatgttgtcttggactctaaccagttctatggccatataccccgaggtttggaaagcctcaaagtactacaagtactgagcattccaaacaacaatcttcatggtagcatcccaagagagctcttcagcattcctacaataagggagatttggctatattccaatagattggatggacctcttcctattgaaataggaaatgctaaacaattagaacatcttgtgctttcatcaaataacctatccggtgttattcctgacacacttggtaattgtgagagtattgaagagatcgagttggatcagaattttctcagtgggagcattcctacatcatttggcaacatggaaagcttgcaagtgctcaatatgtctcataacctcttgtcaggatcaataccaaagtctattggtagcttgaagtatcttgaacaactagatctgtcattcaacaatctcgagggtgaagtaccagaaataggtatattcaacaacacaacggccatatggattgctggaaataggggtctttgtggtggggcaacaaagctacacctacctgtgtgcacttatagacctccaagttcaactaaacacttgcgatccgtagtactgaaagttgtgatccccttagcttgcatagtgtcacttgctacgggaatatctgtcttgttgttttggaggaaaaaacatgagagaaaatctatgtctctcccttcattcggtagaaattttcctaaagtttcattcgacgatctttccagagcgacggatgggttctccatatccaatttaattgccaggggaagatacagttctgtgtacaaagggagattgttgcaatatggagatatggttgctgtgaaagttttcagcctacaaactagaggggcacaaaaaagcttcattgcagaatgcaaaactttaagaaatgtgcgacaccgaaatcttgttcccatcctaactgcatgctcaagtattgattctcaagggaatgatttcaaagctctagtatatcaattcatgtcacaaggtgacttgcatatgatgctatactcaaatcaggatgatgaaaacggttcagcttccatccatattgcatttgctcaaaggttaagcattgtagtggatgttgcagatgcaatggagtacgtccaccataacaaccaaggaactattgttcattgtgatctcaagcctagcaacattcttttagatgacagcctaacagcacatgttggagactttggccttgcaaggtttaaagttgattgcactatatcatcttccggtgactcaattatttcaagtgcaattaatggaactattggatatgttgctccaggtaaatcctatttttcatggtacactatgtttcgttgggagtgttctcttcctattttaatgtttggacttaactattctcatgtgctatatgctctatgcagagtatgcaacaggtggtgaagtttcaaccttcggagatgtttatagctttggaatagttctcttcgaaatatttttacgaaagagaccaacacacgatatgttcaaggatggtctgaacattgcaacatttgtcgatatgaactttcctgacaggatatcagaagttgttgaccaagaattgttagaataccagaatggtctatcccatgacactcttgtggacatgaaggaaaaagaaatggagtgtctacgttctgtgttaaacattggactttgctgcacaaagccatccccctatgagcgcatggacatgcgagaagtggctgcaaggctgcgtaaaattaaggaggcctacctcagcagcaactaaggtaattaacctaattcaatgatatgcactcgctgtacatatttccaaggtagtttatcataatgtgtgtttgtattatccttttcttagctagtaaaatgcatgtgtaaataaacatagggctgatgctaagcttacattgcagataccctgaaatcatcagcagcatgtggaccctcagaccctgtatactctgtattctacacaatattggcaactgcgatgattggacggaacctacctcatgtgtcttgcattttccattgggtgttaatatggcactataagcttttttttatggcaatgtaacatacattttaccagtatacatttacgttgcagtatttctctttgtgtattgaggagagatataaaagaaatcacctttctgcttctgctttcttgttacgaaccagagatgagatctgaacaatagaggtagagcagaggaaacaggggagacagaacagagttggtagctttaggaggaaggattgtttggttatttcatattcgatgctttctctcctattacacgagtgcttatatggatgcactggttacagctgtcgagccaacccattcaggcccagagatccgaacattcgcctgtctcacacgcttaggacgcgcctgatgacgaaccgggtttgaagacgtagtcgttgtcggatcacaaacagtagccgtaacatttctggatgggtgtatcgtgaaagtctggatggatatcaatgatagtggtacataataccataaagaggacttgactgataacattatgaacattccagtaaaacaaaaatattgggtcattgctaatctgaaacgcttaggccttgtttggctaaggggttattagagaaatgatttcccatccaccaaaagatatctttaaatcctaactgttcattctccctcttccattttatcctaacccttcacttattttcttatcccaatcccactttcttattacattatccaaacaaacccttagtataatactacctccatattttaatgtatgacgccgttggctttttatccaacgtttgaccattcatcttattcaaaaaatttatacaattatcatttattttattgtgactcgattcatcatcaaatgttctttaagcatttatcatgatataaatactttcatatttgcatgaaaattttgaataaaacgaatggtcaaacgtttgtcgaaaagtcaacggcgtcatacattaaaatacggagggagtagatagtaggaacttgtttttgtaagatgttcgggctgccctcattagttgttgtacgaaatacaaacagggtgccccatatgaagagtctttaggctttacatgggccatgatgggccacagaatcgtcatcgtgagattccatctctgcagcaaagccagcgggaggcaacagcggcgaggcagacgcgaaggtttgagggatctgctggccaatgcgacccacatcctgagattgcatggctccgtccaggaatggaccacggctgggctaccagagtaccagtgcagccacgaccttgggatgttgccggccatcgagacgacgtccacctggtcctcttcctcgtcagtgatgtcagcttcgccgacatgtggctgacctccacctccgccgaattgatacccatcgaggaaacatatatcaactgtgctgggattggattactgctgaggtttgtctgtttaatttgatcattaatccatataaacttggtagcacacggatcggacaaaatcaggcgatataaactggctttgggctttacatggggctgtgatgcagtcgagccgtgcggcgatcggcggcggatggtttcagcgctccagccaggaacggacctcccggaggcgatgagcagcgctccacgccctccggatcaggtgaatcctactctcatgatataatgtttcccttttaagttgggagcgttttcttcctattttaatgtgttgacttaactactctcgtgtgctatgctctgtacagggtatgcagtaggtggtgacatgtcaacctacggagatgtttatagctttggaataattctctttgaaatatttttacgaaagagaccaacagatgatatgttcaaggatggtctgaacattgcaacttttgttgagatgaactttccggataggatattgttgggacaaaatccaacaagcatatatgtgtatcacttatgtattcaatatgcccagctgtgagcaatgtttacatatttatacaaggatgtacaaggggaaattatatcgctaccctaatcgctgatctatctaggcggctggctggtgggccagctttagggctctttggtaagctcctcggtgacaggagggctgcgcccattaagggagcgccgccgattcccaagggcgcctgctattacccgggtaaagacgtgctccgggtaatagcgtgcgctgtctgccctcgttagcggcatcagaggtggttggcagatgcgtagtgcgaatttatagcgtcccactacgcatctgatcacccatcttacgcccaaggctctcgaagctctagcttcctctggagccctcaaacagctccggagaacctagaaggctttggagtccttggatggctccggagcccacgggcaactacgggacaaacctacaaagggattttgcactctcgcagcgaaggcagacgatttacaatgcaaatcaataaagatggacgaactaggctagaactatgtgcaatattgaaaaagtgattcaattggctaaattagattgtgtgtagattcttcttccaattgaactagccttgtcccttatataaggatataagggttggtcttgcctcctgcagatcatcctccacgcctaactcaggataaaaaccaatggaaacccgaaacataccctcctgagtaaggagtcctgacacccaatgaaaatatagactcggtatcggactctaccggtctgaccacgcgcacaagtagtggtctgaccggccaacatatggcggtcagaccggccttgtgagggaaaccagcactcttccaaattttggtaatattttcctaatttaaacctaggtgccaaatttaggtgtaaacaagtcccaccttaatttctctcccctatccacacacattgtgttatattatatggttacaactactatggcttgataaagggtctaaacactgtttcccacttcagttgaataaattgctattctcgaatagcatgagtggtttagtgctaaaaataattttgtacaagtactgagttgttatatttagaattaagtttgaattatgttttagggctaagggagtagacgaaaaccaaaggctttcaattttttttttattgtagatccacggggttagaccggagggcacttgtacataactgcatatctgtgacggtctatcccgtgtttggtcttgcgcaccatcacaccgtcatcatctttaatggatcgaaataaacaccgatacaaatatacttgttcatacatatttcatgagcatatattacgagctcgtcaccgataagacctattggtgacggacttatgtttcggcacaaagtttatctttgtcgggtccaaacctaaccacgtggtgcatgcaataaccgtgtgcccctgtggcctgtgcagtgtgcatctatcagcagcgcatgtgttcagcattaatttgttcgacgatcaattctcgaccccaatctcctacagtatcaagcttgatgcatgcttattgacttgactcaagactcttcagatggtcgatatttagctaattaatgagtgacgatcgcgatcaatcctaggaaaggaaatggcactccgaggtacaattgattttaaaaaatcacatatacgtaacaacgataatatttacattatcataaacacacataggatatgacaactaaaaataaaacaacaacagactaacagggatactatcttgataggcaggggcggatccagcatgggtgctgggactcaagtcccctctatcccgctggatcaccattgatagaagaggagatgaaaggggaagaatatggagaaaatgaagggtagggggactcaagaagaaattaggagatgagtcccctcttaaatcttgttctagatccgcccctaatgataggcactaatatgggatatgaaccaagactccacttaaaacttctccaaaaatactctcgctgtaaagaaaaattgaacaagaataagtaccatccacaatactcagcaaacaacatcgaaaaaaatattctctccattttaaaatataagacacaaccaacctttaacccaaagaccaagaaataattattatcacctcatagtttggattaccctgataaatagaatacatgcacccaataaaattagagatcttcatggtggatgatttaaataataatattttagtgaaaaaaaagtggtagttaatgatatgcatgcatgctcaccttatattataaaacaactttaaaaagtagttatgccttatattatgaaatggagggagtatatgaataatgcaagggtataaggaattgtattatagggatgttttgcagtaaataagcattttaaagcagttgattatttaaacattttaaaacaaccatactatttttttcttttaaccagaaaacagtacgggagccccactatatactaattataagcaattacagggtttatgtacacaaggaagattacatagcgtccatccacggaaaacattgctaatttgctgccttcactactgcgaaactgatctttgctaggtcgacccaaaaccacaatagtcccggtttcaaaaagaatcgggcctaaagatcatctttagtcccagtttaaaaccccacagccattctatgacctttagtcctgattggtaacaccaaccatctttagtcccggttcatcccaagtcagtggcctgtcagggggctgaggatctttagtccaggttagtgtcacaaaccaggactaaatatcaccactttagtcccggttggtattaccaaccggaaaaaattaaacgcgtagtatataatccctctctctctctcttatcctctcctctacaaccggcctctcctctcctcagatcgatcccttcctcctctcctcccctcccctctcctcctcccccctcctccccttcctcctcccatccccggccctctcctccccctcctcccttgccatccggcggctggcggggttgcgctcggcgggcaggcgaccggcagtcggcggggccgcacacatggcgagtggcgagcggcggcaggcggcagccgctaccagcatcctttctctttttttttcaatttgtgattcactgagatatataattttgtgattcgttgcatggatctgagatgtataatctgtgatgtatttgatttgtgatatatttgatttgtgtgtataagtaacttaagatctgtgatgtgaatgttttgtgatgttactttgatttgggatttggggatatgcatcccactcgatttgggagaaaatacaggattaaactatggctagagaaacaatgaaaaaaaaagaaaaggagacctacgcactggtactgccgctgccctctctttagtctcggttggtgttaccaaccggaactaaagataccttctctctagtcgcggttggtaacatcaaccggaactaaagaggcatcttaagtcccggttgaaaaaccggaactaaagggggttaccaataagaagtataaacggtttctccacccgtgctttgagcagttactaatgtggttcagtgagatatttatgtatgtatgatgattgtttgttcgcctgtgtatattaagaaaccgccagagtaaatgtaattttgtcgcatattaatccggtgatatacattctaaacaagggagacatcctgtgcatatttttccggtgatttgtccactgaataacggaataattcagcggattaccaagtgtacgatcgaagtcgcgagctgggctacgaacgaaacgtattgggtcaaaaatggacctacaatagtagtcggactccgccgtcggactcgaggccaccattaccgctgctaactaacggctcgtttggcagaggtttaaattctaaatttaactttagaagaagttagatttgaagtgaagttgtatagcaacctaaattcaaactccacctttttagtttattttatgatagcgctccacccaatttcgctcctattttagataaaactaaaactatttagctagatttgagctccagaagagatggagtaggagttagagtcgtgccaaacataccataactttaggtcttgatgccatcgactccaatatatttgctgtaaaattggtgatttaagttagtaattggctgatttgctgttggctagtaattgttgctgctaaagtattatttgtagtgtttggtgctatacggctatgtattgctgttgatggttaaatggttaatcttggttggcttgttgctgcatgtttaatgtgtgttactacttgctccctccgtcctataatatactggctctgtttgaccacttgtcttattcaaaaattttgtgcaaatataaaaaacgaaaagttatgtttaaagtactttggataataaagtaaataaaaaaataataattctaatttttttaataagacgagtggtcaatcggtgtaaacaaaaatttaaaatcccttgtattataggacggagggagtactagtgtattccttatgtaaaatcaaatgtgtttttgattattattctgtgataaacaattggcatcggagattattggttttgttatttggaatttattttcgaagtggttttggagatgattggatttcacaggtgaatctacatgtactgctgtcatttatgtgtccggtcagaccgggcagtggttgccggtcagaccggcgtgtatagggcggtcagaccagcgcagcccacggtctgactgaccgacgctgtgtcggtttcggtttcgggtcatttgtttggatatccgtgattgtttcatgattatggcttctagatggatactatacgtatgttgatactgttgtttgctactaatgagtcaagttggagatagtttggtctcggaatatggtttctttgtttatttcatgtgtaggtgactcgatgcctcgggagagtatttgcggtgatggaccgggagtcggcttggggataagacgacgtctgtggtggtcagagatcatgcgggatacttaggctagagttgatgcacgtggttgatggagatttcatatggcatacgatggaggtattgtgtgtgtatgggatgcggagccgaatttggaaggagtccaaatttgttatgattggttatgtaaagtttgtttcttgtactagagggtttcctaaggtgtttaaaatttttagtataagtttggttcgtggctttaggctgtctatctcgggtataaatagagggagagcgtgaggcttccctgtatcgcttttgagagcaattgagttgagtttttcaattagggtttcgagtttagtcgaaatttttgtaaggaatgctgttggtgcactttgtaaacacagagagaagtaataaagtcgtcatccactttaagagttcttcgatttgtgtttcaccgggtttcgatggtctaaccggcggtcagaccggcggcaagcggcggtcagaccagcggcagcgacaggcgcagcaggcgacttcggcggtcggacctgttgatctataccggtcaggccagcggcattcgagcggtcagaccggcagatcaatctcggtcagaccgatctccatcgatttcgagggtaacttttatttccgccaaaagttttcagtttttgggtataccacccattcatcctccctctaattggcttagttattgtgatttaatccttcaccttactgctgcctccttctccctttgaggtttaatttcgggtatgggcacctggcgaatgcctcgtacccgtatgaggacggccggagacgggaaaacccctccccgtgtgcggggatgaggatgggaacgacagaaatttctcagtccggtgatggggatgtgaatccgacggatacccgatgcccaactcgcagaaaagattagtagtaattgatttgatttgaattgacaagaacgctaccgttgggcgttggccattaattagcaaactggtgacaagaacctgctgacagcctgccttggtgccatttgccaactagcatgagctgcccctgcactgcacggtgcacatcgacgcagcggggccgctattttctctttttatttttataaacatgtttcctggttgttaaacactccctccatcctatattagtggtcgctttcagttttttatttataaaatttgattattcgtcttatttaaaatttttttagaattatcatttattttgtttgtgatttgttttattatcaaaagtactttaagtatgacttatcatttttttatatttgctctaattttttaaataaaatgaatggtcaaacgttacaaacaaaaagtcaaagcgataagtaacgtgggacggaggtagtagattgtaagatattttgactttgatcaaaatcaaactattttaagcttgactaagtttgtaaaaaaaataataacatttttagcccatgacaaatttattatgaaaatatattcaattatcaatttaatgaaactaatttggtattataaatattactatatttacctataaacttagttaaatttgaaatagtttgacattgaccaaagtaaaaacgtcttataacctggaacaaggaagtagtatgtttggtaaaaaaattttctatagagaactatttaaaataaatccatttcgtaatattataataattaatacttgattaattatatgctaatgaattatctcgtgttatctgtaaaaaaaacttttagacaactaaaccgatctgaacttatccggctttgtgctgttcctgttaaggttcctttggaactcgctattcatctactttctctgttttatattataagtcattttaatttttctaatatttcttaacattaaataaatatattattaaaatatatttaatgttatattaattaaactatgttggtattatagacgttactaaattttcatactctctctattacataatataagggattttctgtcacatccatacaaaatcccttatattatgggatggagggagtataaattattaggcatatcttgaaaagtttgattaaaataagtcaaacggcttaatataaaacgagggtaggattttagttgatacatgaagctagacaaatcattaacggtacgagtaataaagtactaataattattacgaacacataaaatatatttattttatattttaaagaaaattctatatagaaatttttacataaaacataccactataataccatttagtagtttatgaatactcgcatagaagtttctttctccatttcaaaaatataagacatagaccacctttaacctaaataaaaaaataattattatcatcttctagtttaaattaccctaataaatactctatccgttaagtcattttgagtttggtcaaagtcaaactattacaagtttaattaagtttgtagaagataataataatatttttaactcaacacaaatttactatgtaaatatattcaattattgatttaatgaaactaatttagtattataaatattactatatttatctataaacttaattaaatttgaagtagtttgactttaattttaactaaagttaaaacgagttataaccttaaacggatggagtataatacatgcatctaattattagagatatttagtgtgatagatcttaaaaaaaggaataatttagtgggggcggagggagtatacatgcttgcaaatatgtatactcaaaatcctataatataagggattttaagtttttatttgtaacgtttgaccactcatcttatttaattttttttttgaaattattatttattttatttgtgacttgctttattatccacggtatccacggtactttaagtataacttttcgttttttatatttgcaaaaatcattgtaagtagggagtactaaatagccgtacttaatagctggtcagtctttagcgtgacttcggcgtcaaccatgtcactgcaccttgagcactgtgtagtgtgtactatgcatgctgacaacatgcacagacatgttggtcttctcgccaaccgaaagtgtaaccgattgcacgaacctgcatgactttgggtgctttgagtaatgtgcatgcactttgaggcctctttatttaaaggaaattcatataaattttaaaaaaatttattcctaatgaaatttttcctatatagccctttgaatcaaaggaatggatcttatggaatcctatgaaattcctatggattgcctaatgccatgcaagttttggaggaattttaacatgaggtaaaacctcttggaaactttcctttgagtctttatctctcctctaattcctgcgtttttcctgtggtccaatcaaacgatcgttcctgtgtttttcctgtgttttgcaatcctctgttttacacttacattcctatcaaaatcctgcgttttttctattcctatgttttctcattcctgcgattcaaaggggccctgactatgtcaatggccataaaccacacgtttatgattacgttagatacgcaacctaaccaatataaggatgttagatggtatattttttttaaaaaaagtatatatataagttatttaaaaaattaaataaatcaatttctcagttatataatagtaaataattaattaatcatgtgttaataagttttctcgtttcacatgtcctcgaaggttatgttgtttctccgcctttcccaactcacctatctctttttccatgcacactcttttcatactactaaatgatgtgtttttttcaaaaaaaattatatataaaagttactttaaaaattcatattaataatgcactaatgagccactccgtttacgtgtcgaagagcttactccctccgtcctaaaaaacgaatctagtactggatgcgacacattccagtataacaaatctgacacattctggtatgtctaaatttgtaatagtaggatgtatcacatccagtggttggttttttatgggatggagggagcagttaccaaccatcctgaaggaacacagccatttaatgtctttctatttggaaggaacaaatgtactccctccgtctaaaaaaaggcacacctaggtttccgtgtccaacgtttgaccgtccgtcttatttgaaaaaattatgaaaaaaattaaaaagacaagtcacgcataaagtattaatcatgttttatcatccaacaacaagaaattactaatataaaaaatttttatataagacggacagttaaacgttggacacggaaactcaatatttgtctttttttttgggacggagggagtatagccagtcaattacgtgcgtgcatgtcttgtactaatattttatactgaaagtgtgaccatggctagatgcttagtaaaatacaaaatattctttggattttcttcatgcccgtaaaaataaaaagggttaatttcatccatgccactgtaaatgttacaaatcaaaaatatgccactactattcacgttatctgcttggtgccactgtgaatttctaaaattggaaccatgccactccatcactcttttcgtcctcatgtctcccccccccccccccccgcatctcccctgccgtgccccgtttgccgcagcatggcccggcatcggtgtcctccgtggcagcgccgttccccgacctgatgcggtacgcgcggagttgcagctagcgcggcgctggcgcagatcctggacttcgcggcgcagcgactcgtcggggtctcgctggcgatgccgtgcccgctgtcgacgatgacacgatgtcatcaccgagcgcgtagcctcacgtcgtcacggagagaggatggggaggacaaaaagagtgacagagtggcatagttccaattttataaatttataatggtactcaacagataatgtaaatagtggtggtatatttttaatttgccgcagtggcatggatcaaattaacctaaataaaaagggtgtgcatctctataggtggcagtcgtaaattgcaatgacactaataagacacatcattagtgatgggtgcatgttgggaaatccagcatctatgtgaagttttcaggtgactagtcgacaacggctaggtaggttattacatatattatacttgtatgattttgatgaataagagtaataccagctttagccaacatgagtaggtttattaccttctaatgaagaggcggaaccttttgttaccttctaatgaagaggcggaacctatataaaaatccttgtttccatctttttatacaattttgcatatacccatactatgcaaataccgtagttgtgatctaaaacatcgacaaagctgctaatcaagtctctttaacacagggatactctgcgggtcaagacagaacattagtagactgttgtgaccactcactggaataacacaggaaaatctcacctggaaaaaaactgtctacaaattaatataaatatgtttcaatgcatttgtgacccattgttgtgaattcttattttccaataaatacttcacctttttcacgatactttgatatggattgttttctaaagcatgttttgtgcatggactatggttggaggctttatcagtcagctaataatctaggtcgtactccttctaaaaaatgaaccaggattggatgtaacatttcctagtataatgaatataatgaatctggacataagtatgtcctgatttgtagtactagaatatatcacatttaatactaaattatttttttatgggacagagggagcagggtattattgaaatgattcccattgcaacgtacggacagctaactagtaactaaaaattggaataataatataatgaactagctagctagtacgtagagtagttcataatgttacctgggttagtggcggagcatgcctaaaaaattttaggtgggttatacatggggtggtagttagtagcattcctacactaatcctagctagccgatgcaaggtatactgggtagcatgtgtatttttagttgttttatgatagtatattaattacaatattgcttgataattagattattagtatgtaccaaaacctacgtaatttttgttaaaggtttgttactggcagcagtcggcagtggcgatagatgaagctagtgctagggttaaattcctcactgcattggtgagtgcctcggtggttatgtgtgttcgtcgagctattcaagtttggatcgcttgagatggttaccgcagcgggtcaccaacggcatcgcacgaaaaaatcaagttatctaacgtaattaatgtgttgttcatcaggaattaggagacgtgctagttttgtctgacgattaaattgtaatgaacaaaataaagccttctcgttctgatcagatattggagtagtgtgtagcagtagcataaaagcgactttgaaatgtaattagcaatagttttagcaagtgattgaaaataactcatgggagctgtcgagctgatgagatgtcatgcactaagtagcagtaactgagagaaaatcattgagattaggtgccactgatgggatttccttaactaccaagcaacaaaccggaaaaaatcgaccactcggttatctttctggtaggcaagcagagtggtcgattttgtaatcgggattggatcgggcacggatattatcggatacgaatagaagcatggataatatcgagtataaatatggaacgaatatataccaagacgggtaagatctagatacccgaatatgacttgaaataatgtggccggacgggcggtagggtcctggcagcaggtaagctggccatcagatggcccaccatgccgtatggggcccatcgcctctaatcaaggtgaaaaaaggatactccctccgtttgaggttataagatattttgatgttggtcaaagtcaagattttttaagtttaattaaatttgtagaaaattatagtaatttttttaacgcaagttaaatttattatgaaaatatattttattattgattcgatgaaactaatttagtattaaaaatattactatatttgtctataaacttagtcaaacttgaagtcaaacttgaaatagttctgactttaaataaagtcaaaacgttttataacctaaaacggaggaagtacgaagtatacaaagtagtactattcatcaataccatgaatctggtcaacagaatataattcaactacgtgcgtcgcccctataaattaagtgcgtgcgtttactgatggctgcatattagtttgtgtgtgcgctaagtaatcgcccagttaggcggtcatctctggtgcttgttgcgcggcctcttccgtccacgcaatatctgcggttgttgctggatccgccggtgcttgcaaatattttgcaaatttctgctgacctgtaagcacacatctcatcgactccctaatttcttttggttctgttcaggctttgccaattccatacctcccgttcatatgaaatgcaccttgatcccaaaagaataattcaccagccgtttataagaaaaacctattatccttttaaagtaataaaaaaaaggagcccccacgttctctctcatgacttagaaattctgatattaatcggagaaaaagaaaattagaatccataagaaataaaatttaaaaataataaaaatttagaattaaaaatagggaatataagaagaggagactagagcccatacaagtatacaatttagaactaattgaaactcgaaattaaaaaataagaaaagtaaaacctagaagtcagagtccctatagaaatataatttaaaaataactaaaattggaattagaaaatacgaaatatcagaacaagatttcatagctcatacagaataatttagaaaaaaagacttaaattcaagattaaaaaataaagaatattaaaagatgagtttagagtccatatataaatacaattagaaacaacagaaattcagaattaaaaaatagaaatattgaaagaagagtccagagtccatataggaatctagaacaatttgaaagtcaaattgagaaaaaaaataaaaatagagcttagagtccatagagaaatacaatttagaaataactaaaattcaaaattaaaaaaaataatattgggagaagaatctagaatccatataagaatataatttagactctaagaatataatttattttataattttaaaaataaggaatagtggaaaaaacttagagtccatataggaatacaatgataacagaaatttggaactgaagaataagaatattgaaagaagaatatagagttcatataggaatttagatcagttgaaagtcagaattaaaaaatttgaaaaattaaaggtagaatttagagtctatataaaaatacaatttataagtaactaaaattcaaaatttaaaaactaactaagattgggagaagagtttagagtacatatagaaatacaatttagaaataagtaaattcgaaattagaaaataattaataactatcaatacaatacaaaattcaaaattgtgttgttatttgtaatatattttgataataaaatatgctatattatatgagaaaaaataacgatgttacatgctagttctttagaatggctactgtagaggcgtatggataacagtaaataaccaaattaaagaatacatcagtattttcttaacaatgtacagatataaaagaaaaagagaggaccctcagtaaattttcctccctccacattctagcaaaaactcaggaaacaaaaaaaaacagaaagaaaaccactccgatctctcgtttcgcgaagggacgaggcaaatgcgtcgtcattagcattgatgtcaagcatcatccacacacactggtgaagcaatcaagaagcgagacatgcagcctccgtacgagctcaaccttgtatatggctcgagctcgcgccgccgcagcgagttcgtccagtacgccggccgccgccgctagaccttgagcagttcagctccggtgatccggcccggctgcggcgcctcccaagctcgagacgttgaagccagcgtcgatgctggatcccacacccggccgcgccgcctctcccaagctccgatccgatattcagacgtcgatcggtgttcggagaccgcgccgcggccgtgggagattccatttccattggagggcgtgtcacgtgtgagagatagggggagatccgggttaaggttaagatgagatacactacataatttttttcccaaatgatcaaaatctacttttacatgcaattgagccacagtcagatcaaaagtgtctgcgaaaatcgctacttttttatatggatggcgcacccgtacacgaaaatctaattttcgcttgcggatgcttatatcatcctcactcaaaaataaaaatcctaaaaaaaatcaaaaccgtagctaggtgcggtccgccgccgccaccagatccacgcacgggtggcctcgccgccatcgccctcgccttctctgccaagtgggggaggaatgttcccctgcgcgtcgatggtgggggcggccgcgcgaccgccgccggtcgtgctcctcccgctactgtcgctgcccgttgcacgaggtcgctgctgcctgccaccgctcaagcccacccaccgccactggctagctagtcagctgtcagcacggctctcaggagggaagtcgagtgagagagagagagagagaggagagaaggtgagaaatgagatagagaggagtaatatgatgaagagaggggatgaatgaataatgataacttgaaaagaaaatttagtgctaagagggaaagaggatgtaagttagacttttagatggaccttgaagagcctcgcccgcgaaaatacatttgccgcataggaaaataggcttattttcgcatacagctccataagagattcgtttgtgaaaatagatttttttgcatgcaggcctttaaaagagtcgtatacgaaaatggaagtctatttttacagacgctaccagctatggtccccctaaaacctatatgggttctcgtacataaaaatcgttttatttagtagtgttaaataaatataatcacttacacttatagttttatatgttttatttttccgatatttatattcttgtgttttgattctagtgaacaggttagaaacgcatcgaaacaaatgatcgaatcatatacttttccacgaaaatcttataaaataaacaaccgtataaagtttttaaagaaaaataagcacaaggttatacctcatgttttctctttccaattactccaaattccctttgtttatactatgggtcaatcctacgatagtttttaatattcttcaacgtagaaattcaatattaatgcatgggcatgacatttaatttttacgttttatgtgtttttccaattccgtcggtggatttggatatcatctacttcctctgtttcacaatgtaagtcattctaacatttctcatattcatatatatgtctagattcattaacattaatatgaatgtaggaaatgtgttagaatgactgatttattaacatcaatataaatgtggaaaatgttagaatgacttacattgtgaaacagagggagtagcttcatatagcaagtcactataccacggattctttttctttgttatatatagaaaacgcacaatgtaatcacaagcaccacactcatatccttgcatcttttaacacatgcttcaaaaggcaggagtctaagcataattaacacacgatatttcacttcacgtcatgtagcctccttaccaagtcacatataaagcacttcgtgaccgtgggatggatgacattcttttgacttaatctctctaggacttataacacatttggtattacaaataatatcaaatggaaaaaaaatcatcaactacaccccgtcgagctgtacaacttaaatatagagaattatcatggttagggataagtcataacttttatcctatgactcacgggatatacggatatggcacaccttcgtatgtacgacaatattccgtatataaaaaggaaatcgacaagagactatggaaataatcgcgcgggtaggcacataacagagtcctgctcggagaggtttaggattttaccatatagtgcaaggtctgaggtctccgagttctacttggagatcaaggtgatccattgtataaatacataccccctaaggggtccaaggtatcgaatcatatcactagccaacccgtcaccacataagcaatctgtaggacttgaagcctactcgcttagagatctcatcgagactatctcgtaaaggatctcgtcggtaatctcgggatcagttgttcttcattgtactctgcggttttctatattaatctcatataaactggattaggttgttacgttacgagtggactgaactagtataacccttgttttcttgtttgcttgatatcatatcgtgtagatcctcgtaccaacttatcccaatacccacattatccggtctacgggtattgtcacaccccaatccggcaccgccgtacaacggcacctgataggagcgtgtcgtaggaaaaacggcgtgaaccgcttcctacgaaaccgcgatctcagtaccagtcccaggacatagcgctggtacccacggtgacaaatacgaatcattgcaatccttaaaataattagaggacttatttaccttaacttaggttgccgctcgggacagcccgagattacaaccgacgacacggacgaggcaacaccaacaacggcagcagcagcggaaacaacggactaacccccaacaccacaggcaacggctgggaactaggacgaaaccctaatcttcacttcacttcaacttcatcttcagagctggcagaactatatttatatagagagcaagggtgagtacttacgtactcagcaagccaggggaacttaggtggttaatgcaagtttcaaagaataggctgttatttttcaatcggttttgttttcaaggttttcaacaatctaagtgtgtgctttccacaaccagagcgagacaagtctcagctcagtcggggtgagaagtaacaaatttatttatcaagatttgcacaactcccagagttggcctcaaagctggttttcccaaaccaaaccatttttccaaacttcccaataatagtggtccccaaacgaccaatcacttccagggacttccggtcccgctgtcccccggacagctaattgcttcccaagcattaggtttcccaaaccttaacaccttttcataaaacagggtaaaacaaaaactacgctaaggaatcacctcacatccacccatgcccgtgggcacggctgttcgaacagtttaataacctctgcagagggggtacactttacccacacgacgttactagccttggtcacctagcccatgcagaacagccacgtctggtgactttggggctttcacgacaaggcatttcgaaagccgacacagggttaccatatgccaacgagaggggacccagaccaacaacaagttaggtcctagaccatactgcgccaggaagcccgggggttctccccgacaccaccccattgaatccacatgtctcttggcatcaaggctcccttgattagctatttactcagccagaggtgtcccattccacccgtgtggtcgcactattgtatgctcggatgtaattccaaaggaatcggtccttagatgcgaccgcacaagtattccgcctaggaatggccttgtgtcgcgagttttatttttaaaactcattttctttcataaggcaccgacccaggcgtcgggttttccaaagcttttgtaaaccaagttttacccaagaagttacttagattttaagtttgaaggcgaccgtcgatactcgcacagagtgcacaaatatcgaggcgcaactagatggttacaagggaacatgatataacaattaacaatggaaggatcagatgcaacaagttgggtaggcccaccggtctgccttgcagacggggcaaacagattaagtgcaatcctatcaatgcataatattttgcaagcaaattaattaagttcaaatataggctcaatatgttcaaaggtggcttgccttgcttagggtcttcacgaagcttcacaaatcttcgagaattccacttgaagaaaaatatccggtaaccgcaactaggcgcaaacaatcaaaaacctaaacaaagaccaaataaaatatcctatttaggctaattaatagtgccattagatagatcacaatttaatggaattattggaagtggaacggggtaaatcggagttacggatcaagagatatgaattttggaggtttaattggaatttatggacaaaggaaatgatttattggaatttatagaaataatattctcaagaatattattgacagtcactgacgtgcgggaccaagggaaattatttagggaattttggaatggagaattggtttatggaggcaaaggaaaaaggattcaataaatcccttggaaaagaaaaggaaagagggatgggatttatacttcctccttggaaaagaaaaggaaagagggatgggatttatacttcctcggggtggctagggcgcggcccgaggggtttacaaggcttagccggccaatgggctgagcgcggccacggggaggcggcccaacaaagggggcgcgggggggggggggggtgagagaggcggcccggtggacgcggtccaccgcgcggggcccacgtggcggtggttgggttcacggtggggagggcgcacgcgggttgcggcgctagggtttcgggtgcgtgtggcttaggagcggtgcactgggtggacaaacggcggcgggcccacgcgcagccccatggcgcaccgtggtccgcgcgcttggaggggaaagcggggctggccggtttgactcggtctagccaagttggcaccgacgtggcgcctacgtggcagccacgcgggccggtgggaggaggaagaaaggggaggccgagacggacggcggacagcggccgagttcaccggagccttgcgggacggatttggtcttcggggagcacaccggagtgacgagggattcgagagggagcgatccaacggctcggattcgccggagagaggccggcgacgatgaatcgcggcggcgcacgccggcagcgagaaaagggggaaaatccaccagagcaatgggagttcgattcggcggggtgggagcatctccgatgttcaaggggtgcattcccggcgtcggatggggtagagaagtaccgaggagggccggcgacgagcggcggcctccgggatcagacggcaatggcggtggggccatgccgggcggcggcagggcttggggcagcatccacgcgcgttcgggagggctatcgagccgctacgcaagctggagtggaagaggaaaagcggggagggagaacgggggctaccgcgtcgggagatcgctgggaagagcgtccgacagcgcggcgggaccgcctcggcctcgagccggggaaggagatggagagaaggcgatcggagtccctttcggctccgcgcgcacgccgacttcccggcacgtgcaacggcgaggaaggtggtggcggcaaggcggcaagaacagaggaagagcggggagcggcttggcttttataggcggagaagaggcggtttaggagggggaaccgacttagatggtcaagggagctcggctatcgcgtatggtcaaggtgggggcggcgaacttggcagtcacgggcggtagagggggggtcgatggtgccggtcggggaaaaagcaaaaggggagggaggaaagggggctctgcccatgccattctgggagaaaggaggagggagagagagctttgcctccgggagttggacgcacgtggcttggagcggccgggcacacgtcgcagggggtgcggggccgagcggcgcaggcggcgcaggcgcggcaaggctgacggtggcggtgactggtcggtcggccatgcacgagcgcacgcgaaggcggtggcggttcgaatcggcaaggcgctggcgcggcgaggagcgagagcgagcgagagagagagagagagagaaagaacgagagagcgatctcttggctcggctcggcgcgtgcaacacacgtgcgaggctgagggaggggataggcaggggggaaatgggccgagaagaaacggcccacaagccagagggaggcaaactagactttttcaaagagattgaattggagagaatttggagtttaggtttgaattcaaagatgatatttaggaacatagggtggagtcaaggaatggattcaaaacgggaattgaatatttttgtagtcggagcgaatattcggtaaggattcaaaggagactccgtatccttggggttgggacaatggtatgggatagatttcaaaggtagttagagaggtcaatagatagatagatagctgggtagacaggtcgataggtagactgataggtagaaggatagatggatagataggttagataagtagatagatcgatcgataggcagggagggattcaaggtagggatttgatatttttggaaacgggaacaggtatttggcgagggttcaaaggaggcgattaacctttggaataattgaactcggaattagaatcttgaggtggaggattttgatggcgatgagaggaaacaacaggatttgaattgagatccaaggcacgacttagactcacactcaaagaacaaaaattttcgcaattaggattttcagtaaattagcttttaacgtctcgcgaaaagcggggcgttacaggtatcccccgtggataagaatgtcttcatccaagattatttagaaaactcaaattctcatattcttttaaaaaatagacaaaaaatattgggcccctaaacaatctcaaatgaaaagttttcacctataaagttgtagaacctgtctagagaaaatacttaggccatattaaaagaaatattgtaagggtctcaaaaaaacttttggtttatcacaatcggacttaaaatgactttctatacatttttaaagtttggactttataaggaactggatattagaacttgcaacaaacttttgtgcacctaaacgatcttaaaaataaaatgtttcgactatagagttgtagacatcatcgagctctataattttgatataaaacttgtctccatcccaagtcatttgtaaaaactaaaaaaaatcattttaaaaaatagatccaagagcttgtaacgaatatttggaccccctaaacaatctcaaatgcaacaatccagcaatttactctgtttctaagccacagtcgcaccgactctgcatcattaatttcaggcacccgaaataatccactccatatcagcaccctgcttccagtccgtttaagaaatgtggtgtaggatttggtatgaccactatccatccaaatccactccgttttacttccggttcatgatcatgtactagaattaaaggctatgcaactctgagcagcaaatatttactagttacaactaaatagttacacggtagaaattttcacttcgtttgaactaatatagttgttgtatgaataggtaacaaatcaagcaattcttgagagggaaaaggtggagctggataattcttccaccaggtactcactacaaattaaataccattccctccagaataaatatattacgccttggataacacatctggtcaaaattttgaaactttgtctcatcgaatttaaaaatacttgatttgaaaacatagaattggtatgtatagatttgtattgaaaaatactttcatgatatcataaactgattttataacttattctaattaaaaattgcgctcaagattacaactcaaagtccaaaaaagattcaatgctatattttttttatcgaatggagttaatatttacccatactacactttttgagcaccttatttattactctgcagatccaaaatataggtcattttaattttctcaagtcaatattttactctgtatgatccaagatgagttgagaaatatccaattaagctcgtcttttttcttttgattcctcattagtcttgcaaattaaattaatagtgaagtgaaatgaggaatcaaaagaattaaggtcatgactaatttaatttgatcctgatgagttgagaaaatatccaattaaggtcatattgaattcgggaagtagttattatgataaacagcattcttggctgctttttcacaaaaggatatatagattcacagttgttagtttagatgtcatgtctttacccgtgcatataatcaagaccttaaattgtacagaggtagctggtcatgaagattgctgcaactggacagtttctcttggtccttatggcatgcagtgtaatccaaatcgtgtgccaatcgttacatggaaatgagacagatcgactttcgctgcttgatttcaagaatgcaatcattttggatccacagcaagcattagtgtcctggaatgacagcaatcaagtatgcagttgggaaggtgtcttttgtagggtgaaggccccaaaccatgttgttgcacttaaccttacaaatcgagacctagtagggacaatatccccttcacttggaaacctaacattcctcaaacatctaaacctaacaggaaatgctttcactggacagatccctgcatcccttgcccacttgcaccgtctccaaaccctctccttggccagtaacaccttacagggaaggataccaaaccttgcaaattattctgatctcatggtgctagatctgtatagaaacaatctagctgggaaatttcctgcagatttacctcatagcctagaaaagctgagactttcatttaataatatcatgggaaccatacctgcttctcttgccaacatcacaaggctaaaatactttgcttgtgttacactagtattgagggcaacatcccagatgagttttcaaagttgtctgcgctgaagttcttgcatttgggtatcaataagctaacaggtagctttccagaagccgtcctgaatatttctgctctaactgaacttagcttcgctattaatgatcttcatggagaggtgccaccagacctgggtaactccctgcccaatctccaagcatttgaattaggcggcaaccactttaatgggaaaatcccatcatcaataacaaatgcttctaacctataccttatcgatgtatcaaacaataatttcagcgggggattggctagctcaatcggcaaacttactaaactgtcttggttaaatcttgaggaaaataaactccatggacgtaacaatgaagaccaggagtttctgaacagcattgccaattgcactgagctgcaaatgttctcgatatcttggaatcgtctagaaggccgtctgccaaattcatttggaaaccattcttttcagttgcaatatgtgcacatgggacaaaatcagctatcagggcaatttccttctgcctaacaaaccttcacaatctggttgtgatagaattgtctggaaatcgtttttcaggtgttcttccagattggctaggggctctcaaaagcttgcaaaaactaactgtcggggacaacaactttacagggctcattccatcctcccttttcaatctaactaacttggtccacctctttctatactcaaataagtttagtggacagctaccggcaagttttggaaaccttgaggcccttgaaagactgggaatttcaaataacaactttgatggtactgttccagaggacatatttagaattccaacaatacaatacattgatttatctttcaacaatctagagggacttcttcccttttacgttggcaatgcaaagcatctgatatatctggtactttcatcaaataatctatctggagagatccctaacaccttgggcaactctgaaagcttgcaaataatcaagttcgatcataatattttcacaggaggcattcctacatcgttaggcaagttactcagcctgactttgcttaatctgtcttacaacaacttaacaggaccaataccagattctcttagcaatttgaagtatcttgggcagcttgatttttcattcaaccatcttaatggtgaggtcccaacaaaaggaatattcaagaatgcaactgccattcaacttggtggcaatcaggggttatgtggtggggtgctagagt

SEQ ID NO: 6041 - DNA, 27200 bp, Oryza sativa
aaacaccccctcagtactctcttgttgaaatgaagtggctactaatgatagcttgcaagaaaggaggagatgatgaaatcatggtgcccacaaatggtgatagagattgtgtgagacagtggatgaggacactgagcatggcattggattggaccccatttccatcactgtcaactttgtgatcatctaccaaacctgcaaggataaactcatgttttaatcagggatgatatatgttctttgtttatgggagatgatatgtatgcctgttaataacttgagatgttgcaagaggtgtgatcatcagatcatggactcattggtggggtggttactgttaaccacccttggttttcactgaaactgactgatgagttttctgagaatgagaccttgagttgcctctgcaactgttggcaatttcaatttataatggcacaactgaagaaagtgtgatgttgagagattcagtgtaggaacaagctttaaactttacttcgcaccatctgaccacctttattattccctaaatttaaaatttaaactgaaattcaactatgcatgccatccgtcttacggttcgtcgaaaccgacttcgtctaacgtgacaaaacttgaagatattcagaatgattaaggatttgtcgcttttgaaatgcgcaatcaagggcaactaatatttacacgtgtaaagtagatcaaaagcttgaaaactacgggtttttttttaaagatcagcatccgaattttatggccagtgcagtcctcttccatgtctgagacatcgttctccttcagagaaaatgaccctgtacgtaatggccattcatgatgcttttccgcgttacacttggtcagtcactcaagctaagcagttgtgaatgaacacagaaaactttgaagtcaagtaacaagtggtggatcgatctatattctacttcccgtcccacaaagacactatttttcagtttttagatacaacgtttgattcttcgtcttattaaaagttttctatgattagtatttttattgttattagatgataaaatatgaatattacttaatacatgactattttttttaaaaaaaattcataaatcctttaaaagaaaatccaagaaatgtcattgacaagcgtccaagtcccaaaaatatcatcggcaagtgttagttccaagaaatgtcatcatacaaacgactttgtcccaaaaatgccatcgtcgttagggttccgtccatcctgtgccattaagttctatatgatgaacagtgtatttaacggtgtaaaataaatgaaaccctaacggcgatgacatttttgggacaaaatcgtttgtatgatagtatttcttagaactcacacttgtgtcaatggtatttctgaagttggacgcttgtcaatggcatttattggattatctctttctttaaataagacggacgatcagaaataaaaaatgcagtcttcgtgggactgaggaagtagacttcaaaagttgagagttccaagcttgttcctgtggggattgtttagttggtcaattcaattcctaatcacagtcaaaccgtgtgagcacattgataagcttttgaccaaacaagtagtggttttcatagcactactagtacttattttgaattcatgtcgacaatttacaatttacccagatgtgcaaatctagcaatgatggaaaaagtgtaatcaacagaattttttttttacctactcttccttgtcagtcatgtacagaaggatacaaaatatgacacagaacaataatcgagggtgtaacgagcaccactatttctcactaattcctgaacagctaaaagaaaatgtaagctcaacagatatcataactatgcatgccaactcagaaactgtctgtttcttgaaatatacctctaggacagggaatcaacaggagacagagtcaagaacacacccatctttttctgtgacattgttatcttttattcctttttgcacatggaagaacagtctgatggatgaaataaacttttttttccagctagaaagaaacttcacaagaaatatcttgcatcgctgttctcaaaatagcataaacaggagccaacttttaacatggtcaagatggcatcgctgttctcaaaatagcataaacaggagccaacttttaacatggtcaagatggtgaccagagagaaaaggtgagtgctactgctacacatgttagtagcacttagcaccatctgccacgcacgtctacagctaacctgaagcactccgcgtgggctaattaaactgagcagcatctaatctagtcttgtgacccgttcaacacggtcatctagtcttcaaaaaacttgatcaattttatgctgtcaaatataatgaaagggaaaaaaaaactccatccacacacacaaccaatgatcccaggtttcatctcctgaactttgaaaccgttcgagttgcctactccatctgttctataaaaaataaccatgttgacatatcgttcgagttgcctactccatctgttctataaaaaataaccatgttgacatatcatagtattacgaatctggacatgtctctgtctagatatctagtactaattggctttttatggaaccgagtgagtaccttaaagatatatttgtgtctagcttgcataggctgtgtttagttcacgtcaaaatttgaagtttagttgaaattggaacgatgtgatggaaaagttagaagtttaagtgtgtaagaaagttttgatgtgatggaaaagttgaaagtttgaagaaaaagtttggaactaaacacgaccatagttccacgaatgtaactcaaacaattaaaaaaattaggccccccttaaatcgtaggaatgagaaaaacgggcaaaacaaaggattacaaaaacatatgaatgaccggaaaggaaattttctatgaggttagagctcttgctaattttcctccaaatttttataggattgttcattccatagaaattttaaaagatatgataggattcaatcttttgtttcaaagatcttcctaagattttttttcctataggattaaaatcttccaaaatttctatgtttttcctataaatcaaaggagcagtgaacttagaccattggcatagttgagggataaaatacaaggtttttttaaagaaaaattgaagtgtagatagattctctcttctatgaagtcaacgttacgaatcaagttcagttgacgtggtacacataaacatctcattagctcagaaaaaaaatggagtttaaattattgccctaaacaatatactcctatcctaccaaaatatagcaacctaattgattatacaacacctaacaacacaaattttagccatattcattaactccgggacaggggcaacgctacagtcgaatcattggggttagtcgaccctgacgattttgtgaacatctcgtagttatttttagtttgtatcagggttcacctcttcgacttagtattggattccgaaccattgtggtatgacttttcttttccaaaatttgataaattttggtcaaattttactgtttcaaatttgaattctcaaaatgaaacttaatttggaatctacttttgtcccatatcaaaacatcgaaattgtgtggtttccaacatgttttggttgaaaacataaactttagttagtactgaccccggatagtgctccatggaaaggtaactttttacaggacagtgctgaacccacggctgatatatatactccatttgtccataaaaaataatctagtaccggatgtaatatattctagtaccacgtctgaacaaaagcctatctaaatttgtagtattatgatgtatcacattcggtactagattgatttttatgggcgggagggagtattttattgcatgtaaacattcctgagcagtagagtaagattctgttcccagcaaagagagcttggtcactattctattgctgtccagtttagctatctgctcagaatctacagactgataatatataagaatccagagttcttgagtagtaatgagtaagtacatctgaacctcaccagccggctcatcatcatatccatgtgagccattgcaggttttccatcctgagcgctgctttggaaccaaattttatcagctaataggatgggatcaacttgcagataagatgcctctgaccatatcaccaccaccaccactagtgtgaaatggagactttaaacagccattccatgttccaactttcacaggtcatactagtttctttcagactttcattaggcatggaaatcataccaacagaaatgtagccaccgccctcaaaatccacctcacaagtccagcggtgttactctaatcacataccaagaagaagaagaaatccaatatctatatacaaaggcacacaaggcctaactgagcccaatggcatcgtgccatcgtcagttcaccacgaggccattggagccaatggccgattctcgacgaagttcgtcgcctgcccatagtgagaattgtgcagcaggatcagcttcaggcccttggcgggctccatgggccttgggatcctcctcctggctccatggtggctgttgtagtagttctcctccagggtagtctcgtccaggcacgaccaggctgaacctctcggcgcgctggccgcccacatgaacctgctggagcacgggttcaccagggtctccctgaattcctttgctccctcgcaagggaatcccttcaataagacagaaacacaatgaactcaattttaaatgggtggagtatggtttatactctggttcagtggctctaatttgcatgaactgcaaggaccgagtcaagttaaggagtttaaggttacctctgccatagctttgatcttaagcgtgacgctgttggacaggatgacgatgttctggtttccttttagtttgttgaaaaggagggcgcagtcaagaacgcgatcttctgttttcggggagacgatatctgagaagcttctcggggagaacaaggctatcggattgaaggtgccggcagagatttctctttctccattgttgcatagcgctgtaggggttgcaggtggagttggtgctactggcagcatctcggttgaactctgaacatggatccaccagctctccttttccatgcactcattgatccattggagcatggaggtggcctttgataacattctgaacaatctctcccgctttttcaagcactcaagctccctgatcactgacaaaagggtaaacaagctttcagctaacaaacaagaagcatagcatggaagatgcagtcggttcagttaaaaacaagggtatggattacaagtgacaactgcactaaactcaataaagcatattgcactgtgagcgacaaacatagtgagaaatgcaatgcaatggaccactttatacataggtgagcgtgcgcatgctaaacagcacaagaaccaaacatacaaggttaattgcatctatttagtactatctccatcccaaaatataagggcttttggcaatataaatgcatagccaaaagcccttatattttggggcagaggttgtaagagaatagcaagacagttaaagctacagaagcaacttgtcattcactcaacatcacaaaatccatggattacaggtagtaaaatctagcatggcatatttgttagaactaagcagcacgacagaatgacagatcatgaattcagatataaacagtacataaaaagaatatacgctggaagatattgcaggcaaccaagttaaagcattggttaaatgtctagtagaccgaaaggtaggtggacgggtgaaaaatttactatgataaagctcttaacttaccaatcattggtatgaccaattgagttccttttaagcctcttagcagcatgatggacttcctagattcatcatcaagaagacattccatatcagttaccatggtccagactttcattccttctttggtcttttcagactcttgtcctttgtgctgttcagcaacaaaaattaacttagttcagattccttatcagaagaaaaaaagggaaaaaatatgtaaaaaatggaatattattgacaagaacttactggaacattattcagttcaccctccaacttcattgccacatcaactgctctaggattaacctgggtactatcaagtgaactagtgtgtcttaagggagaattcgacaagagtgtctggaaggggagcctatcaaccacccttttctttgtgatagtactttccattcgtgcacggttttcagacaaatcctttgttttccgagaagcagaagatactggcgtcaagttctctttgtcagagtagaaggcctcttgatcttggtcagcatccactgtgaggctctttggaagacatctccttgctttaatgcctcctgaagatataggtgtcaaattttccttatcagaatagaaaacatcatcatctactgcgtgacaaactttggactttgctgataattcattgggttcttgtctatggatcctcctttttgaagtgcattctacagacagcgaattatccacccttggtccaagaaccttcctaccaatgatgggcttcagatccctggaggctggtgtcacattctctttgtctgggaacaggtttccttgtctcacaggggatatagtatcatacttttcaggagaaagcactgaggtttcctcgtctgtaaggatgctatctttgaaatctagatgtgcaattgtcataaaccctgcatggctcttctgcatatttgcatcaactgaagttagcgggataagattcttggcgataagttcatttgaattcatctgttctccaatgctcaatatggaactttcatcatctgaaaagtcgttatgttccaaattaagaggggaaatggaatccatcaattcttgggaaatggtagtgggcttcaaccttagctgacttctctccactattatatctcctgagacaaagggggtgatgttctccttgtcccatggactgttctcttcattttcttcatttcctttcatgttcgaaatttcaaatagattctcactgattgtgccttcactctcagagtcctcaggagccacaaaaatcttactttgagcaaaattctcattgcttgtgagagttgcatccaagttaagaagggttaaaccttcatgccctgtgtctttgttgctgtttgtattttcatcagatatgtcttgcatgaatggattttctaagatgggcccagacaactccttatgtacagaagcacaaagctgtaggattttgctgtcagtgaagtcatcgcctttgaaaaccagaggggaaacaaaatgcaataattctgatatcttctgtggattttcacaaactgaatcttgtgagatacaattcacagagttgaaatcattatgctctgtctccttagcaacactcagcacgcagttttcattatctgaaaatgtttcatagtccaaattcagaggggcaacataatgcacaaattctttggattgaagatgatttgtctgttcctgattctcctccatcataattctgtccaagatattcatcttttccttttcttcagcttctccgacataagaattattaaacaaaaccatgcaggcttcacattctatcccacagttctgagaacatataggattctcattttggttttcttctttctgatagctgtaactcaaaggagtaattctttccttgcttctgccagtctcaatgcggagggttttgactgacttcaacttggacctcctggcatttgaagtgtccttttcgcctgacttgactgatcttccagcatcttccactgtggcaagcattggttgtgtaatcgaagattcaacagaatatataacatggttctcttcaatcaaatttccctcaatccttccctctctgctgtcatcaaattctggaactgaagattcttccagagcaaataaatcagcgaactcaggtataggtggtgctgagggaatcacattagcatgaaaatcaatttgttctgacacaacttgttggcttgtctcctgagaattatatcagatagttagccttccagaatatgaactcaaaattccaaagggaaagaaagaaaatcaagtagtagaacctaagtcaacagtgcgattagtatttgactgtaagcaatggagattttgatttggtaggatttaacttcaacatgcaaaatatataccatgcatccagtgcaacacatgggcgtataacattcagacaaatagccaaactaattgtttagcttgagatgaaagttatttttataatcaatgcatctaaagtaacaaccattcgcaagccatatgaaatcactttggagcaatttagatagtgcacaatataatcagcagctcccaatataacacatagatttttaccctaatctgctcacatgcacaacgcatttaggccattatgaagtggccgagattttcaaaaccacaacgcagaagatttctatagatggtaaaagcatcactaaaatagcattaggcagaactccagaacgacagtgtatagcaaaagcagctaaaagtcatcgtttattagaaacttgacatttccaatgaaaggggcaggggcactactctaagcaactactaattcaaaattgctgggtactggattatttagttatcagttaagaattaacagagcagagcaaatagggaatccagtagcacatattagacttcaaaatagtttgtaatgcatttcataaaactgtgagcatagagtatcaataaagtggatgagctaatagtcatttgccatgaaagaatttagcatgtattttattattttggcaatcagcagcagccaaggacatttctatcgcctgcatcatatgaatttcggcaatcaagcctattgcttagcgtttcaaaacgctcaacacatatgtccagaattctaccaaactatagaacatgataacatgacaaaacacactgataatttcagcatccagttacatgagtttacggggatcagacctgatgagtctcagtatccgctgactccttttgatcaggctccaactgcttgcttgcctcctgagcatttcaacaaacacttatattgcaacaaccatgcccccaaaataatcacagctatggcactgatcagaatagagaatctgctacctgacaagtactaagctcctccttatcctcctccagcagcggtggcagcagatcctccatgtcaaatgcttccgggagcgacagccagtgaagccggtattccctcctcgagctcccaagccgcagtacatcaccggctgtcagctccaccggagtgttcggtgggatccttcgtcccgagatccaagtcccatgcactgtgtaaaattcacaggacaaaaatgggtcaatgccatgttagcttttgcctcattttgatccaaatcgcaagcaaatattcgccatcatcgcaggagctaatcgagtgataatcgaaatgagctaacgcacgcgtccaccaaaaatccccaaatgaagcctcaatcaaaaccagccacgcgcacagggagatcgagggagaggcggagcgagaggcgcgggggaggagcggaatctcaccggaggagaggtcggtgacggtgatccgccgctggcggcggcgggagcggacctcgaggtggaacctgctgacgctggggtggtcgacgaggacgtggcactccgggtgccgcccgaacatcaccggcggatcctcctcctccccaccccgcccccgcgccgcctcctccacaggcagcggcgacgggggcgcgttgaggaagatgttcttcagcacgactccccccttggacaccgcgaacgccgcgatcggggcctcctccccctccgccgccgccgacgccatgctgcaggcagggctagcgatctgcgcgtgcgccgcgatcggagacgaggcggcggcgcgactcgctgggtttgaagcgttgggattttttgggggatacgaaatctgtggagactagtagtagtagaggcgggggatctcgcgatcgaggagacgttggaggaggggagaggaggcgccgggtgggttcggatttggaagcttcggaaatgcaacggctagaaattttattctagaaaaagatagagataaggacaaacgtgcgcgttccgttgggccgggcctgtaagatgtttggcccaatcagcattggctcatacgaggcctagcccatttatagggttgggattatttttgttggtaataagtttaggtatcttaatttgttgccgagtctaaatttcgtccctgaaccacaatactagatagataggatgcgtcactcaactcccataaccagttgaaataaggtccttatgcggtttgcacaatgattttggttgacgtgacttatttgattaggtcttcgttccacgtgggattgacgtgacgcttatgtggtaattcaatccggaaaaataataaaatcatggggcccacatgccaattacaccacaaaacaataaaaaatggtgggggtccacgtggaccctattgtcatcctctcaccttccctcttctctctcctctctcttccacattataatttttaaatattataatataattacaatgcaagtgtatgtaatttacatttgactattttttaaaagaaaaaattgtggcaccataaatataagcagtcccttctcttttttctttcctttttcctcttccaaatttctctcatcataaatatttttattttaaaattatcatcgtttaaggtgtatatgctgtgagattgttacttcgcaaatgcttttcatctatagttaaaaaattttactaattaaataaccaaaatttaatctttggttgatgaggtatagcaaaatgttttaacttatggaatagatactagatcaatacttcaacacttcccatcagccgacgaggatgcctgacgatgaacccaagtgtctgtgtcaccgacgcggcgccacgttgaagttcatcgacatcggcaacacctgcgacaccacccagggttggaaattttggaccaaaatttcggtcatttcggtcccctccgatacgatattacttcggccgaaatttttaaatttttaaattttttcatgaattttggtaatatttgttcaaattcaactaaattttgttcacaatttcagaaatttcggtgacctccgatcaaagtgaaccctgacaccaccctctgcgaccattccagtggcgccttcatcgtcaagacatggacactaaggatgaacgacgacgacaacatggcgtggaccatggacaccatgattgatgccaccaacgcctacgctaccaccagcgcatcccacgtgtcaatccggagtaccccgtcgcgagcacagacgacgctggacatcgagaaaattgacattttgccgttgtcaagatagagtttcactagaatgccatcccacaagttagcttcgttaaaataccactttcaaactagactaacacggtacaatgccattttttcaacttcttcacaattaaacgatttttccatattttgtttcgtgaaggtgaccaaaatacccttctctccctctctttcgttcccatcttcccctggcatagtagccgccggcgccgccagggtgggacacagctcaagcgggacggggagagtgaccaggagacagtgtgccgccgcgccccttccctgccagctcctcggcggcgcaagcaaggagtccatggtcgagcgcgctggcccgccagccgagcaaaggagaaccaatctgcggacgacatcagttggataagcatagtatcatacatacaccaatatacaggcttgctacttcgcgtgacacacagggagctaccaagtaccaacaatcagcagtacgcacatcctggccagaggagcaaggtcgacctcctcggtgtcaatagtggccgacggcaagcagcacatgcacaacagaagggaggcgtcggggcagtgcgcggccgcggactgcgacgaagggcgaactggaaatggctgcaggagaacaaagaccagtggagggcggaacttgttgcttctttcggcaggagaacgaagaacaggactcggcaggttcgatcgatttatccaggggcattttggtgagtcaagttatgaaattatagcaaaataattttaattaggaagaaacggagaaaatggcattgtagcgaataccacttggttgagagtggtattttaatgaaaccatatttaaagatggtatttcagcgaaacccatttttaaggagggcataatctctattttctccgctgacatcacctgagataccggggttggcctgtgatgatttaatttgttgagggcctatatgcattctttgccatgacaattaacgatttgtttagggctccctatgagtttgagaaagaaatgactgttgatggaaattaaggccggtgaaacttcttctgtctgctctgtgcgacagacataaaaaaaatgcatgagatactttgttgtaaattacttctggtagtactacactgtgcgcttttgatattggtataccaatggtagagatcctaattacttgcaaaaagaaccttgttgtaaatattatatgtattctacaatataataaatcatataataagctacatagtcacaaaactacacaccctgtttgaggagctcgagatcctgataagtaggttataacaatataaaaatattgggtttttcaactactgacttttaatttattttttagattatatgactacatactctcaaaatataggtgagaacctataccgtttagaaagctaaagattctagaagttgtagctaccataaactccccaaacaaaggcaaagtttgatgttgaaaatttaaggatgaatagtcagttcactccttcaacttttgctcagaggtcgaattagtccttcatgttttataatgtccaaacaggaccctaaagattatcatgcggcttaatatagtccttacacccacttaaaacgccacatggacatgccacgtcattcgtgcatgtaagataacatttaaatgtccattttaaccttcaattttctatcaaataaagaaaagaaaaacaaaaagaagcaatcataaaacaaaaaatgttaatttttttttatctatcaatgctacatatttttgccaatggtcaaaagcttttttttgtgtgttttctcaatagtttttctttatttcatatgaaaacataagggtgtaaagaacatttaaatattgaatttgcatgcatagatgatgtggcatgtacacatgacatgtttagagggtctaaggaccatattgaatcacacaatgaacttaaggtacttgtttggacaacacgaaatgttagggactaaattgatccttaagcgaaagttcaaggatcatgttgggtattcacccaaaatttaacacaaatttatgtacttaagccatgaagctgtgaaattatggatttagcattgaatttattgcaaaaggacagcattgttgtcccgttgaaactttgaaatatgtgtattgtaatgaaattggcaccaaaactatagttttcatatactatgattcaatatatagttttatgataaatttgatggttaacatgtagtattataatattgtgattgacatatctacttaacatatccagcagaacttcaatcatcgtttcttaaaagaattactcatctacttttggttcgaatttatgtaatcaaattcaataagtcaaattatagttttgtctgaagtaactcctctcagttctattgtgttggtgctttcatctttaagggtgatgtacatcattgtcaattttctttgcggagaaacttacgattctttataaagtactttaaggtatctaaattttacactaaaaattttgatacctcgaaaaacctatagtatctagagatactaagttttacaataaaagatgattatattaggtcaccgtgcatggaaagccccattgactagttgctctggaaagaatggtactgaaggtgaaagtcactagtacaagaataaggcttcaggatacaaagctgattttttttttcggtgcgcttgcaccaaatcaatattttcctgatggaatttatcattagtgacgggcatgcgagcactgacaagaaaacaggattatctattcttggcgtgacagttatctctgtgtataaaattacatagtagcttttgtttcaaacatggttagatatctacatcgatggtttggttgctcagcctataaatgaattgaagagttgtagattaaggaattttgtgaaatgagtggcatgaatgaactgaagtgcgtgatgcagctagctagccagaccggccgctctctggtgttctctctctagcgcagttgtgagtttgagcttctcctgtcgcttgtgttcctgtttaattttgctattaaaatttgaattgcatttgttcatttggcctcctggtaagtatggaattcatctaattatatcattttcctccatactagctccataaaaactgatcagaaacatgaatcttgtcttctagaatagatttgatcatcagttgacacgtgctatatactccctcgatgtctctgtcccaaaataaatgcgcacttctagttcaaatttgaatagaggagcctattttttgtttgggttagttggaaaatccatatcattataaatttcacggtttagaaatatactattattattcacctatttgtaattatatcatttcaattttaaagtattagagatatgccactatatatctttttactgtactccctccatccctaaatgtttgacgccgttgacttttttaaacatgtttgaccattcattttattcaaaaacttttgtgaaatatgtaaaactatatatatacataaaagtatatttaacaatgaatcaaatgataggaaaaaaataataattacttaaattcttttgaataagacgaatagtcaaacatattttaaaaagtcaacgtagtcacacaataagagacggagggagtattttctaaccttttaggacaaatctacccctgtcttctccattcaatcgttcatcctttctttcctctgatcctctctactgtcccctttcaacctgtcatcgccgcgtccaccgcagcgtcgcaccccgccgttgcgctacggctcctcggcctcctcgccggacatcgctctccggatgtgaggactgaggcgccgccggatccaacagcagcaagcaagccctgtctacagccttccaatgttgaaatactttattttgctgcaaccctctagcatcctgctccaaccttgtagcgcacaaattacaaatactttgttcttgttgcagccttactgcgtcctggcatcctgcttgtctagggattgttcttgctgtatgccagagctgagaggagagagaaagggaggggaagaaagaagaggatgaggaggaacaagagaaggtaatttggtttggaaatcgaagtgaaagggtaagtagtggtatatcccaaatacttgttaaattataatggtacggatccaattagccctatttttaaacagagggagtatctaatatgtcttgacgcccattctgcaaaattaatatagctatcatgcaagggcaaaagatttcacatgcttgttttgacttgtatttttggtgtaggagcaattaagaaaggcaagtcctcagaaaaaggaaatacctgattattaatttttcatgcaggtaattcttaacaaaattagaatgaatatttgctaggacatttttgaacacctttactattaaagtagtaggtgacacttccatttttgtccagaaaagaatgcttggttcacacttagtatttataactattcagagtttcttgcttttattatctatatgaatataactaagacataaattcggcagagttggttaattggtcatgaagtttaccacaatccggcagtatctgttggtgcttatggctagcagtataatcaaaatcatgtgcagctcattatatgggaacgagacagatcgactctcactacttgagttcaagaaggcaatcagtatggatccacagcaagccctgatgtcctggaatgacagtaattacttttgcagctgggaaggtgtctcctgcagggtgaaaactccacatcgcgttatctctctaaacctcacaaatagaggattaattgggcagatgtctccttctcttggaaacctaacattcctcaaatttctctttctacctgcaaattcatttactggagagatccctcagtcccttggcaatatgcatcacctgcaaattatctacttgagcaacaacacattgcaaggaaagatacctaatcttgcaaactgttccaacctcaaggtgctatggctgaatggaaacaatctggtaggacaaatccctgcagatttgcctcaacgctttcaaagcttgcaactctcaatcaacagtcttactggacccatccctgtttatgttgccaatatcacaacgctgaaaaggtttagttgtctgtataataacatcgatggcaacataccagatgattttgcaaagttacctgtgttagtatacttgcatctgggtgcaaataaattggcaggtcagtttccacaagctatcctgaatctttctactcttgttgaacttacccttgcttccaatcatctgagcggagagttgccgtccaatattggtgactctgtaccaaatctccaaaagttccaattgggcggcaacttcttttatgggcatatcccaaattcattgacaaatgcttccaagttaaatctgatcgatatatcaatcaatagtttcactggggttgtgcctagatccattggcaaacttaccaaactgtcttggttaaatcttgagctgaataaattccatgcacatagccagaaagatctggagtttatgaacagcttagccaactgcactgagctacaaatgttctccatatatggtaatcgctttgaaggcaatgtgccaaattcttttggaaaccattccactcaactgcagtacatacacatgggattaaatcagttctcaggattaattccttctggtatagcaaacattcccaacttgattgctttagaattgggtggtaatctgtttacaactgtgattccagattggcttggaggtctcaaaagcttgcagaccctaagtttatttaacaatttattcactggacccattccaccatctctgtccaatttatctaatttggtagaacttggtctaagcacaaaccagctcgatgggtacataccaccaagcttgggatacctccaagtgcttgaggaatttactatttcccataacaatattaatggttgggtaccaaacgaaatcttcggtattccaacaatatcattaatttggctatcattcaactatttagagggagaacttccttctgaagtaggcaatgccaagcagctcatgtacttgcaccttacatctaataaactgtctggagatattccaagtactttgggtaactgcgaaagtttggtagacatcaagttggaccagaatgtttttactggaaacattcccataacattaggcaacataagtagcctaagagggcttaacttgtctcacaataacttaagtgggacaataccagtgtctcttggtgacctagaacttcttcaacaactagatttgtctttcaaccatcttacaggtcatgtcccaacaaaaggagtgttcaagaatacgactgccatacaaattgatgggaatcaggggctttgtggtggtataccagagttacacctgcttgaatgtcctgtcatgcctttgaattcaaccaagcacaagcattctgttggactgaaagtagtgatcccattagccacaacagtgtcacttgctgtaacaatagtatttgccttgtttttctggagagaaaaacagaagaggaaatctgtatctttgccctcatttgatagcagctttcccaaagtctcttaccacgatcttgctagagcaacagatggattctcggcatctaatttaattggcaggggaagatacggttctgtatataaagcacaactgtttcagggtagaaatgttgttgctgtcaaagtcttcagtctagagacaaagggagcacaaaagagcttcattgcagaatgtaatgctttgagaaatgtgcggcatcgcaatctagttcctatccttactgcgtgctcaactattgattccaggggaaatgatttcaaagccttagtgtataagttcatgacacgtggtgacttgtatgagttactatactcaactggtgatgatgagaacacttcaacttcaaatcatattacactggctcagaggttaagcattatagtggatgtagcagatgcattggagtacctccatcacaataaccaaggaactattgtccattgtgatcttaagcctagcaatattctcttggatgataatatgacagctcatgttggggattttgggcttgcaagattgaaaattgattcaacagcatcaacttctgctgattcaacttcttcaattgcaataaagggcacaattggatacattgctccaggtgccgcccattttcatacagcactatactttttttttccattttcaattgagaattgttcatgcaagtttcattaacatttttttaattgaagtttcattaacatttggaataattcaataaactctccttttctaaatggtctatagagtgtgcatcaggtggtggtcaagtttcaactgttgcagatgtttatagctttgggattattcttcttgaaatatttctacggaagagaccaacagataatatgttcaaggatggtctggacatcgcaaaatatgttgagatgaactctccagatagaacactaaatattgttgatccagaattactagacgacaaacaattgcaagaaattcctgtaaccatgaaggaaaaatgcattgagtgtttagtttcagtgctaaacacaggactttgctgcgttaagatatcccctaatgagcgcatggcaatgcaagaagtggctgcaaggttacatgtcattaaggaggcatatgccaaagcaatctctggtaataatggcattatttgtatcatacggagtactatataaataagtatgcaaacagctgatgcttgaggcttgcattgcagattcgcaggcagttatcagcgacaaaacttagtcgctgacgaagtagaacatccggcacatgaggttgcatgctgtttttttctctcgtatttattgtaaggattctgacgtaatctgatggagaaagcaggcatgcatgcttgcagtagcaaatatgttatgctttttccactgaaagttataaataaatttggctttgtgacattattgaattataattatgagaaactggatatattttgtattgttgccaaaaatgatgacattttcctcccacaatttattctaaaggttgccagtaacttctccagaatgaccacaatataacataatcttccagatcaaacgcatgcaagaaagggtagagatatgatattcttgtaatttctaatgcatttatataagaaaaggatgcagttcttgcagtattatcagacggcatggaacagaacattttcagcagggactctcagggcgtcctgatcctatttaattatgaaatgatgcaagatgcaaggaagaatgtagtgtatacctccaattttgtcctaacttttactgttccatcctctctgccacaaagaattaggcaatagatctgctcagctctgcacagaaaaaaattggggaggggttggatggacgtgaggcagtggctcggcggcaggcaccagcgctggcaagagaggctgggaagcagcggcgccggcgccggtgaagaaggtgggcgaggaggaagaaggagggcggccgactaggctagggagaaagtaagtgcacatccagaaaatcattttgttggtgttataatatatctatactaattatacttagatcatggtgttataatatatggataagcagtttcagtacatgtttttcttctgctgtagatccgcctctgggaggaggagaaagaggtggccatgggaggttagggtagggaggtattagttgccggcgtagcgtagcgctggggtggtacaaggcggcgcggagatctccggcgactggccggcgacaagtttcgccggggaaggggatgcattttgcaggaaggtccttaatatttttgtgaaaaaaatgacacttactaatggtcctgttttgcaaaatagcccctgcctcgttgctggtgggctgacatgtccacatccagcctggcccaaattaactgctgatagggccgggccgatagagtatgagaaacagaattacgagcccattgtcagtgtagttaacgatgaaactgtttggaaatgccatcgctctgcccatcaaccgtgaataattttccgaatcgaaccatcgattttattaattgggtattgtagatctcttggaattcgacggatagatcgatcgagctaggaactcgaaaatattaatgcgtccaaataaacagaaatttcaaagtgctctcgagaaattaaaattatctaaatttcatagtgccatccgttgattcctagtcaaactcatctaaatccgctagccgcggccatggaaacccaaccggagatggcggtacccacggtggccggtaatgctcgagcacatcggcgaactcgaggtcgatcacgaggattcctactccaactcctgcacagccgacgccgtcgccgccaacaccgcggcggtgacctcgctcgctgtcagaccccggatattcagagaaagaaatggaacccagaaatcgcttttgtgtgcgtcgcaaggacctaaactagggttcctacgctagtaatcaccgactctccccattgtgtcacatggtccttttgctctgtgatactgtcaggtcatagacaaacagtatagccagcacagtaacaagaacaagctagcatggtgaactacgagtaacaattttttttcaggaataacacaaccccaaacaccatatcgaaaattattaacttttaagcatgagtcaccagccttcctctcctagtactacacatgacaaacagtaacaaacggaaacaagacgatctctacgcataccctttgcccggcagtggccgccgccccgcgccgcgtccttcctcctcggcctccttgcgcgcctgctcgacgcgctcctcgacctccccctccgtgtacccttgctcctcgagcgcgtccctcagcaggagcagccgcagctccacctgccgcttccggtcgtgctccaggatctccttgctcggcttccgcatcccgccggcgtcgtcgaaccccggggccgggggcggcgccttcgggggcccgcccgccgacgacgaccgcggcttgatgaagaacttgttggtctgcacgtgcccattcgtgcccgacccccgcgcggtctggagaccgatatatgccgttgtacattgcggcggcggccggggaggtggtggtggtggtgggccggcgtaaccctagctagggtttcgatcggtttggttcgtcgcgagatcgcaaggcaatgtttggctaatgggaaatggaaatgatttccaccaacaaaaagacatctttaaatcctacccccatttcccattatccaaacacaccccaaattcgggagggagacgggatgagagagagagagaggaggaggaggaggaggcgagcgtgatcttattcggcggcgcttcgtgggacggagaataataattcaagtcggtttctgccccactcgaattgatgaaattttggattaaagtgtacgcttttcaaactgctaaacggtgtattttatatgaaaacttttgatatgagagttattctaaaatatcagattaatccattttttaagtttgtaataattaaaactcaattaatcacatgctattaccatctcgttttgcatagagcacttaatcatcttcatctatatctcaggagattcaaacaccacctacataggttgcttcgtggcgagatgacgctacatatggggtatttgtcggcggaaagggaaatatacatgttttttcttaaaaaaaactggaaatatacagttcaaccttcgttgtttactctatgctgataaacagacaaaaaaaacgaagaaatcaaaatcaaatttataggtaaaacttttatgttatatatttttaaatgtcaatgtaagaaataaattttaatataaatactcaaaactaacttaaattttgaaaattgtctgcactaataaactaacaagcaaacgatgttttcaatctcaccagtaaaaaggtccacaggtatgcaatagggagggtcgacgatacaaacatgccttgtcctcatcggcttcttctttttttcttttattataccgtaagtttacacatgcacacaccacagtaaacgcaacacactcacgtacccacgaactgtctatgcgtaatattcatggataatactccctccatctctaaatatttgacgccgttaacttttttaaatatgtttgatagttcgtcttattaagaaaaattaattaattaatatttcttttcctatcattttgattaattgttaaatatacttttatgtatacatatagttttacatatttcacaaaaagtttttgaataagacgaacggtcaaatatgtttaaaaaagtcaacgacgttatatatttagagacggagggagtattatttaaatcttattggatgaagttatacaaccatgaattcaacatcacaccactaacgcttctccatgagttttctcaaggtgaaatttgcatgtttatgaatagaccttgatttatttaattttttttcgggggaacagaccttaactgcagctttcaaaacatttaggacctctttgattcaaaggaaaattcatagaaattttagatgatttcaatcctataaaaatttttcctatataaattttggagaaaatttaggggcaattgcatccacacccccactttcgaagccaattgctgttttacccccactttttagggtttgcacttttaccccctttttaatttgaagcagccgtctacccccatttgtgacagccgtttggtgggtcccacgattttgtgttaaaaaatacaaaaggaaatttaaaaaaggttttaggaaatatgatattacgtttatacccctaagggaatggataggaatataggatgagtgagtctcctcccaggctgacaccaccatgcgtcgttttcctggagatcaaaaccctagcgccgactgagaccgggcggcggcgtgcgcgcggcgcggaggctgcggatcgagggcgcgcgagagcggaggcgtcggccgcaggaacattgttcagagaactctcaatcgtgtgtagtggagtactagtgtgtatggtcactgaaatggcacttttaaggaggtgttgctattgccttttgcttcactactcggctccatttatctaaaaatattaagagtaaattgtgtccgcggtacataaacttgttaggtgggtgcaatttagtgtaaaaacttgaaaaactctcgttttggtgcacaaacttgtataggtgcgtgcggactatgactaaatagaatagcaaatctaattttgctgagttggatgatgagtagaccgccaactaagcattcacgtaagaaggacaggtttgcctgctcgtaagcaatggccctgttttatcagaaaaccccttctattgtttggtatttcgatcatgtataatttttcagtgaaacgaatctgagaggtgttcatagcggcggggagctggggaggtcgaatccgcggtggctgtagtgatgggggtcgagcccgatagctacgccgtggggggagtcgagtccgacggtggctacaacgggtaggtcaagtttgacggcagtggctgcaacagtattgccgagactgacgatagtgatagatggcgaggaggtcaagtttagtgggagagcttagaagttgatgctgcggtaggcatttgagtggcttgctttaggccaacatcggttatctcagactctgacaattcatatagcaactttgaagcctagctccaatgcttcagtgcagacattgaagcagcaaggaattaagccattgtgccgtcagattaacagcatgaacattaaatccactgaagcaacaaggatataatgcttaattgtacacattgtgacaaaatctgaacacaatgaaacacgtgagtgcatattttgaacagaaactgagatcctgaataaaattcagtgaataacctgaatgaaaactaaatgcataacttgacatgaatttgattgtgcactagtaatgtagctcaaaatcgataacatggaaccaactttatgaatgcatagtataaactactgtttctttttcttgggagagtttttcttcttgggtgctgcacttctcttcctcaatgtggccctgccttgtttggttgatgtggttagtggtagttgaaccccttctctcctattagtagcaatgaaagcagactctggcactgctcctggattcaccctttcttgatggttgctagcagcctgtaaaagattatgtactaattttatgatggttgctattagctgacaaaatgctagcttaatgaaggattgttttttctttgagaacttaatgaaggattgtcacctccttaataaaagcttccaccacagatgaactcagatagttagaattttgctggggtatgctaagcaggtgcatttcctgaaacaaatatatgttctgtttaaaattccttgttagtgtagctaaacatatacacaagcaaaatgagcatcaatagtacctgagtgatgacaggttcctgaaacaaatatacaatgagtttaaaattcatagttagtggagataaacaaatacacaagcaaaataagtataaatattacccgagtgatgacaagctcttctgaatcaacaattgatgaagtcgccatttgctgcataggttgcttctgaagttttaagtcagccttcctctgtttacaactagttttgttgtgaccaccatttttgcagtagctacaatgcatctctactccatgctttgaaattttagtcccaccctctagttcttggggctgttttctcctagttttctttggcctccccactttcttctcatatactggtggcttcacctctatacccggcatcttctcccagtggatactatctctcaggggcattatgtgggacctataagcttgttcatagcacctggttgaatagcaaaatgacactacatcctgtggcttgattctttcatgtcttagacaggaaatggcatggttacaaggaatcccagtgagctgccacctcctgcaatcacatctctttacattaagttcaacaatgtattgagatcctctgtcgctaacctgaaatgctcccatcccagcaggcaaaacatagcatgtattagctatctctgtatttttctcgaccttccgttttatttttgggcagaggccacatggccaattcctttctagttctttttgcttggtgtacaacctgttcatgatctgatttctaatcctctcaagcatagacaaaataggcatctccctggcatcaagaatgtacttgttaaacacttctaagttattgttaagaaggatatcacacttcggaaagtcactgaaaaaggctcgacaccattggtttggaggaatttcttcaaggtacttataagcttcactacttaatgccttcatcttttccatattggcattccactcgggcacagtgctagatcttgtaatagcccaaagttggttctttagtgtctccctttatgtaacacttgaaaattttaatatagatgcctcacacagaatctttgttcagcatgagaaaactcccttctcacagctggaacaagcccctggaaacgaattataaagaattatagttaggaactaaaatgtaagttatgtatattatgaaaaatcagacgaagtcataccttctgcctatcagtcatcactgtccatgcagatgtattctcaatgccaaggtctttttttagagtgtcaagaaaccaactccagcttttcaagctctcaactacaactactgcaattgcaatgggaaaaatgcagtcatttgggtccataccaacagcagttaggatatggccaccaaattttgttttaatatggcatccatcaagacaaatgataggtctacacccagacataaaccctctcttgcaagcatcgaatgacatatacaaagtatggaagcaaccaaaatgtaggttcaggtagaatgagctccctaggttagaggttctcaattcttgtccatagtcccataattggttgtactgagatatttcatctccatatatggccctcatagccatccttctagctctacctagcttgtgcctagatggtgttaagtggagttccttctgaattttcttagcaaagctcatcggtgtcattttgtcattatctctaaattcctcaatgtacctttttgcaagatacttagctgtgacggccttgatctcccactgtttagagcaggtgtgcttctctatatattcccttaccactaagcatttgactctattatccatagatgcagacaacatccatggacaaccttcagcacacttagcttcaattcttgttttggtattccgtgtcttcttaatagcaactcggttctttatagtatattgatctattgctttcctaagctctacagcatctgcaaacatcatgctaaccttgaactcaggtgtctccatgtctacatcagccctaaaactcttaaaactgaacttgatttcttcttcttcttcttcagaaatatctggcatcatcaacctttcatcttcagatgaaccatagtctgaacc

SEQ ID NO: 6042 - DNA, 45168 bp, Oryza sativa
  unsure (1)..(45168): unsure at all n locations
accaatccctggatcagtagttggtacacatatacatagttggatcacaacatatcacgaatgaattcaggctaacagagttaaatacttacattagggccaggtaggccaacaactatcagagatcaacagcggaagacaaaataatataaaggcccggttaacatgccacaggcagtcgactggggaatgagacctagaacaagaccgcactctgatcatcttgttggatacgcaagcgtaccgacaagggcttctcttcaacactctcctaaaagatatataaatagcaagggtgagtaccaaccgtactcagcaagccaccacaacaacaatgcgtatgatatgaggtatttcaaggaatggcttcaggtttttttgcataaagctagttttgcaattcttttcacaagcctaagacctagcatggactgatcaagttttaataccagtgttcacattaaacaacgacggttctgtccaccatccattgtaatcccaaggatagcttcccgccattgagtcgtcatggttttctgagaacgtccaccttccctcctctcaggaagtggctccatcagcataaaatccatcatgcaatatcccatcccacacaagttaagaatttagagtctagccaagtgtaatacatgtcccggtgctcaataaccgcgagcacggctattggaatagatttgttttactcacactgaagtggatgtacactttacccgcactccacactgcccaacacatgagcctcgtcccaacacatgagacgcgtcacggcaagctttttcgataacctcgcattggcaggatctggatccttagtttttccttgcaggttgggtagaggatgacaaagtgtgtcagtcatgaaaagtggatcaaattctattttaatttcagtgacgtcatacgttgtctcatgttgttggaagcccctattatgttgcccatgaggtcttcatgagtgcctttgttgcaaactaccatgtctaacgtgtgcgatttcatcaagagagtactgagtgggtgtgtccacctatggagacaataagtctttaggnnangnanttatgtctcccaaacaccccctgaaagatggactgagccttggacaaattcatgtcaagctattatttaggaatttttgtgacatggaaagttgtcaagcttgccattttgaacgccaaatcgtgggtgaaagttagcacgagtacacaattgtgtgattaatttgcttcagtggttaatgtcagcaaatgcctatgtactagtatttcagatatatttctttttttcacatcaaaatcatgacgaagttagtgaaaacataggattgaaataattcatttgtggaggaatagaacttatcattgcacatggatttggaatttgggatagtgttaggtggtcctgaattctgatcggagctcccacctaccgacccaacaaattcgtgtctaggtggtgtttggatcagggacttaactttagtctctgtatttagacactaatttagagtattaaatatagactacttacaaaactaattacataaatgaaagctaatttgtgagacaaattttttaagcctaattaatctataattagagaatgtttattgtagcatcacgtagactaatcatggattaattaggcttaatagattcgtctcgcgaattagtctaagattatggatggattgtctaaacatccgatgtgatagggaaagttttagtcccatctaaacagggtcttaatcggtcttgattagtacaatagtacgaactaacagttatttagaggggccagtgctagaagaaaacacacttggaccagttggtcggccattcaaccatgacatgtctgtctgatagcactgcttcaaaattctaaaacaaattcgaaagcagacttcaaaggaatcataggatggtgctactaacttcggttttgaaaatacatcgttttgagcatgtttcaggttaaacttaaaaaaactctaaacatctagtacatcttatactgaaagtatgaaaattataagtacagacgtattttgattattataatttcaacatgctagtatataaacatactgtaaaattagcagtcaaggttgcattttgaaggccatatggatgttcaaaataatgttttcaaaactggaagaagtactgtcaagtaggcttttttttagctattttttaatcacacaaaatgcagaatgatgacaggatggatacctgatttactgaaaaccgtgtacaaaatgttgaagctcttatctggtgtacaaaaagttgaagaaaattaacatttggcaaggaagatgcacctgcccaaaggaatgagtcaagatgcaatggaatggaaagaataaacaagaagaagggaagtgtacgaaacaaagaaagagctaatggatccaatgaaacctttggacattatctaaaaaaaaaaacctttggattcctactgttgtctgtgtcgtcctaaccttatacagcaacaatttcccgtgaactcatgttcagagaaaagaaaaaaaaatcgtttgtacccattgtctgaagaaatattccaaatccgagattccagtaaagtatagctgaaatatgaagaaaactagcagtgactaaaagaaatttgttctccgcataaaagactcttttcgagaggacataatattgataatatacaggaccaagagaagcagtttattggaaatgcaattacaaaataaaagagcatagagcatagggaaagcatatgaataactttatagatagattatagaaaaaatacatgaatttatggagaaatagagactcagagaaaaatatttcacaaggtcagctccattatttgctattcagcttatccgtcgtaaccaaaatttaaattttagagttaattttatttttaccgtactttattttttaatattgtcttttaaattgctaataacacatatataaaagtttacccatactgttttttatcgtaaatacgcattacggtttataatcggcttccttaaggcattccaacgaaactttataggattataaaatttgatatagacaaaaataacttacatagcaaatgctaaaaatttcatacacaaaacctactcgatttgaatctttttaggacaacgcttttcacttcatattataaaagctttgacttttttttgtcaaattttttaagtttgattaaatctataaaaaaagtatagcaatatctctaacaaaaataaataggatgggcgaacgacgggaattgaacccgcgcatggtggattcacaatccactgccttgatcaacttggctacatccgtcccttatccagctaaaggattttctcatatcatcaaaatatattcaatgttatatttaataaaactaacttgatattataaatattgtcaattttttaaataaacttagttaaacctaaataagcttgactagaaaaaaaattcaaaatgactcgtaatatttacaaacggagtgagtagaaaataggttgacacaaagaaaaatgtaaggaacagcaaaaaaaaaaaaaaaaaacaaacaagaaagaaaatagaaattcgaagagaaggttccaaccaagcataccatcttctccttctccttcctcctgccttcgttcttgtcttgtcacacccatggaggaggagaaaaaggcatagatacgacctggctgccctcacaaaaatacttcaccaaaccaccctcctcctcctccccctttaccatttccaagttccaacccccaaaaaaaatccaaccaaaaagcggagattttccaactcttatcatctcctcctcctcctcctcgtcatcgtcatcaccagcacacacccgagagaaaaaaatcctataaagaaatggattgagccatcacccaacgccgccaagatcctgtcctcttgtgtgcgcaacctgtagctccacctccacgcaggatcaacacccaaatccccccatcttcttttctttttcgtttcgtttctgcaagatttgcatcttcttcttcttcctccgaggagtgagtgacacctgagatagcgagagcgagattttcttcggtttttttgttcctctttttggccataaacctcccataaagctcggtttcttggttcgttttttctttctttcttcctctccttcgagaatcgcccgagtgtgaaatccaagatcccgaattccgtgtcttcttcttcttccgtagaaatcccggggtgggcaaagcggtgggatttctggagaggggtaaatgagcttccgtttctcgattggttcttgatcgcgtctcctctctctctcgaattcattagcttctcttcgattctttgatttcagggagagcgctacaaggcaagaagcttgggtgtccgtagtccgtacggttcttgatctggggtcgccgccaatgcagccggacccgagcgggagcggcggcgacggcaacgccaatgcgaaggcgaagctggcgccgccgccggtgacggcggcgggaggtcggccggtgtcggtgctgccgcacaagacggcgaacgtgcgcgaccactaccgcatcgggaagaagctcgggcaggggcagttcgggacgacgtacctgtgcgtggacaaggcgagcggcggcgagttcgcgtgcaagtccatccccaagcggaagctgctgtgccgggaggactacgaggacgtgtggcgcgagatccagatcatgcaccacctctccgagcaccccaacgtcgtccgcatccgcggcgcctacgaggacgcgctgttcgtccacatcgtcatggagctctgcgccggcggcgagctcttcgaccgcatcgtcgccaagggccactacaccgagcgcgccgccgcgcagctcatccgcaccatcgtcgccgtcgtcgagggatgccactcgctcggcgtcatgcaccgggacctcaagcccgagaacttcctcttcgccagcgccgccgaggacgcccccctcaaggccactgatttcggcctctccatgttctacaagcctggtatgtgtggtttcttagtttcacatttgctcattttggtaagcaattcgttgttgttattgttcatgtgtttgcattaaaattgtgtactgcttatgttgcattcaaatgactaagtcggagctttgtttatagcttgccttggttgaatcaattaagcttagtaatagttctttcatacattgttcatttggctgtcttcagattaattgaactcagcaatagttcttgcatacattgttcattttgctggaagacagcttacttgtctgctagattcttacttacttgtggcccatctgtccttctgttacaccctggtctgcactcatacattgggttttgggtttgaataaatgaggctgagatatgtgtgtggtatgacattgatatgataatgggagagggaattgaaacgttcttgggttctagctggaaactcaatctgtgcaagttagtccatttttgagaaaaggaataccacaaacagttcctacatcctagtactagtaactttgatgtaaatggcaatagtactgcttttgtggtttatctcatttgaactttttaatgcatgtcaaatattttttatgatattgtgatagttgccagctggtaattttcgcaaggaaccattaagtatttaagtgctcttatgattacgttatgtaaccttaaaatgggtagggaagaggtatctttgtctccatgtagtcactattcagctaagtctagttcaatggtagtgttatgtattgttggacatgagattggttgcaaattgcctaatttaggaagatgatgtgaaatgcagtgtcatacctactgctaccaccatcgccattgttgttgttccttatttgtttgtatctgtactgtgtattttgacttggatcttgtcaggaatgctgtatgagtcatgttaagtttatgaaactctgattttcatttcctcaggtgataagttctctgatgttgttgggagcccctattatgttgcacctgaggtacttcagaaatgctatggtccagaatctgatgtctggagtgctggggtaattctttacattttgctatgtggtgttccaccattttgggcaggtaaattatttgccactaaacaactaaattagtaggtccctccaaattctcacgtttccattgtcatattgtctcttgccttgcagaaactgaagctggaattttcaggcagattctacgaggcaaacttgattttgaatctgaaccctggcctagcatctctgacagtgctaaagatctagtccgtaatatgctttgccgggatcctacaaagagacttacagcccatgaggttctctgtaagtcaaccctgtttcctactcttactcgccataggtctgctttgcttaaatatgacataggtaggatgtcttcttttttctccttgtgatggcattgcctattccaggtcatccatggattgttgatgatgctgtggcacctgacaagcctattgattctgctgttttgtcaagactgaagcacttttcggcaatgaacaagctcaagaagatggcattgagggtacggagatttgtctataagtttgtgattcaattatttgcttatttcaattactctcaggttgaccttgtttgcctcatatatgaaaggcacctgacaagtctcattttctcccctgatttgtttgtaggaaatgaatctcactgttaacttcatttacttataaaagtcttgcatctgtggaattcaaaaaataattaagtgttgatatattctacaaccatgtgcatttttagtagagagagctatctgatctcttgaatcatgatgcctcttttcatccattgacaccacctttgtttgaacccaggttcatttggaatatatccagtaactattctgttcaggtcaatgttaactaagatgatgtagcaaactgattctttctgacatttgtttggggctacacgaaacctgtttccttggcagcccagacacttaatgcattataggcatcgtagtttttcttttcttttgaaatgctcgatctagcttgtgaaacatgcaatgatcatcttgagctctttacatattgttaagtatctttcattttgcaggttattgctgaaagcctgtctgaggaagagattggaggactaaaggagctattcaaaatgattgatactgacgatagtggaactataacttttgatgagctgaaagagggcttgaaaagggtgggttcagaattaacagaacatgaaatccaggctttaatggaagcggtaagtgcttctttgttagttgatccttcagggaaatgtaacttgcaggggccttctgatcctcagcattttgtatttcttgcatgctgtaatttttatgtctcgtaatttacatctcggcatctctcttgcctttgctaaaatggaaaagaaaaatccttcactaggaaagaaaggtgttttgtattaagatttaagatagcatgtcttgctgcttttgctaaattgtaatatgttcatttgtttcaggctgatatcgacaacagtggaaccatcgactatggtgaattcattgctgctactctccacatgaataagctagagagggaggaaaacttagtatcagcattctcatttttcgacaaagatggaagtggtttcataactattgatgagctgtcacaagcatgccgcgaatttggccttgatgatcttcaccttgaggatatgattaaagatgttgatcaaaacaatgtgagttgttcttatactctgcattctgtagtttgtccaatttttgacttgtttgttcaccaattgatttcttcacccgttttcaggacggacaaattgactacagcgagttcacggcgatgatgagaaagggcaatgctggtggagctggaaggagaaccatgaggaacagcttgcagttgaatcttggtgagatcttgaaccccagcaacagctaaactcctacaggaaggccatggctgttacatgccatcattgtctgaatctctgcacgcctcatcagctggactaatctctaagagggcaaagccgttgagtgaattgtgctttggcgttacatgagacgctgaagaattttcgtagcagtaatagctacagctactagagtgtaagagaaattggcgttatgtgatcgtaatatcctatcagtgtaactgatcttagatgatgctggagatgatagtacaatgaacagcttatatgtattcctgtccttgtagactgaacattgttgatagttggggaatgctcttggcatcaattctgtctcttctatctattattctatcgttagtacaggttgttgatgttaaatgtcactccaagttctaaacataattttcaggctctgctattgagcaatcttaaacttatgcttaaaatatgagccagtattcttaaacagttttataaaaattatagtaaatgtcagaaaacaatgtttaaatagctttcaaatgctgtgttctaaattgggtttaggctaggttaatcactcgtttaacgtaagcacgcttttcaaactgctaaacgatatgtttcgtgctaaaacctcatatagagaagtttcttaaaaatcaattgaagtttacaatatataatactttattaattatatattaatggtttaactagcttaatcctaaccgctatatagaaggcccctcttattgattctgaaacgggcctgtattttactccaaaatcacggcccatcaacgaaaatgggccgcgcattgtggggcccaaatctggataagaaggtgaggagagggaatccatccaaaatcctctcccttcccaaatgccgccgccgccgccgccgccgcggcttctcgccggcggcgaccaccacccgtcacccacctccgcgtcctcgccggagcacccgttcctctccgcccacctcctcctcccttccccctccccctccgacctcccctcccttcacctccctctcgccctcgccttctccttcctcgccgacccttcccccctcccccgccgcctcctcgtcgtgctccacgccgccggcggccgctaccccgccttctaccacgccttcgcctccgcgcttctctccctccccttcccgctcctcctcccccacccgcgcaaccggctcctcctcgccgcctccgagctcgcccgcgcggcggcgccggggttcgcgccattgctcgtctcgctcctccgccgcctccccttccccggcgacgcccgcctgctcgatatcttccacgagcacgcctccttcctcgccgacgaagagccccagctcctcgcctccgccgtcttcgccttcctccgcctcctcgccaagaaccgcctcgatccggccccgcagtgtctcgagtgcagcgactgtggcgagtgcaagaacgcgaagaatcttgcaggatgcagggagaatctggtgtcgttttgcgcctccgtgttgcgggatcacacccaagtgtgtgagctgatcgggagggacctcgtgaggtgtctccatgaactggtgctcgtgcaggagttccatgaactgtggaaggactcgatgctgggccgtgcggcggagatctgccgcattggcatgccgggttggtgcaccgcgatggccgtctcaccggagatggagacgcagctgctgttcatgatgaacaatgtgaggtgggggaatcagaagaggtaccagctgtggtttgcgaggaagcatttgatggtgcctggaggggaggagaggatacccgacattgtccggttcatctgttgcgggtatcacccaacaaataaggttatgcagtctggtgtcattgcccgatgggcggtcataggttggctgctgacaagctgcaataagagctatgtgcaggcgaatgcaaaggttgcgctgttctatgactggttgtttttcgacgagggtaagggcaatctcatgaatattgagcctgcaatgctcctgatggtaaactcagtgtctcagtatactgatatcacaaacatgctacttgagttcttgtttcttcttgtcgagaactatgacgtgcggaggaaggaggcgattgctgagtgtgtaaggaacgcatttgcggtactggtgaagaaaggagtggtcccttccttggatatattgacatgctgtgagaagctttcaccgatgctgaggcagaaacttgtggcatttttatcttctgctagtcctgaagaaaccgaaaaaacttgtgggcaacccattgatgaggcttctaaagcaatggatttgaacaacagagtttgctcaaactagacccttttactgttcaacagagtagcatgttaggaatgaactcaacaccacttgcccgcaatttctccttttgggatcttcaggaagacctggaaagaggacttgaagattgtatggcatcacgtgtagaggtgaacgcatgctttgaaggtggaagaatacggattgtagaatgtggcttaccaacagctggtcatatgagcagagctacgcatactaaatctctgctgacatgttacatcgcatcacagacacatttgtttacagagttacagtctaacccatccagtgaactacacaaccttgttagcatactcatattcatggttatggagataatgaactggccttggcattggtttctcacctgaaggatggaaatggaatacatttaactggacacaatatgtgcttcatgccatgtatttacctttgttttaaatataacaaattcatgtacagcagaaaactaggtcttcatacaaatttacaatctgcctgaactgattgaagaaacctcaatatgagcttttggatgctacaagcctaagacaaaaatatacagatcttatgttcaaatgtgctgcagagacaacatgcactgcatccttgtgatgctgaacgtttttgtgtgggcgtgatatattttcttcagaaacatagccacaggtgtatgtgtggatgaatttctcctgagttataggagttcatccgatttaagtaggccacaattatgcacttgtaaatattttgtaactatcccagcttttgttattcaatagtaaaatctctttcatggtactttgtctctttccttttcattgagaccaataggtgccatctaccaacttggatctctgatatcaatgtttttggtgggtagtagaataatatgtcatttatgtttgttttttggccttcaattttctcaatcatctttcactctgattatgtgcatgatttctcccatccttgtattacattcagtagcttcagacatattagtggagctagggaaaggcatatctatcctaattgtgattatcatatcaagtgctaccacagatgatctgcaagactactacatggctggaattgtttgaaggcactcttggcatagacttgtcaaattagtggtgaatatgtcttctgcagccatctgtctcctgatctactagaacaatgtgtgccacagaagggacccagcatacaacaaacaactcactgctggagttgttatcacccaaacaccaacaggaaattcttgtgaatttcaatggtcaggacaggttcatggatgtcatatatcaggacatctccaccgtcgaaactcgaaagacgcctatgggcaacagttcctggtgaaatgcacccacagaaagccagaattcttcatcatccagccagggatgatccttatttatggaccgcgtatcgcgaagaagaaaaaactctgtttttacatggtacacaaaaaaaagggaaaggaaaatcatggggaggaaatcatgttgccagggtcaggacaaaggaggtggtggcaagaggattggagcaaccaaagcagagccattcatatccaggaggccaacctccacctcacaactcatatcccttttgcccttaaatctgagaagttgctgcacttctcaccccccctctaaggaaagactgcaaagaaaaggcctgtgtcaaggagagggtagtagcaccttgctctcctttgccttcagagaaaccggaagcaatggcgtctgctactctcctcaagtcatctttccttcccaagaagtctgaatggggtgccacccgccaggctgccgcccccaagccggtgactgtctccatggttgtccgcgctggtgcctacgacgatgagcttgtcaagaccgcggtatgctttctgaatatcatccgtactgttctatggtttttggcatgcatttgtttcctctttatatcaatgacaagtgaaggaactttatgtagttttatgatagatataagcactttatcgtcaggaaatcaaataggatgtgcagtcaagctaagttatatatagcagaattcagtgaacataaaacacttgttttgatataacatgattcaaatatactggcatctctagttcaaatctactcttcaaagttatataatgcatttgaaggaaaatttctatcttcaacttcacagaaagcaaaatagatatgatttgtgtataccaaatgaacttagagactcaaaatatactagtaatacatttgtaaactcgacatctgcatcaagacatgacatgggttaaccactagcagttgtaaggataaagcatgaagcattcatgtgtcctgcttatgttctatgaaccatctgcaggtcataattcagaagaaaagtttggaacttctaatcctacaacataacaagcatacttttatcaactttggataataaattcttaagatgagtttttcattcaattatggttcagaactagaagattaaaaactttatccttcttgctgtagaaaaccattgcatcaccaggaaggggtatccttgccatggatgagtcgaacgcgacctgcggtaagaggcttgcgtcaattggccttgagaacaccgaggccaaccgccaggcttaccggaccctccttgtcaccgcaccgggcttgggacagtacatctccggtgctatcctcttcgaggagactctgtaccagtcaactgtagatggcaagaagattgtcgacatcctcactgagcagaaaatcgttccaggtatcaaggtcgacaaggtatgaatttcactccaaactgacccctgatccttgttgctcattcaaagtagtatcaaatttattaaagctgttaaagaactgaatgtgttagagttgttattactagagaaaatcattgttctagattgaaggaactacaacattaattcttctgaatttgtgctcgatgtcagggtcttgtgccccttgctggctccaacaacgagtcatggtgccaaggtctcgacggccttgcctcgcgcgaggcggcatactaccagcagggcgctcgcttcgccaagtggtgagacaaatttttcacctacaaatataatggccagttacctttcacatactatcatttgtggatatcattccagtgtctgacatgaagttcttcatcttcaggcgcactgttgtcagcatccccaacggcccatctgaactcgccgtgaaggaggctgcctggggccttgcccgctacgccgccatttctcaggtacatatcaaacttgattacagaacaaaaactgcaagaacataataaatctctttcctgatgatgctgcaagcatgaacaattttcttgaataatactaggacaacgggctggtgccgattgtcgagcctgagatcctcctcgacggtgagcatggcatcgacaggaccttcgaggtggcgcagaaggtgtgggcggagaccttcttctacatggccgagaacaatgtgatgttcgagggcatcctcctcaagccaagcatggtgacacccggtgccgagtgcaaggacagggccacccctgagcaagtatctgactacaccctcaagctcctccacagaaggatcccccctgccgtccccggcatcatggtcagcattctaccactgataaagaaactgaaactaaagcttaggaagctactaatattgctttacttcttgcaaaatggcttaacctgacttggaatgttgatcaagaaactgccgctgcaaatgttaaaagcttaacctgattcttcttgcaaaatggcttaacctgactggaaatgttgatcaagaaactgccactgcaaatgttgatctgctaattctgacatgattcttcttgcacaacgatactactaactgtctctgcagatgtagatgatcaagaataaacctgaaagtagagctgatcgataatattgattgattgttgtttggtgcagttcttgtcgggtgggcagtcggaggtggaggcgacgcagaacctgaacgcgatgaaccaggggcccaacccgtggcacgtgtcgttctcgtacgcgagggcgctgcagaacacgtgcctcaagacgtggggcgggcagccggagaacgtgaaggcggcgcaggacgcgctgctcctccgcgccaaggccaactcgctggcgcagctcggcaagtacaccagcgacggcgaggccgccgaggccaaggagggcatgttcgtcaagaactacgtctactaatccgatccaatccaatcaagacagtgaacctgctgctgctgctgctacgtactacagctactgctatactgctagtacctcgagggcactgtagccagtgtgtcgtcacagttacaggttgagatcgatggacaaagttaaaactatactgcattaattaattttaccttgagaacatacgtggttcatcatgtatttcatcacatgaatcttttctagagcgtttgatatacatacctcgtgttttgcctctgcaataaccttgtgtgtagacgaatctgtatactacctgtatgtgtggcctgtgaatcgatttggttactgcaaagttttgcgtatatatacatgcttgtgattctggaattattctggttacccccttagccttgcttcacaatctgttccctgctctggcaccacataaattgaagcaaaaattgtactcacttcgctgactcatgcccttcactatgatttattctgtgttaactctgaatacgatgcgtatatatgttgctttctttgtgttcctctagtccaaatttctattttggcatgaaaagatttataaaaagcgtgaaaactgaagatcatgaccaaatgctgattttttttttgtttgataacttccattaaaaatgcataaatgtgttattctttttaagtttctcgtgaacatgcttaaatagaactcgtgtggtcatgtccataagttgcatatttgatcccaaagtggttatcatttcggcccataagtggcacaatttcagtgcataagtgcatgcaattttggcctataagcacgttaattttgggtgcgggatgggaaaacatccattcagatatattggtatcctgatgcatcacaacttcacaagagactatcaaacaaggatttggtaggcgatcaaggacatattccaaaagaaactgagtagttggaaaggaaattttttgtctattggaggaaggttgattttgatcaattaagcttcggaatcgctatatttgtggcaacagttttcttccctcattacagtcaaatttctaatcgttcgattggttttgcgatttgtgctgacatagacccaggaacccatatcatcatgtccatatccagttccttgtcacgttggcaggcccattaaaatggcgaggccaaaaatgtttgaataatagcatttctcaacttaaaatgacagtacgtgaagctaaaattacatatataatttagaaacttacaaatgtaactttggaacttacattgcaatacactaaaattacatatgtaatttagggacttacaatgtataaatacatgctaactatttttcataagaaatatggcactatttttcataagaaatatggcgacataaatataggtagtcccattaagttttaagtagcctagctatatttatgatctcctttaattgaggcacctaaaggtacactcaagaatctaggtaattactggtctagattcttttgcagtgtgatgagcataaaaagaaatatagggcctgtttgggggagctttagattctgagaagtagttgtttggtagccagcttctgagaatctggaaaagctctgaaacccaacttctgacttcttagttcatttttcagaatctgtaactacagattctcagaagttgtggactgtttggggcagtttctagcagacaagctcccccaaacagggccatagacttgctaaatggagtgtcttatgcagacctaaagaatgtggggggtctcagaatattaacctcgaggtacagaagaaatatttgctaagcaaagttaattaatgaagaggggctgtggcatgatcttcttagaagaaagtatgtgtccaaaaagaatatcactgaagtagaaaagcgacgagtgggctctcattttgggcaaggttcatggaggctaagaaatcctttctgccattgggatcctaggagattaggaagggttctcaagtgagattttgggaggattactggtgtggtgataggccattcaacttactatattcttccttgtattctttggcaaggaaaaggaacacaatagtggcagaggcttagtacaacacctctaaaggattggtataaactggtctcaagagtttgtgcatttaatctatctgaacaagatgatctttttaaatggaaagttcaaaagaatggaatcttcacggttaactccatgtataaggtgctcatgtatcgagatatcatacaattctattatctggaagcctagatttccgttaaatataaagacatttctatggtatatgggagaagatgtcatgttgacaaaagacattctagttaaaaggaaatgaaaagggatcactgatattgtttatgtaatgctaatgagactatacagcatctcttttttgaatgtcaagtagccaaaaacatgtggagtgccgtatcttttttgggccaattccctatatgcccatgtaatttcacccaatcccttctacgcccctgaaatttgtttgatctcttatatacccctgagtttttatttggatcccttacatacccattccgttagttgaccattagtttgaccgttagttattgtagaaattactttattgtccttgttatattgttaaaagctagaaatgttttatgtgtaaattatttgagttgtgaaaaccaataaggaataaattactaaatatttgtgatgaatttttgaaaataaaacattatttcattaaaataaaaaaagatttattgtaaaaaaaagttctgcataagatttgaaaattacttttcaacaaatatttagtgaaaaaagattcgttgtgaaaaaacaaaggggatataattagtttatcacaaattagaaaacaaatttaaaatttttaaataaatttcagatcaaatttgatgaatttcgtatatcttcccaaaaatttaaacctaaataacatttagtttttgctcttaattttctggtgaaactaatgtatggatttaatcataatttttaaaaaataaaaaataataagttttattttttaagttgggcattaaatgattatattgcttgtattttgtataagtttatttttcatatgaaaatttattgggtaggtaccacacatatgtataggatgggtaatatagtcattttaaaatatttaacggtcaactaatggtcaactaacggagatgggtatagaggagatcaaaatgaaaactcaggggtatataagggataatgtcaaattcaggggtattgaagggattgagtaaattttcaggggtatatagggaattttctcttttttttatatttgatgaagagaggctgcaagatgttggaggccagagtgtgatgagcttcttctctaggcaaggatggaacttcaggggaagattacaagcttaatctttgtttctcttcttttgtaagggttggaactgtttaagtggtggtcatttcggtactgcccattatatctaaaaaaaaaagaagctaagctacctcagtttgtgtagtatttatagagtggtagtggcccaatggggaatgacaaagatatgtcataatttgctcttaaacccaagtttattagcttgcaatatatgcttaaaagtacaatctgcctatgatatgatgatacaagctactccctctgtttcaggttataaaactttctagcattgctcacattcatatagatgttaataaatctatatacgatgcttcagcataattaggagttggtgaggtcagccgggtcgagcatttgatcgccatggctggtctcaccaaggaagccggcgtgcgaaaggagcacccacaggtgcgtggtgagctccccgctcccgcgcaggtgcacctgatgcttcgccgccctcgtcgatgccgacaggtgcagcaggaaacccgcccagaacttgcccagcctcttccatagctcgacctcggcgccgccaccgaacgccgccacgagctcctccgatagcagcgcgccaatgtcaatgatgccctctcaccgtcgtccccattgcaccgcggcctgttggagtttaggatgagctgatgcggaagcccttgcatcgcgttgcacccgcgcatggattgtgcggcctccctcctcacttcatggaggaccttgtaggcgacgaggccattgtccggcaccagtgcctgcctgaccaggtacgcacggtagttggacagggtgacggcggtgacataatgcggccacacatctgcgagttcaccatcaccaccgccctcgggcagagtgaggttatacaggtcgtctcgccagcgaccggtggcttgttgttccagtagtttgatctggcagaggctggtggcgatgtgccaggctagaatcttgtgggtctcgccctcgcccttgatctctctttggatatgctcgatctgactgacaaggtgttcgatgtcggcgaaggcattcccaaggtaagaccgcaatagctcgttctttttctgcgccaactcctctggtgaactcctcgtccttccagccgccactgacgctgccgcctcttgagaattcaggagggccttgattgacgaaaacagttccatcttcacctccctccgcagctaccttgttctgtatgccaaggtgaaaaattgatttgaattatatataatatataggagaactacaaattggtcatccgttgataatcatgatcaaaatagcatggtgattgatgactaataaaggggtcatctattcatcaattaactgatttttaaaagttcgacacactcttttcaataagccacttttcaatacaatggtgcaaacctccgaccctctccctctcccttgcctacatgacccaacccgcttatactgctccccaacccaacgcaccaccatcctttcccttgtcagcatcgttgaggcccacaacccaacacaccaccattctcaccgtctccctccctcatgctcaattcaggtagaagacggttgctatgccgtggatcttgatcaacattatattcattggtcaactaagattttaggggaactcttctcagtgcactgatgaataacgaaaatggattcaatttatttagaagagatcgataaattgtttacctaaagataactcttgtaacgcgggctatgcttccagtccgagccgacatcactaggttgcactggcgaatattgcggtcccgtcggcttcgtcccctcccgatgagccagaacatgatcctcgccaccttctccatcatccaaagccgcagcccctggatccagcagccttgacgtcctcgcaacctgatgtagctgcagatgatcaagacattggtccactgcgagaagacgtgcacgataatctcccagagctctctaatgacaagtatggcgatgatgcagtgggtgacgaacactccatggctgatcctagcgaggcggcccttggcagtgaggcctgtgctaacactaggcatatcatgcactgcgtaggccaggtatgaggcagctgctgtcatcagaagcgatagcagcaacctcacgcaagggaagccactggcgaagacatcagcgtgcttgctgtagaagaagtcctggaggaaggacagctctacctccgtcacacggaacgccctctcgtagcccttcttgtcatctaggatggcgtccacaacgagctgccgggtgcctgcatggctggcctcatgtatggggaagttgaagaaccgacggcgcagcagcttgtacagggcgaaggagaggcacacgtccttgaaccggttgctgctgtcgccggcctcaccgagcagggcatcgctgctcccttggctccagaccttctccacagtgatgacctcctcctgcgcaagttgcgtctgtgtgaagctgggtggttcgacctttatctgctgcttcagcttctcctccccgagaacgatgtacttgtaccccgccatggtggccgggttggcatcgttggacgtgtgctgcgtcggcatcgccatgtagtcactgacaagcttcatgtcatcatctctagctctggcagccgcgctggaggtgatgtagtaccagacgatgcgcgaggcgtggatggaccacatgagccagagaggcaccctgaggtgtatcgccgtcttcgcccgaagctggttggccgaccacagcgaggtgagcatgtcgacgagggtcatctccttgggctggtacggccggccgatgcggatgctgtcctgcatggtgacgatgaggacggcccacaccttgaagaaggcgttcgccacggtaccttgatgggaggacgacggcggcatgagccccagggtgtagctcacagcataatggttcagtatccgcaggagctggacagcagggttgatgtacttctgggaggagaagcgggggccgatggaatcgacggcgaacttgatcagcagcagcgttgtcgccgccgccacccagaactcgacactggctgcaccagtggtgctgtcatgacggaacaaccctcctacagttgtggagatcaagtggaggatcgtcagaacaatattagccatcttgcatttgcacactactgccgtctgacgaagcctacttagcaagctaaacacacattagcaacttaactagcaagctagccaaacacattaacactgcttgaactgaaaactttggtatagcaacttagctagttaattagctcatcccaaaatgataagctcaactcactggttttgacgtcaagtcaagatgcttactttaaaaaaagacataacgctagtatatggttgtcgcgttcccatagaattttaatgactttataaagaaaagttgctgccatgacttattgcgtcaatgaaaaatgttatctatcacatggttatcgcaatatagcattttcaaatgggaaactgttttaagtcctgagcactggatgccctcattcctttaaatgatactccctccatccctaaatgtttgacgccgttgacttttttaaacatgtttgaccgttcgttttattcaaaaaatttaagcaattattaattcttttcctaccatttaatttattgttaaatatacttttatgtatacatatagttttacatatttcacaaaagtttttaaataagacgaacggtcaaacatattttaaaaagtcaatggcgtcaaacatttaggaaaggagggagtatcatacaatgagtccaatcatacaaagttgggcagacaatagtagcctatgaaaattactaaattagagaacatatactattgtcttagatattcctctataaatattcaaaattaaatccgctgcacacatctaactgtgagtgagattacaccttttatcgagaaataaaaattgtaaatccaaccataaatgagattgcactattctattttgttatttttacttctctctacatagattcactctagattaaatattatggagggtgtatgagacaatagtctatgttgtcatatttttaagaaaactttataactattaaggctatattgaaatactacaattatttgcagtcttactcccacaagtaggtgtggaaatggtcgagaattccacactgactaaggctcatttctgatttctaccaatatagcgctagtcaaaaacagtggtgggaacagtttcagtctttcaccatccctttcctcggtctgtattgtattcatccagaaattattgaatatctagacgccttaatggcacatacaaaatgaggttacaaaacttggggaggcaacatatgcgtgaaggttgtcctaacccaccccctttggtttgtaggaaaaatggagaaaaaaacatagtaacaagaattctatagaaatagaaaaaattcctgcacgtttcatccatttggtttgtacgaatggagcaaaggagaaacatagaaaaaattcctttggatatgtttccaaaggaaattcataggaaaacatagagctcttttttctattcatgcacataggattgaggcaaagcactcactgttctatgtacttggcctcaagatgcatggattaaaacattcaagtctgatttacatttacttactacagggtattcctgcattttcctcaccaattatgtgaacgtatgatcattcctaaatttatcacgtttttaatcctctgttttacatatgcatttttcccatgttttttgcattcctgggttctaaggagacctttgcataaattagagctaggacgcacgcgcaactagattcccgacatcctttttttccagaaaaaaaggccttctacaatatgaccgcactcacaaaaagttgcaaaaaagtagctgcaactatttagctcttgatataatcaaggtctagggctttggccagtattatttatttgcagtgtgtccaccagataacaaattaagagaagacacgcacaagatgcattaggcatacatgatgatgcgatgacgaagactagaatcttttgcatctaactaaaagccaaaagggagaagcacatacttgtttaagaatggtaaggttggttaggccatcaccaacccccaccacataatttatttaagaatggtaaggtgggttagaccatcatcaaccccaccagaattctggaatgatcatgcattatccttaaacgttaaactaaacaacacatcatcatatggccatccgacaacgccgccacaagccttcgagctttatgagccaaatacaaactttccttcgagctttatgagccaaatacaaactttcatgatgatttctctaacttcaatataaaccatcttagacttgtgtacaaattttaagaaaataacttgattgactttctttttggcttcatttattgacgtttcaaatatatggatttcctaatttatttgaggaatatcgttatttcctaagagcacatatgggagaaaagtggaaaaagttattcaaagtttcgaaatgaatcaaatttaggaaaaagttgagaatactaaataagttacatttggtatcgaagggaagtattacacagcggtttttgacagtctactgatgttgaagtaaggccatagctgtttgatagcttaatcataaatatatttagatgacattggctagtaaatacaagatatctatgataagattataagaaaatccaagaaacaccattgacaagcacccaattacaagaaataccatcgacaagtgcaagttccacaaaatatcatcgtacaagcgactttgtcccaaaaatatcatcgtcgttatggttccgtccatcccacgccattaaatgcaatgttcatcctatagcacctaacggagggctgctaacaggacctaacggcgatgatatttctagaacaaagtcacttgtacgatggcatttcatgaaactcgcgcttgtcgatgtcatttcttggaattgggcgcttgttaatggcatatctgggattttccctaggactattagcaaccaattataattcattagtccgcattgcatgggcatttttatctactttactcctaattttttttaaaattactaaggacaaaatgatatcaaacttaataatgattgcaaaatcatatgtagagtccatcctaatattcagttactttcatttttaatttaatatttaaaaaatccaaaagtaaataagtatttagttgcatttgtgctagagtcacaatttagtatgctttataacttaatgtttgcatttgtgttggagtttcacttggcttcaagtctcaattatagagtggttttttcatgatttaataggttcttgattccaaattaataaacatctagttgtgctatgttaggagtctcagttatagttttcacttgatttaataattaaaaattttggaattaatagctggtaggttgtactccctgcgtcccaaaatacaagggattttatatggatgggacacatcctataactacaaatctggacatatacaaatctagatagacttcttccctatctagattcgtattactagggtgtgttcaatccatccaaaatccaacagagatttcattactcatttttttcctggttctctaggggtaagacagtggttgcgtgttccctgtgatgggaggagaaggcggacagacgactcattgtaagatgtgggatgcttgtttcaatctaactatgtaagctttcaaaaaaaatgtcaagtacagaaactaaagtgtagagtatatttctaaattctaatggcaagttagacaataggacactcaaatagcaggaccagcacaagagtcccaaggcaggttagccacctgagggccgacttttagaatactggtgctaagctttactcctgtgaagggtgaatgcaaactgacagttctaagctttattccaatgacatgtggatgcatgattaattggcactacttagtgcaaaaggtagttgtggaatataattagtagaagaccactgaccatgactctgtgaagcaagttgactgctgcctgcagctaatgcatctttccagccggcgcaactacctgaagggtgcaatgataaaaggaaaaaggaaataagaaaagagacaataaaggaaatgacctcctttggtcaaggaaaaatactttattagtcctcattaatctttccgattgggatatatgagtaccgatttactaaagcttaagctttccttctgccagtgataccttggtagtgagcgggcagcagcggcagcttctgaatccagttaccctcaggtacgcatgcacctgcagctagcacagtcagtaatgtctgggaatacactcatgccctgcagcatgtagacatggaaagttcttacatatgtatggctgctcattgcatttttctttgattcttgattcactgtgcgtacgaaaattaatcccatttctcaaaaaaaaaaccatgggcttccttagttctttataaagctagctgggttcattcatcgaaagatctattgtctaaaaaaacaaacctagaaagcccaactcttacaacctaaaacaaaactagcacaaaaacaagtctctacagatcccttgacaaatgcagtagtagttagatagatgttatttctgcacttcaaattattatgtatcttgttgcaaaagaataagagcagcatatatcatgtacacactatgtgctaccagcgagatgaaaattgtccaaaatgtaaactcatatactgtttgcttgatgcattctccgtatcatgagttgttgcttgccaaaatgaaaaaaaaaagttaataataaaatggtccctagtgtaggagtaataactgtaaatttcctgtttatcttttacttgctcatcatcaataaattaacaaacagggccatcgaacaagcttaaaaattgaaaatggtggacgtccgtgctgtgattgaatcattttttgtcatgctgaaagagaacatctatgtcttgatccgcattgagtccttggtggcactggtgacattgatattccttgcaatgttcatcatagacttctaccgctgccgaactcgtagctcaatcttgaccaccattcttgaaagcatcgacgaattatctgatcagatagtagtgtacctcattggagccatgcaatccgcgaggtttgagaatgagctgttcccggtctgggccatcgtgctggtgagtctccgtaccagcctcggctatctctctgggtatggcatctcagaccgtgatcgacaattcatggagctggcaaatgtgatcaagttcataggggcaggggtcttggctggcactcgtggcttgaagtatgcaaggccactctggtcattttgggccatcctgcaactgaagagcatgtaccggttcttcgcacatggcatggcaaacgaatccttgtggcatggccggagctcagagtttattcctgagtacatgcgcaccttcattcctgaggaccaggagacaggcgtcaatcatgatgatagaaacacatcaactatgatgccaggcaaaaaatatctgatctgcggagagtccaacaaagacatcaccttaaagaagcctcaatacactataaatatcagcaacagcagcgctcagtcactggtcacactgggcaagattcaggagtacaattggaaggggatgaacaacagagatggagacagtaagtttaaagacttgagcatggccttctcactgtcaaggctgcttcggtgcaggcttgaagatgtgacactgaacaaagatagcattaacgacatgcagcatctaatcatctcggagttcattcctgacagccgaggacaacggcaggaggagaaggtggacgggcaccaggctgtcgaggctgagcggacattcaggatccttgagttggagcttgcatttgtcagagactacttctacaccctctacccattggtcttctgggaagggcttggttctctctgtttgagtctgctcctgtccgctgcaactttcgccattgccttctggctggccgtaggaatccgcaaggtctatcaacccccagagggcaatcttgtgctctgggtggatggatgtaattttgacatcatcatgacatgggtgttcatgttctgtgtgatgttcaaggagatctgggaaatagtcacatacctggtatcaaactggacaagattacttgtcctgtgcaagtatgtgcaggaccaggcttggtttgtgagtgaacgactcacgaagcatctagtaaggtcatttttcgagtcaaaaattggcgaaccatggcatggacgtatcgatcagtatgacttcttgcagcaaattacttacaagccaacattatggaaactggcaaatgtcatcaccctgggaaagattaaaggcaaattggatgggaaaaaaactggtgaagccatcaagatccctcaatgtgtaaagctagcaatcctacaggcaatccgccgcatcggcctcaccagtagaccgttaccgagagaaatcccatcactgagaagctacgtacatgctctcaagtcattctagtgtggcacatcgcaaccagcctctgcgagatcaagcttgcgcatgacaagaaaattgacttaaccaaacctgggttcttgtgttctgcctggtcgtacatgaaaaaaaagctctgctgcttctcttcctacccataccttataggcgagaacagtggcctgtctgctgggctcaaaacaaactaccatatcgcgatcagcttgtcacggtattgcgcttatctacaggtttttcgttctgaactgttaccagatagttttcttgtccctgaagtgctatttgtggaaaccttaaagcatgcccgcgaacaactcaaggattgtaacctgaaatggtgtagatataacaaactcatgggaattgcactgcaagcaacaccaagcagtgtagatgagaaattgaaaatgaacatactgcagcaaggtgttactctagccaaggacctgatcggaatgaaggatgatgaagcctgttggaagatcctagctgaggtttgggctgatttacttgtgcacatcgccccaagctggaatgcatcagatcataagaataatctcgagtctggaggcgagttcattactctaatctgggcattgctttggcactgtggcatcgaaaagagcagcctgtggcacaaggatgaagcatttgaaaacaattctcaagtacctcaagaaagcagtactgaaaccagaaatgttatacctatggatgagccagctaatgaggatggaatcgagagttcagaagagctcaagacaagaagctttaggaggggaaaggagagcagaaatggtccaaaagatacagcaaagcaatcacatggtgagaatgaagaaaagaatggcatatcttccagcagcttcaggagttaatgtgccacaaatactatggtgagcgtgtaaaaccaagtgtggttttggtttatttgtgatggaaaattggcaacgaaatatataaccatgagttggttttgagtgagaaatttgctttggattgttggcgattttaggcatcagtgcttatgactaatgtgggtcaggttgcgatatctgtgcccagaatcggatgtttggtttacgtgtgtgcaggtgatcgaagtcaacctcggtcaatggcgaggaccgggactatgctcagggaggagcataggtccggcacggtcaagaggccatgtgacaaggtgggactgacgtcatgatccctgatggtcaacctaggtcgacggcggatcgggactagactgagggggagttgaggtccagaatgatcgacgaagctgtgtgacaaggttaagatcaaggtgacacatggtggacgaacaccgtgtcgggaagactttgcgacgggcttcgcaaggtcaagtgcaagtgccgggattcgcgaagaaagccgacggatgaaaggagcaagcagtgctacagtacacgtggtactgtagcatgcagccaatgagaaaagtgcacgtgcatgcacttggttggaagacttggtcaagcaagctagcatgcaagctgtgcatgtgtgtgcattggtttgagcagtgcatgcatggacaaggtgatgtgcatgtgtgttgtgattggttggtagggaggccaccaatccatcgtgatcatgggctcggccaggatgccacacggctggaccggactggcccagtccaagatggagcagaggccagcatgatccaagcaacgacggcccagctcggcaagcaagggcgtcaaggcaggaggtctcggcgacgacgcgcgcgtgagggacacgcggcaggcgcggactcgactgcgcgctctcgcgcgggagatcgactacatgcgggacccatgccaaattcagatggcgtgcgcgggaggagaaggtgcgcgggagcggctgggcgacgtggcagcatcggtttcgcgcgcgggcgtgggacccaagcgactccgcgcgcgcgcgggagatggcgctctccctcgctgtcaagtgggcccggccgggagcacgagctcgcgtgagggacgcgcgtgcggcacggctggcgacgtggcgtgcatggattggtttggattgggatcacacggatcgggagtgcgaggagtttttggattgactaggtggcagcgatctggagcttcctttgagtagaaggaacaatggatggaacagatctgttctgagttaggttttcgccctaggggtatttgagacaatgtcttaggggtcttaggctataaatagagagatggatgcaagggtggaggttgctcctttcgtaatccttttgagatgctcggtgagagagttatggtgtgagtttggagtgtgtttgcctgagaggcttttgtattaggattagtttggagtgtgtttgtccgagagattttaagtctgtgttaatgttcctctgaaggtgtatgtttgctcctagttgagcgattattttgcatcacctatgaatgaaatgatttgaaggatttcgtttttgtcttgttcatttaaattccgcaatttaaattccacttgcaatttgaactttgcgatgatgagttttgctcactcctcctcacctctcttctagtttcgggaattccttttctcttcctcttctagtgtcgggaattccttctctcttcttttctagatccggcttctctaatagccgcggttccagtaaggattttgagaaatccggcttgataagtattttcgggggcaagatttgaattgctatattcacccccctctatagccgttcttggtctttcagagcgcatgactccatatacttcctttctgtatgtacttttaacatgtacctgaattctaacgctgtggttttttttttcagaatttacaagagcaagctggatctagttcaactactgccttcccgtgcctggaaactggaaagattttttcaaaagaaatacacagaagctatttgaataaagttagtccttttgggggggctctttgaataagtcaagtacacagatgtatccttgaaactttgaaagcctcttggttggtccctacttgccgtttacatgtttgtggtctttttatgttgtcatgattttcacactcaattggagaagtcctctattttcccttcgtttattgtgatgtatttgaatacctatatgtattttgcttgtcctacgtcctgcatgggattgatagcagattggaattaagtcgacccctttctatgaattgctcttctttattatctttgtgttaccgtcaaactcccagcgatattgtacattatatagaagtatataacatagaacatttgtgagtcgacagcttcggaggctcggagctcccactttttttttcgtttattcctaagttaaagtgcagtgaactgaaatgcagtgatgtagctctcacctgaagttactgaaccaatatctccattaactgaaggtgatgcaggcttttgcattcgcaagaattgcaacagaatttctgctccctttccattttccgaaaagataataattcaggtggaatttcatatctgttagcacttctccggtgccaatttgtggcactaccagtggtttactagactcgaatcgaatccaccacccctccccctctccgatccttaacccgatatcattagctggttgtttcaactttcaaccctacaaaaatttttgacaaattttctactaaaaattttaacagatgtaataatgcacacatcaaaacccaagaacacgaaacgtcgcacaaattgtagtgtgtacttggggataactaatactccacattatataagctacagatttaaggtcatatatcatagaactacatatttacaacaaatttatcacaaaactacatatttaagactaaatatcacaaaactacatatctaataataaaattatcactaaactacatattttgggggttaaattctttgcactaatgttatgtttgagttgtaaatgtctaagttttatgattaaattgatattaaacctgaagtttttttataattttgttactggacctatagttttacgatattttaccttaaatctgtagttttgtgataaaattagtgctaaatctgtagttttatgatatattacgttaaatctgtagttttatgataatttgaccaaagtacttgtagttttgtgaaatttactcttaaggagtgcagattaagactcggtcgcagtattgccgtgtgttctatggcagggcctagagtcccggttgaatactaccatgtaatatataaggtgggcagggagcctcgaagggcataacaactatcagatcgtcaaatcaatgcaacatctggtgaatacaatcccaaacagtagtagggtattacctcttatcaagagggactgaacctacctaaacccttatgtttcacattcatctacttttaagtttcatgtgctaccttttttttgtcattgccaattttcagaatcgacatggtgtgaaaagtaactgaaattccttaccacaattatgaaaaattcagtgacctgaaatctatgacactctcattgccaaatatagttgaatggcccatatatatacctgtatctcatttaggtgtccaggaactagtcactatgatcttaaaattaattatcaaggaaagaggtcaaaagcattaaatggcgagagctatacgtgtttgtcacccttttctgccaaataacaatttacatatatctatatatatcatcaacaaaatcattttcttgtttaccatgtgtatatgcccattgcgataccattaacaaatgcttactcttatttcagtatttgaactctttgcctatttaaattattgatatttttggcatgattttttatgcgtgcttgtacagtgtgctgtcatcattagagataagggtttacagactgttgtttctttaatcgtggacgtctttgcttttctgttttgtcatcttttggatgttcagatgcccatcaccgtcaggagcgaatatggattgctgtgtcaactagcaattgttctcgtaagtggacaatacggatcaggatcgtatattcgtatatagcacgcactgcagagaagtcctgtttatgtgagagaaacagcggattaatgccatataaacagtgtcatttcgctgtagctatagtgaactaatgccatgaacagtgaattaatgctgtgatagaggcctcctcgtaaatcttatctctttcctacggacaaatgccagcaagttgcatagttgaagggataggcaagtgcgtatataaacaatatcgccaaagtacatatatgaattaatgtggtacccatctttaatgctggttcgtaacttcctgtagtcccagttatatgaatctaggtttattttagttccgattaaaataactaggattaaattttttagtctcggttggtaagatggagccaggccaggtccggttggtagttttttttctttttttcattgtttttaactttgaatgttaatttcactacatccccaaatcaatcatcacaaaacaaaaggaatcatttccaaatctccaaatcaatcatctccaaatacatcacaaattctaaaaaaacattacaaatacatcacatattcacatctcacacaaatcaaatacatcacatattctcaaaaacaaattcatcacaaatcttttaaaaataaatcctgctccggtccagctgcagttgtacagccgcgtccgcctcccctgcctccggatatagggtaggggagggaagacaaactgcctctccagcccagccgctcctatccacaaacggcgacggcaaccgcttctcccaccgccgaccccgcccgaccgcctgccctcccggatccggcgcgcgcagaccgctgtcgcccgacacgcagaccgccgcggccctctgtcggcctcgctcgctcctgctcctcgctcctcaatctgcagcgaaaggaagaaggagaggataagaagaagagaagagagagattaaagaaaaggataagagagagatcaagaatagaaagatgaggaatttgggaggataagtccaaaggattatatatggtgcatcggtttttagtcctggttggtgttaccaaccaggactaaagatcgccagccccctgatagcctctgacagtaaatgaaccgggattaaagattatccaagggcgataggcgatagagttttaaaccgggacaaaaaaaccatattaagtcctggtttctatttaaaatgggattattgtggtttttggccaacccagtaaagatggtttcttcagttgtgtcatttgtttcgtaatatcttcattatctaaaagttactcatttaaaattttaatacgacccagtaatgatgtcagggttatggataaggtataccctctatcgttggagtcatgtgatatacgggcctgtttggcacagctccagccaaacagtttcagctccaccaaaactaggagtggagttgggtggagctctctcacaaaatatactagagttgtggagctgggtttaggcagctccacaactccactctagacccaacttctagagctaaatttaggagttagagctgtagcaaacagaccctacgaatacaatatatctatgagtatatggaaagagtttgctagattaagaaaatagtgttcatgaaaggggaaataatagagttctactcgaaaaagattaggaaactatattaccgtgcggggtccgttgtctccgagttatatttgcagactaaggcgatttgcagtataaatataggctacctaggaggtacaggtcatcgaatccgaatcctaagtgtaagacacccgccacgacaaaagcaatccggaggatttgaagcctattcgccgatagatctcgtcgagtctctctcgacaaggatcttttcggtaatttcggagtttagttgttctcttttgtactctgtgattttctctataatatcatataaacaggattagggctattatcttacgaggaatctaaaccagtataatccttgtctttttatatgcttaatatcgtatcgtgtagatccttataccaacataccccaataacctcataatatggtccacgggtatcccccgtcgacatatgagtcaacaatatcatctcttaaaaaccaaaatgggtactgaatgatcaaagtttgctatggatgcaaaagggcatgtagcctagtggttacaagagtctcagtagcaccttagatcctggattcgactccccatgggagcaaattttccatgagagaatttttcaggatttcaatcataggagtgagtgtgcgtctgttgtgagtgtctgcgctatactgtgtaaacgttttctttgactgttatctcgatctcaataattgactcatactgtctagtttcttggtatctagtatatgaacggcaataattgtttggcaatgtatagatattcatatgtgtggtctatggagtcgcatgcatgtttcttgatgttgcgtgagacgctagcaaattttctctgttgaacgaatccagatccggtgcagtcatagaagagactgcaggtttagcagttggaaccatttttcatcattggatcaaggcaatcaacggctgaaacaaatgctacggttgttttaaacaataattgctacagcacctgctacaggaacgaactttgtacggtcatttgtgaacagtatcaaggaaagatctagaacgttaatttataatccaatggtgtccttaggactgcataagttgctatagccactgcatgtgatcccaatccttgttgaacgcttgtctgagaaggtcacatatatatgtattgtccgaattcagtgctatcttccactacgcaacttgctgccatttggctataaataccaactttgcacggttggcatatgcatccttcgtagtgcaattcacttatacacggagtttaattagtttattgccttctacaatggataggatcttcgcccgtttcttttgcttcctactggtttgttttccatcagttcttaccatataatagacatatatatatatatatatatatatatatatatagacacacacatatctcatatagcattatattactgtttcaaccaacattttcttttattttcttcttctttcgatataatttatgttacatatgttgagaacagatcatgtcagagggggcaagctagtattgcaagtttcattttcagaaagcaaataatttcaaattcgatcagataaatttattaatagatttaattaaatacaatgacaatcacgcacattctaacttaactgatccattgttcctgtaattatttaaattgcatgttactccaagtttatatgatatttatatgaaattttttatggtgctccaagtttgtttaatttagaccgtctatatattaggatatatgttcaactgaatcaaattaagaggaggctattagtcatacgaactagctaggtaaatttgctgttatgggatctcaatccaagaatttgctgctatggaagagagaatagaggagagggaaacatcgatcttatcttaacattcgcttgagattggctcttaccttctatgaaaagattttttttattgcatgaagttaggaggaaaaaaggaaagaaaagtaataatgtccctaaaaatattttgaagggtttatatttagagtctttactatctttaactgttgctagatgattatctctaaatgacatgtattacctagctaagagaatttatcccactttaacttatggcatatgcgctcaaagtagagtccgatatatattctcttttttaatagtggattattccttttcttttgcaaagattaaagaagtaaaaaaatatacaggtgatcgtacaaaaggtgacaggagaaagaataaatacaaaatttattaggtaagaattaaattagtacaaaagtggtaggcagaggattaaatcatacaaaagtaaatagttaggagataaaggattgtctcgggatcacaaaatggcctgtcaaaaacttatctacaaacgtatatatctacagagatatatatctgctcgtatataaatacaaacgaattttacctattatttgtacctatgatcatcgatctgaataaaaatataaaatattgaaatatacatattcataaataattcgtgtatttaaatgcttatagcaatttgaatagtttgaaatctgaatcatattttttgaccaaacaatctgaaacacattttagttttattctcttatttactagaacttgtaattttaaaacactacagtaatgttttgtaaaatgtgagacatcttgttttgtaaagtataagaattgaataacgcaattttgacatgtacaattatcgtgggaattagtacttttcttgtgttgctatgatttactacatcagttttttaatggatgacgtggttgacttttaaataatatttaactatttttcctattcaaaagaaatttatataaataatacttattttgttgtgacatgttttatcattaaaaaaactttaagtacgacttatgctttagcatatttacgctatttttttaatacgacgagtagtgaaacgtcatgtaaaaaattagcgtgtcatgtattaaaaaaattgaagggagtagtaataaaagtttcaaatatattggttaataaataaataaaaccaaaattaatggttaagatttactgtaagctcttataccaccctagctaggtggagcatcttaattaaaaaggtcttgcataattttgaaagcatcttaattaaaaaggtcttgcataattttgaagttttatgtgtgtagattgcggcagtaagccatgcagctgatctgtcccccgagcaatactggcgatccatcctccctaacaccccaatgccaagctccatctcccaacttcttaactacccttacttgcctgctgttagattacctcgccgtacggatgctggtcagcgcaactacaaatcatcagtttcacatgtggctgaacgatctcaccgtgtagatgatggccaacgcaactacaagttatcagctttacctgccactaatgaactacctcaccgtacggatgctggtcaacgcaactacaagtcatcagtttcacctgtggctgaactacctcaccgtgtagatgatggccaacgcaactacaagttatcagctttacctgccactaatgaactacctcaccgtacggatgctggtcaacgcaactacaagtcatcagtttcacctatggctgaactatctcaccgtgtagatgatggtcaacgcaactacaagttatcagctttacctgccactaatgaactacctcaccatacggatgctggtcaacgcaactacaagtcatcagtttcacctgtggctgaactacctcaccgtgtagatgatggccaacgcaactacaagttatcagctttacctgccactaatgaactacctcaccgtatagatgctggtcaacgcaactacaagtcatcagtttcacctatggctgaactacctcaccgtgcagatgatggtcaacgcaactacaagttatcagtttcacctgctgctgaactacctcaccgtgtagatgatggtcaacgcaattacaagttatcagttttacctgccactgaactagttcactatacagatggtcaacgcaattacaagtcatcagttttggagacgccagaacttctcaaagaccccgacatggcgctcttcttccttgagaagaatcttcaacaaggtaaaaaaattaataacgccctccacttcgccaacttgttggccactacgaactccaagttcctgccacgaggcaaggcggactccatcccgttctcctctaaagaactacccgagatcctggaccggttcggggtgcggccgggctccgacgacgcggctgagatgagtgctacgctgcaggactgcgagctgccggcgaataagggagagaagaaggcctgcgccacgtcgctggagtctatagtcgacttcgtcacatccagctttggggccagtgacgtcgacgccgcctccaccgttgtgctcagtaaggcggtggagtcttcttcgctggcgcaggactacacggtgagcggcgtgaggcgaatggccggaaccggccagctcatcgcttgccatccggagtcgtacccgtacgctgtgttcatgtgccacctcacagaggcgacgacgagggcgtacaaggcctcattggtcggcaaagatggtactgcggtggaggcggtcgccgtgtgccacaccgacacgtcggactggaacccagagcacgctgccttccatgtgctcggcgtcaagcctgggactgtgcctgtctgccacttcatgcagcctgacgctgtcgtctggacccgcaggggctgatgtatgtatgtatgccatatagtacctacttcatcgtactgtactgcgtacgcatgctgccagctgctttgcataccttgctgctggagatatataattaatatccagcacttatatactcgtcacttctatcgtgtgtcgaaggttatatacttgtagcatttggggatgcagtacgtacgtgtgtctgtaataagtttcgtgatatgttgcttcatccatatggaccatatgtaccaccaatcccagtgatatataataatataatatcgttgtctagtactacttgcttatctacctacactagtcagcttgcacatgcaagtcacgtcgatatatattgaattgagtaaattgaaaaatatatatacatccatcttaaatcagtttagttaaagtttctgttataatatatccatacgaggagagaggcaccagtgacagggactgattttcatgctatgtttaggctacattcataatttggattattaagagactataaaaaatgcccgtgcgttgtaatgggcaaaaacatttttgaatcgcatacatcatacactttgttttaggccaaaagctcatttcttcatttcttttcagtttcagtgtagcccgctacctctctgcttagcctgcctcttttttacctagtccacaagtggtcaagtggagctgtagacccgggtatcgctaatacacgacctctactgtatgtacgtatgtatatggtacgtataaactttttatacacgtacacaaagtttatacatacgtatatacaaatatatcttttttatatgtatatttttttaatgtataaaaatatatcatacacaaagtttgtatacgtacacatacaaagtttgtacccatacatatacaaactttgtatatatatgtgtatatacaaaatataccaactttgtatacgtatatatacaaagtcttcttgcatagccgactgccatctttaaactccggccggaagagtgtccgtatgatgctcgaacggatcgaatctttctcgatcttccaaaattggttgaggttgtttgatacacttgatcaactcttttcgtttttatcaaaatgagtaaatccataaaactcggaataaaaacggtcacttttaaatgaagattaaatctggtaaattgtaacatcctgaaaattaactatttttctagtcttgcatcatgcatattcttatgttcttaatatccttctaaacctaggaaaatatgattagagagacctcctaaaactaacttatataaaatttctctttggtatttaatttcttttatgattttcatttaagatttatcttgaggtatttcttgatttggttttaatctaaaaaccttctttcgtctaaaactttctttatttaaatttagtttgaaaacccttcttacctattatgaattatggtccaagaaaccttcctatattgtgctagaacctaaaccaaagcaattccaattttattggaattaattgttaacctatcctttgatcttagacctatccttagttcttgatccaaatatctgaattcctccttttgatctagccgctcatttatttcctgtggcttgatttccttttcagcacaagaataatattattacaaatattgtgaataattgctcttgtgctaagaaaatagattatatccttgtcatccaaatttcttattagcctcaaacaattctttgaaacccatgccatatatttcggggctaaaaatcttgtttatcttcctccatttatttccctcccacattcccaacaatatataggttcaattttaggaatcatagtactcatgcaataatatatatatctctctcccatttgagtgcatcaatagattccaccatattccacttctaagaatattgcactcaaactagaaaatatctcttttagaaattatattcaaatataatttcctttctgtcacgcccagaaatttacgaaccagaatttctaagctggatgtgcattaaacccctgtccaggaccagccagggtacacaaacgacaattgttgacatacagtccacgtcttacaaaaaagtaaaagattacaaatgcagcggaaaagataaaacgagctaaacttggaaacttgacttctgcagcggggcgactccactccacaggcatccttgacggtagcgacgaaaccaacctttttgagacagctccaactgggaagaacttccgctctggtgtggggggaaagagagcaagactgagtactacccactgtactcagcaagtcataccggaagaggaggtatgatgcaggatataaccaaaggaggctaaaggttcatttgcataaagcaggcatttaaaaatagtagttgaaaacaataaaacaattgcagtagattaagcaatattaaccaatcactgtccaacgctacaccacgttgcaacaggcccaaccaaccacctgaactacaccagttcattaagctaaactaggggtgagactaatcacggtgaatctggttgatcgcccataaccgtgggcacggctattcgaatagttttactctggccagaggtgcacaactgtacccacaagacacgattccacacatgtcgccatgccccgaagtaccaccatggcactgcaaagggggaattcgtgacaagacccttcgcataacccgcccctaaccatccacaccacgctaaggtttcaccctcacccctcaaaaagcagtgggcagtcccctcgtgcgccgtggtgaatccggcagctggacaaccggacaccccggctgacccaactccatcacgcccacgctcgccaccggtgcctaggaaagggtcgagctatacttcagatcaagtagttacccactcccgcttgtggtaagcacggtaagtctcccagggtttcccgtgaaccggtccttaattgcaatgggtgcgaccatcaaaaccatgcacccacagcccaccattcagtatattttaatcaaggggcaattgtgttcttacccttgctttacagttcaattgtgattttacccctactttttagggtttgtgattttgcccctgctttttttaaatgaagcagccgcttgcccctactctgttacctcattataatggtgttaaatatgtggtgaatggacaaatatacccctactataattttggcatgaacattggacatgtttcaagttaaattcgtgcgtatttttcatatgggacctaaatgttgataaattttgtacaagttgacagaacacaatatttaggatagttttgacagaattttagcaataattttgacataatttaaaaaagatgacagaacacattatttgggacaatatgtacaccctctccgtcatatgattagaacacattatttgggacaataaactcctccgccgtcgccctgccgatgccgctggcgccgccggtgatgacgacgaccttcccggctagcctacaaacccgcaaatcacattcacatccatccccgattcgcaatcaagaagatgaaatcagcgtccccaaccaatggctcaatgcaactccaagctgaatcgatcaaatcacctctgcgaatcggaggcggtagcgaaggcactgacagaggaagacgaagctgcaggtgtcctcctccccctgaattacaaaagtcttgatccctgcgcgtgcgcccgccgcgctgcgccctcctgcgcgctggcccatggcagttggaccaccgggccgccacgtctccctgccgcgcgctggcccgcggggccgccgcgcctccctgccgcgcccgtcgccgccgccgccgccgcttgtcgctaggttttcgatttggggaaatcgttccagcaagagaagtggttaatggtaagcccttttagtaaaccaagggtagaatggtcattcacaaattataatatcattttctttcttcgctttattgggaaatttcgggcccatcaaactaccgtcaaaaaaaaggggcaaacgggtgcttcatttcaaaaaagtaggggcaaaatcacaaaccctaaaaacaggggtaaaatcacaattgaactgcaaagtaggggcaagaacacaattgcccctttaattaactaacacccttgcggtggcaccaatccgaagctatgctaatagtcaaagtctatgtaataatgtgatccctatttatgtactagttgaactaagcatggctaagtatttcctaaaccaacatctaatcattttgatgcccaagttatcaatggcataaggtaaacaatatatggctgagtagtaggacccatcccacatgacattgtaaaagaatacaaaatttaatagaaatgcgggatatttgtaaattgggtacaatatgattaattgtaatgcatgacttgccttgctctcgcactgatgagaccacagcaacgtcttcgagaaaccgcagatcgacaaaactgccgaaatctacgcgacaaacaaagcacacaagcaaaacatgctataagactactgaaacagaatacaaaaccatttttaatggattctttgcatttttcttgatctactgagacttgaatggacttaagtggagctcggatgaagtgagatataaattttagaagataatatgtgtttttactaataaaaaaatccttattcgatttattgcgcaataatacccagggctgacattatccaaggggcgggggcgccgacaggtgggccccacgggtcaaaggcacaaagggcgccggtccaccgtggaccgggaccacacgggtggtccacccccggtccacgggaccgacggtccagatcagccccgaggccgataggacggtgcggcggcggcgaggcacggcacggctcggcacaaagcctgctggccggccatggcaagcggcggcggtgcatggccgccgacggcggcgaccggcggagcgaggcggcggcagacagcgcgaaaggcggcggcggacggccggagtggcggcacagccaagggcggcggcgcacgcgggaaggggagaaaagggagggggagggagtcctcaccggagggggtggcggcgaccggtgcagaaaacgagggtggcggcgacgaccggcgatgccgaggcgcggacgggcagtggcgacacctagagaaggggaggagaggagttagggatggagaggacgaccgcgacgaccaaagtggccggccggagatggatgaaaatggagagctcaccggtgagcgagggaaacagggcttcgggggtgattggtggcaaccaagcggcggccgaggagcgggcggcacccgcgagcgcgatgacgacgacttcacggtgcggcggcagctctagcggcggtggcgctcgttcggagtgcggtggcagggggcggagctcggtgtgacggcgcgccggcggtagaaagcacgggagggcgcggcgaatgtggaaaacgggagaggaggctcgggggaaggattttatgggcatggaaggggagaacgtggctgggagggtggttgatttggctggccacgtgggggagtggagggagagagagaggggggaggggattcgaaacgaatcccgcccattctcgggcgtgcgcgagggcgggaaacgacgggacatggtcggcaacgtggggaggtgcgtgggtgtgggaaagggcgaggaaagcggcggcatgggcggccacgtgcgcgggcggcggttgccggcttgaggagcggcggctggaggtaagggaaagggctgacaggtgggccctacctgtcagcgcccgagagagagggagaccgggtgaacttcggagggggagggaggagcaggccggcgcgagaagaggtgggccggcggcccaagaaaaaggaaaatagggaaaataaagaggaaaaagaagaaaggattttccccaaggattaaatattgcactttgatgtttttaattggttaaaattatttctaaggctctg

SEQ ID NO: 6043 - DNA, 1654 bp, Oryza sativa
cggatgaattcccagaaattcggacaataacacaccattgtcccctgcaaacttctaagcaaagctctatgacttgacagttcgtgaaactcgtcctaaaatccaaaaccggccggaaattccaaagggggatttgacaggagtgataggcctacatgagcccaaatgcaaaaaggccccacaaataaattcagcctaagcccactaaaattctgtggataaaatcgcatctccgccgtgtgacactgacaccctgacccaccagtggggcccactagccagcggcaacgacctcctcccccctcttcggcttcaccgaccaaaccaacacaatcgcgcggatcaacagactcgagtaggggagagagagagagagagagagagagagagagagagagagagagagaaggcgacgcggcaatcgatctgcccgcctcacctccggccaccgaccaccgccgcctccgcgtccctttgcctcacctcgacgccggctagcatcgccggcgatgggttgctcctcctccgtgccaggttctctctctcacacgtttccatcccccttttttagattagatttcctcgttggctatgtttcggctgcggatattgttggtaccgagtgttaggtaagcaggtgttgccgtgggggttttcaaattgggttcgattcgtggcttgctgctttggaaaatgggagggagggaccagcttttttatgctgaaagctgattggggataaatgttttcggtcacagcgttgatcggggcgaaaattcgcgcaatctggacggttttgaactgtgatttagtgaatttaagtcaatttgtgggttaattggaggttagagcagggtgtctgcacgatctctatgaatgggaggatcgtgtgtggatgtatgtgagtgggggctggggaaagtttgtagctggagtagaagaattagccattttccgccatttgttaacacatagcactgttttgtcatccagctcgaagcactggagggttgaacaatattagcaacgataactccgctactgattcaaaggacttgcgtgctaaggtttactgcacattttgccctttattactacaataatgcctctatatcatgttactagcagctttctttaacgtgtccatccttttgatgttgtagttggtattgcttggtgactctggtgtagggaaaagttgcattgttcttcgctttgttcgtggtcagtttgatcccacttccaaggtgattactgttttgagtctcttagtttcagttgataatgttattcttcaccttagatgcatgattcttactttcagaagttcgattgttttaaacttatttcctcaaataatttcaggtaactgtcggtgcatcatttttatcacaaacattggctttggaggactcaacaatagtgaaatttgaaatatgggataccgctggacaagagaggtacacatacagcactatggttttagcttcttccaatcttgggataatggcatgctgttggtgcattagaagcattggttttgtgagaaagttctagtagtatgtgatactgatttttacaattgatacatcttacgtgacacacatgcatatggtttttctcaatcaagaactcattggtccacccaatttta

SEQ ID NO: 6044 - DNA, 1038 bp, Oryza sativa
ctggcgccgtcctcctgccaccgtggcgcacgcgaaccgacgtggcaggaggaggctggcgccgccccaaggaggagggcgccagcatggctggcgccgccgcctccattcctgtttctctgtatggagttgcaacggtgtcatttttattttattttttcggatgttttttcacactcaggatcacgatacaaccaaccacaaaaaaaatttaaactcgaactaccacttagctaagtttgaaaatatctagcataccacttagtctactttgcaccttcactaaaattagaccataactcctttagtaaaaccctttgatcagcatgttaaacataatgcactctaccactatatgaaattacttaatctaattcaaaatataaccatatgaaatgacatatataagttaaacagtacgtagagatgcaattttttatttttatttcatttttttgatatttttttcacacttaggagaacataggaaccaactgtataaaaaataaactcaaacagacaaaatatgtgacatgtagaattttccaaaactctaccgaaacggacaaaatatgccatctattaaaataggcataactttctcatacggactcggaatcaggcaaataatatatgcacggacatctatagaaaaagttacatccgattctcccccgctttgccgggttcgacgatattaaaacctccaaattccgcttgcaagattgtgttttcgaggaaagaagtttttcggtggagctttggaaaattccacatgccacatatttcgtccgtttgagtttattttttacatggttggttcctgtgagttcctaagtgtgaaaaaaatatcaacaaaataaaataaaaataaaaaagttgcacatctctctcctctgcactagttcggaaagagaggagaggagaggaaaaattatacatgtcacatattacgtccatttaagttcaatttttctatggttggttcttgtgtgtccctaagcgtgaaaaaaatatcaaacaaataaaacaaaaata

SEQ ID NO: 6045 - DNA, 2917 bp, Oryza sativa
ttctgcccatcagcaaggagcccataacggttcatgcggcgaagcagtgcctcaccctcaaagatgcggcgtggattcttctcatcaagtgtgagcagatgccttgcattgttacggatacggctcaaagcatactgaacacgccacagctcacgcttgcacctcagtccatactcacccactagcttcagctctgcatcaagacgctccttctcgtaagggcgacgtggcttcttgaatgtcttaccatctgcaatgaagtaataaatttgttcacaacacatgacagagaaagaaaccactgcagatagcatagttgttcatgaggaaccaaacaataacatagaaagaagccctacagtcccaaattccttatatcctgaccccaaaaatatacaaagcaagaaagaaactgcacacacaacccggaaagacaatgcaacaatacaaataaagaaaactacagtagttgttgagattacgcccaataatagtatggatattcaagacaaatagtagtagggatcttgtgtacagtaaatactaagagcttcagatatacaaccatgtttgacaaggatttaaaaaacaattcataacattgtgtctgattaacccaagaatagcttacatgccagatttagttttgctgtgttatccctggttgcccatatcatacatacctaaattatttgtcctgctgtaaaatggaattcatgacctaaagcgacaatacttgaaagatcttatcagggactatcatataatatatttaagaaaatatacatatagaatgcaattagtatactacaacttacacagaaattttaaaaaaaattaacaaatatagttctcgatggatcactctatggacaaacatacagttagtgcattacaagtatatagtcctctatattaagcgccattattcattttcataaaaaaattcacaagcttatgcataactccattccaccaaaatgagtgatcaaacagagtatttgagaacaaaaaactctagttaatgaatatcatatttccagtccttaaaaccggtaaattatcaaattttgtaccataacagaaataaacattttcgagctacataataccaaatgccagagtaaaacatgtcctcattcctcagtactatacaacacatattagcattctagttagaacccccaaataatctactacatatctcgaaattaaatccggaccacacacaagtttcaactacagaatgcgcagtcagtcgaaatcagcacgaactaatcggcatagatacggatccaacgcagtggaaacgagaaaatgaacaaagctacgggaacagaacgcatcgaggcaaatcttgatccagatcatctcgccaaccgaaccagccatcgcctaatcacctaaccgacactcgctaatcaactaagacacataagcaagagaagagggaaaataaaaggagaacattctctcgctgcgtcaaatcgcactagcaccaaccaagacgacgacgaagaacacaacaggtaaggcccgccgttcttggacgagagagagggagaggaggaggaggaggagctacgcacagttgcggtagaagctgacgtgaaccatcgtcgccggaccgcctatcacgggccgccgccgccgccgccgattgctggagctttggtttctcgaggggaggaggagtgaggaggagagcgcgtttatagtgcggcggcgagaggaaaccctagctttagggctaggttaaatgggccgagatttcccggcccattaacggacgggtgggaattaggcccacatatcgaatgggccttcggtgcaggggccatatttacaccgctcgttaaatggtctttttctcgttcttttttccttatttttataacagaaatgctagtcaccggtatactgtttcgagtcggtcccggacaggacaatttcccacggatcaaacacacaccctcacggatcagatacacacactcgagaaacattgagtcactcccaaacagacacctgcagctcccaaatcgtcacgagcatggctgcggcggcggagtcgccggcggcggagccttcttgcggctcctcctcttcagcggcgccgatgcgcacaaggtcagttgtgccagagagggagagtggcgtgagcgtggtggtggcggctgtggcggcggtgtctgcggcggagccggtggcatctgcggcagagccggtgcgcacgatacccctttctctcattcctcttttttcatcgatttcctgattttgatttaacatctcttcatttttgcattttctagggtttgttgaatcactaatctttggatggggctcatcatatcacatccaaattgaaatcaaagtaagctaatactctctctcttttttctgtgtgtttttgttcattcactgggggtgtttgtagcagaggtgagggatgtgtgtatgtgctgaatcatatgatacttgatatgatatttgcagcaaaatgttcgaattggaatagatcgcttgaaatgcttctagctgtaacaagtattgcttggagcaagcaattttgccgttaacaagtacacactgtcttaaaacagagaaatctccattcaactagtaggattttttttgggtgaactgaagtgtaaacaaaatcagagaaatccgcatcactcggttgctagcttctagttccgggcacgctttgcttgtcaattgttatcctctttgtcataaagggcagtgcgtggtgacaaagttggcagatgcagctgagtcatagatgcagatgatttggattttttttttctgttgatgtttgcatatcttagtggctacatgggtgttttctgttttaaaatgatttgatacttttgttcaatcgaggatgaatcaccattgaaatgat

SEQ ID NO: 6046 - DNA, 7820 bp, Oryza sativa
caaaatgttcgaattggaatagatcgcttgaaatgcttctagctgtaacaagtattgcttggagcaagcaattttgccgttaacaagtacacactgtcttaaaacagagaaatctccattcaactagtaggattttttttgggtgaactgaagtgtaaacaaaatcagagaaatccgcatcactcggttgctagcttctagttccgggcacgctttgcttgtcaattgctatcctctttgtcatagagggcagtgcgtggtgacaaagttggcagatgcagctgagtcatagatgcagatgatttggattttttttttctgttgatgtttgcatatcttagtggctacatgggtgttttctgttttaaaatgatttgatacttttgttcaatcgaggatgaatcaccattgaaatgatattttctttgtcctttcacacatgtgcacagagttgaaatggcattgccacctgctccaagcgaatccgatttcatgcatgtttcaaagaagacaaggtgctctccaaggttgaacaagggctcagcttcacccccactttgacaaatctaacactgctcattcttgtcatctatgcaggactacatgaaagaatatcgtagtaagctatgcaaaaggttactgtaccatcgcttcaacgacttacatccaaaacgtcgtttctaagcttcagaaccaatatgcttattcggttcaagcagtgtcggatgtgtgcttaggccatttttgtagccccctccctccctctcccccaaccaacatatgtaacaagtcaagtttcagaattgtgtatgtagctactatttttgtcttgaactggaaggttgcgaggggcacaacaatcaaagacatgaactctgtatgtggctactgttttcatgtacagatatgttggtaaagaagtggattatattgggtagaccttttctgtggactatatatagtttgagtacgttgtacacaatgaaatcgagttcagtatcatatgaaacctgaggaaatgatactgaggaggatcatgatacctcccagagttcacatgatcctactcaagtatcatatgtgaaaccagtagggaaccactttacaagacatcgatattggataggatcatgtgatacttcacatgtatcaatcataatgaaactcatgtatcacatgatcctacctacccatgtatcatgatagatgattttcctgggtaggatcatgtatgatacttcacaggtatcacaccatcctactaaagtatcatatctgaaacctcacagggatcatgttaccagagatgatacccaagtagaatcatgtgtggtacatgtaaagtatcacaccatcctactaagtatcatctgtgaaacccatagagatcatgttagaggacatgatacctaagtaggatcatgttagaagacatgatacctaagtaggatcatgtgtgatacctcacatgtatcacacttaatgatacttttttgagtaggatcatgtgtgataagtatcacgccattaagtagcatttgtgaaacctattgggatcatgttagaatacatgatacctaagtaggatacatgatacccaagtaggattatgttaaaagacaagatccctaagtaggatcatctgtgatacctcacatgtatcacacttaatgataatatttttagtaggatcatgtgtgatacttgtaaagtatcacaccattaagtaccatctgtgaaacccatagggatcatgttagaagacatgatacctaagtaagatcatgtgtaatatctcacatgtatcaaacttaatgatacttttttgaggagaaccatgtgatgctatagaggtatcacatgatcctacaagataacaagagtaccatgtgatcctacaagagtaccatgtgatcctcaagagtatcacatgatcctaatagagtatcatctttgaaaaccacaagaatcatgtgctacttgtgtgaaaaatttcagcaatcacataagacgccggattgcagaggaaattggctgacgacgtgtgcgccgatggaatcagccgagaaaacaagcatggaggcgcgcgattccgcggatgaatcttcgggatgcggaggagctcgcgccggcgaggaatcacgcacggaggcgcttgattcctaggaggattcatcgggttgtggaggagctcgcgccgacgaggaatcgcgcacggaggtgcgcgattctgaggaggattcgttgggttgcggaggagctcgcgccggcgaggacgcgcgattccgaggctgattcgtcgggatgcggaggagctcacgccggtgaggaatcgcgcttcgtcgggttgcggaggagctcgcgccggcgaggaattgcacacgggcgcgcgattccggaggaggattcgtcgggatgattcaggcggggcggtgagcactggtacgatacgtttctgttcctgtttttgttgacgcgctcgcgcgatactgtgttggtttcagaattatcctgtttttcatcgggataccggtatatagcagccctcttttataaacaacaaaatccgggcattcatcaacagaaggaaacgattccagataatcaaccagagagggttaggatgcaatgctgattgatatggtctcaattctaccaactagacaaggtttacagcttcagggaaaaaaaaagcatcatcatttcatcaccaaccaaacatggcagatttctacattactcatctactggtgtatattggagaaatatgttacatgatgacatgtcataacaattgacataggacaaacttgtgacaaggaggtgagttccattttccttgctttcttgatgaaatggctcctggagactgctacctaatcaaagaggctctctacaccgggctgaatttttcttctttggcccgtaaaagaaatgcaatgatcaagtaagttgacatgatcaagactgcaacgaaaaatatatttgttgagttcaggggttacatgtctagagacctctagttgcagtaactattcatcctcaaagatcatgaggcagcaaagaggctccatgagttgtgtttcggatatgtgctctgataagcagaggttggatagcagtcacacttcaattccttctccggctcaaatgccacactcttgttgctcttttgttcaagttcatctgaatcctttagtgaaccttgttcttctgagcctttcttgcgcttttcagtatcttcgagtctttcggtaccttattttgttcttctgaatccttcgccgccttcatatcttctttcgagttcgatggcttttgactctttcaaaatttttggtggcttcggttgttttgaatcttttgacggctttgattccctggattcctttgatgacttcgaataccgggattcctttcatgactttgaatctttcgatgatttgccagactgtttagattaggcatcacagataacagtgagcaccatgacttcaggatcatagctaattatatacaacatgaaagagcacatagactagtgcatgaagttcaaagtagagcctttttcaattttcacaattgtatagtgcatgaaatggggaaatatgtaactaaattttgactcaggtaccttctttgtcagtttattgagatcttcaggtccattttcttcaataaacttatcaagtgccgtgaggaagtcatcaaatttaccggaaagaccctttttctctgagggatataccaaatatttactatctggttctttataaacacagatatcacataattttggtacacataggctgcaccgctgaaatatggcaagacaggccagcaaataaagatcaatttcatggatggccaaaaaggaagcctgcaaaaatataagatggagagaccaaggaatttaatcagtcaatgtatcatgctaaccaatcataaatttgtgcaagccaaagggagggagagatattagagcaagcatgaactaacagatctttcttccttaccattatgttgtaatcaccatccaaaccaaaatatgcaatgctaaaaatcacaattgcattattaaaaatcctacaaaccttttatcacacagcaatggcatgaattgaaccatataattgcagaacacttgtaaacttgtattgatatctctttacatttttgaaaaagggaggagggtgcacctgacagaggaaaggtgtatgtttccgtactatatctaaacaatgcatgacaagaactaaataatgcttgcagttgcagggtgaccaagtgaactcgtaatttccctgcattagaataggcaacatgtattcccccaaaaatgccaaaatggtcgaagcctgtttgttacttttttgcaactgtttttttcatgtaggcatgttagaacattgtatggtcatagctactactgtttctatgctaatgataagcatctagcgtacctggatttcacgtggtcgtgtagtcctttagtactgagagtgccaatgtggtgcctattttcagatctaaaaaatgtctattcacagctcacaaagaaaatctggcgggagattgaagaactgggtggtgagatcagggttgcagtatagtgcaacggtgagaagaaactcaccgctcacaaaaagctgggacttgggccgtgcagagctagcacggcacggcccagtgtgcttcgtgccaaattgggccgtgtcggcccagcacgccccactcgtcgtgccgtgccgtgccagcacggcctcttcaggacgcggcccaagcacagcccaatggcccgacgggcctattcgtgccgggccggcacaagcacggcccaaaagatgggagcaggccggctgcgctgagaagaaactctggcggcgacgcggcagcggtggcttgcggcttcgtcgtcccgtcgcggcgacgcggcagtgacagccacacccatcctgctcctcctcgtcggctcgtcgcggcgacgtagcccaccggcgcggcggcgtgagtcagccaacaatcttgccaaatgctagtgctggcctgctgggctgctggccttgctggttgctgctacgtgctaccgatgagccgatgaagaaaacgagctgctacttgctgctacctgctggctgcataggaaatttgaccgtggatgggtgatgactgatgacctcgtgctgcagcagccattcgcgtaccgtgccggcccaagcacggcccagtggtcgtgccgtgccgtgccgcccgtcgtgcccgttgtccaggcccaggcacggctcacgtacgggccgtgccggcccagcccatttacgggccgtgtcggaccgtgctttctatcgtaccgggccatcatgccttgggccggcttgataaagcatggcccaagtcccagctctaagcaaggggtaaactttgccccctcccccccaaaaaaaaaaaaaattggccaaaaacacatttcgcccaaaaagcctacttaaagataaaatactcagagagtttcccctaaaatataaaaactcgaatgaagttctcctctttatagaaaagttcttttaggacatgtttttacccaaaggaaacagcgttatgaggaaaagtacattcgagttaatgtcaagtagacagatgtattcgagccaacttcatccacctgacattatttttcctaatagttgtatccgagcaggttcctatggagtgacaaggcgccaagataatgggaaagtatattcgagttctctggtgcggccaagacagctgaaataacaagaaaagaaggaaaagtcttatcgagcagttgactcattcgaggaaaataatcgtggggaccacttcgactactctaaccagctggcaccagatgtcgcctagggaccactagcaaagtactattatacccctagggcctatggatcactaggggtaatacggtaactttatgtaagcccatgatgacaaagatgtaaatatttgtggtcatggtcaaacactataaaaggccgaccagagtcctgtagcaagaacacaatgaaatagagaaaaagtaccttatatacatcctgacatctacttttgggctcactctcagggtaaacgggaatctacactttcccgtttacccccaactctgttcgtgccctaaggtcgtgacagtggcgccgtccgtggggacgtaaagtctccattggagtgggcccaagtggtaaatgcgacgttctcagagaccgaaaactgtgccaattcgttacactgacacttttgcaagtgggacaatagcacttgagaaggaacttgagaaggagtttgaaagagcatttgagcaaagtgatattgcgaacgtaacaaaaacgcttgaagagaagtgggcggaacaagtcaggaaaaggaaactgcgaatccctcaaaggaggaagcggggaaaacaaccacaagtgaagtggaacttgccgaaatggcacaagcacaaggggctgttatgataagcaaagaacaatacgaaggactatagagagagctacaaagactccaggctttgcacagtcaagcaattggagcaagtggatctggtgatcaactggagacataagaggctgatggaaaacaaccaaacttggcagaaaacactcatcaaggagatactttagctggagatcctcaagtcgtgaagttagcagaagagattcctcaagcccaaattatcaaaatacaagttcccacccaacaaatccttcaaatgcaaaaccccacccaacaaatccctcaaatgcaaaaccccacccaaatccaaaatactcaaacataactttccacccaagctcaaatttctcaaaaccgaattcctatccaacatcccaaccaaattcacttttcaactcaaattcatccttctcagattccataccagatataccaaaaccaaacacaaaatcctcaaaaccacacaactcacgctcagatttcccaagcatacacccatataccccagatacaaaacactcaaacacaaataccacaagtacaaatcccacaaatccatatacctcaaatccaaacatctcaagtgaactttccacatacacatgccatacaaaatcaagcaacacaaaactccagtcaacatattcaaaccttttctccttttcttacccaataagatgcgacaaatgaacaagtctacattccacaaatgcccaaccacatgcaatacacaggacaattaccaaaccaaacattcccattccaaacaactcaatcctattttcaaccaatcaaagcggtggacaccaaaagccctctgatccaaaatctgcaaatggcgccttggccattaagttttaagttgtcaaatatcaccaaatacaagggtgatacagatcccaatgaatatttgagggtatatgaaacagcagttgaagcagcagggggagatgataccacaaaagcaaaaatacttcaaaccatgttagaaggagtagcattgtcatggtatacaacaatactaccaatgtcaatatattcttgggaacatatgagagacactttttgagctggatttataggagcctatgaggaacctaaagaagcagatgatttgtatgctatgcggcaaacgcaaggagaaaccatcagaagtttcattttgaaattttcaagagtaagatgtcaaatccgacaagtggatgatgagatgctcatagcggcagccaaaagagctctgttgcctggacctcttaggtttgatttagcgagaaatagaccaaaaactgcaaaagatttgtttgagagaatggaaagttttgcgagaggagaag

SEQ ID NO: 6047 - DNA, 18845 bp, Oryza sativa
catctttaggagtcgaatcaaaaagacagagaaaagcttatgtgagacaaataaatcatgtgggcacaagttatcagtcaattccaccagcttactcaaacacagttatctcgtttggcccggaggatgctgaaggcatacttttcccccatcaagacccgttagtaatatcagtggaaataacacagtgcgaagtgcaaagggtgttggtcgatggaggaagttcggcagatgtacttttctacgatgcatttaagaaaatgcaaattccagaagacagactaactcatgcaggaattcctttacaaggatttggtggtcagcaggtacatgcaatcggaaagatatcattacaagtggtgtttggaggaggagaaaataagagaagagaagaagtcgtgtttgatgtggtagacatgccatatcaatacaacgccattttgggaagatcaacaatcaacatttttgaagcaatcatacaccacaattacatctgtatgaagcttccggggccgaaaggggtcatctccgttcgaggtggtcaattagcagcaagaaaatttgagcttcaaggaactccaaatatgaaaggtgtacatattgttgaacaaaaacaaggagagtacaacaagaaccaaaagccagtaccagaagggaaaacaaagaaagtagtgttggacaaaaatgaacttgaaaaatacatcttgataggagaaaatttggagaaagaagttgaagaagaaatcttaaaagtggtaaaagccaacacggatgttttcgcatggtcaccggaagaacttgaaggagttgagagaagtctaattgaacacaatttagcaatcaagccagaacacaagcctaagaagcagaagttaagaaggatatcgatagataggcagcaagcagcaaaggcagaactagagaaattgttgaaggctaaagtcattcgagaggttatgcacctcgagtggctagcaaacccagttttggtgaaaaaaaagcaaatgggaagtggagaatgtgtattgacttcacagatctaaacaaggcatgtccaaaggacgattttccactcccaagaatagatcagttagtggatgccaccgctggttgtaagctaatgagttttcttgatgcttactctgggtatcaccaggtattcatggtaaaagaagatgaagaaaaaacatcattcataacaccttttggaacatactgctacataagaatgccatttggtctgaaaaatgcgggtgccacatttgcaagattgatatgcaaggttctggcaaatcaacttggccgaaacgtagaagcatatgttgatgacattgtggtgaaaagtaagaaagcttttacacatggaaaagacttacaagaaacgtttgagaacttgaggaagttttcagtgaagttgaatcctgaaaagtgcgtgtttggtgtcagagctggaaagttacttgggtttttagtatccaaaagaggaattgtgcaaaataggaatggagccacccaaaaatacaagagaaatgcaaagattaacagggagaatggcctcgcttagtagatttctttccaaatcagcagaaagaggtttaccctttttcaagacattaagaggggtaaacaactttgaatggaacgaagaatgccaaaaagattttgacgatctcaaagattaccttcataacatgccaactttgtcaagtccacaaaaaggagaacctttgttgctatatgtagctgccacactggtgacagtaagcgcagtcttagtacaagaacagggtaacaagcaaatgccagtttattttatgtccgaagcattgcaaggaccaaaaacaaggtatacagaagtggaaaagatgatatattctattgtgatggcatcaagaaaattgagacattatttcttatctcacgacataacagtaccatcaacttatccaataggagaggtgttgtcgaacaaggaaatagcaggaagaattgccaaatgggctatggaacttttgccttttgacttgaaatacacatcaagaacagcgataaagtcacaagtgttggcaaaatttgtggcagaatggaccccagcagagttagagaaaaagaaagaagaagaaaagccgtccaagctgagataagatcattgtgctccaaaaattccttttcaagctccggagtgatgaggctaggagcaatttcatttccaagctgatgaagagacgagcgatacttaaggtcatcaagacacaacttagaacctcgactgctagtctccccatccgcgcaaaaatcaggcaaacccatcaaccaagtgccatttttcgaacatcgctcgctgaaaccaccaagtatatcttttatcaactcgggagaaggggtcattctgtggcttgatcttcaactatgttttttctggattggaaattcagattaacaacttcaggaacgttctctgtttgaacaggattgacagggttcatgtccacatcaatagcatcaatgcaaataggttcctcaacctctttggcagcagaagtaagaacgttcaagggagcagagaggtaatcagctgcagctgaaagagaattaacgttcgaaacattcccaatctcaactgaacttatctcactgatagcaggtagctcataagacagaatgttttcatcctcatcatcactatccagagcaattcgaacttttttcaagttcgagtcaacaggagaacttgaaggcatctttttacgcttcaaagcaggactcgagttttcttgcacaaaaggagcagtgtgagtatgttcgctcgactcagaggagccgctgtcatcagacgattcatcacttgaatcagactccccatccaagctattctcctcattatcagaagatgaagatgcagcatcttttggattgatattcgagtttttcttctttttcttcttcaaatcaggatgaactcgaaccatcatatcttggccgagggcacttagaatcctgttttgttttctaccttgctgaaccgcaagatatgtgccatgctctttcttggtataagggccaatatatttcttgcttggcccatccacgtccttcacaatttttgctgcaaaaaaaagaaaaaaagagaagaaaaaaagaagaaaaaaatgaattacatatatatatatatatataatgcttgaaataaaaaatacatatacaaggtaaacacttactattcgcagatatctcgaaaggaggaagcaaagaactagaaccctcaggaatttcaccaagagataaagtccagttggcagaaagaggtcgaataccaagataaatgaactcctcgaccaagtctcgaacactaaatttagagacaagttcttcaattcgagggcgaatgtcagcaaagtcttttgacaaagtaacagctggatctgagatgacactcaaagatttacaagaaaacacaaaagggcatttttccatggttttcagatctgctggaatcttatgatagaaccattttgactgccaatgagttccccatttggtccacataacagagacaactggccaaggacaaccgcgatttaagcgtggcataaagttaacacacccaaattgggagttttgccttgtatagcgccgaatggtgtgaaaataagcaaaatcgcatccatgcggagtaccaccgcaactccgaataatccattcaaaaattccaagcttaacaagggtgtttggtgtaagctgagaaaactcaagtccatatagcctaaggacctcaacaagaaatgcactgcaaggaaacctgaagccagcttcaaaaaaatcatcaaacaccaaggtgtagccggcccgaggtgaaggactcaactgtcacgcccataaatttagcccaaatttccagactattttgtgtattaaatccctgtccaggaccagccagggtacacaaaacgacaagtaataaacagttccaaacgtaaataaagcgaaaattacttacagaagaggcacttagtcctcacaccgaaacaaaaacagcagcagcgaaaaaggcaatcctagcggggcttcagctttactccaaaggcaaaactcaactggggtctgagccttggtcttctaatttcatcttcagctcagaagcactacacttctgaaaagggggaataatagcaaggctgagtacaaccaccgtactcagcaagccacaccaacgatgcagatgtgcaaggggaacacaaggactgtttatggctatttgcataaaggcggttgtaaagcattttattgaacaaaacagtaaaacagttgagtaattaaagtaacattaaatctccactgatcaacgctacaccacgttgaacaggcccaaccaacccacctgaactacagtgcattgggtcgatttattaagtgtgagactaatcacggtgaatttggtcaaccgcccataaccacggtcacggctattcgaatagttttactctgatcagaggtgtacaactgtacccacaagacacagccccacgacacgtttccgtgcgccgacatgccaccacgacataccagaaagaggccgtgacaggacccttcgcataaccccctctagccaagcacaccacacctcaggtttcacccccgtccccagcaggcaacgggcagtcccctctcgtgcctaggtgaatccggaagcgacagaggccgtcgcagggcccgccctgctccatcacgcccacccttgcctggatgcgtcaactagaagaaagctacactacaggcctagccgttgcccacgctagcttatggtaagtacgagaaattcttccaggatttcccgcgaaccggtccttaattgccatgggtacgactagcaaaaccatgcacccatagcccaccattcagttacattttagttggataattacgaccactgaaacatggccaggtgtctcgagcatgcaactcgttctgttgctaaaaaggtctaatactgcaattatcccatcaactgagcaagtggtaattaagcatggctaagcatatagttctagctaggtcacataagtaacataagctagtcgatttattatccaatattgacaaaggacagatataaagtaaacatggcacaagcaaacagataggtaaaaccctgatcccatgtaattagcaaaacatgcatgtttatttgcaaacggtaaaaaatttataaattgggatcaacatgctcaaggggaatgtgtgacttgccttgcttcttcacaacaatcttctgaactctgatccttgcgactgcgaacttccgaaacaacagaatctactcgctggcacacaaaacgagaaaaaaaactaataaacaccaagaaaacagtatataaaaagtaaacaaacatgtagagctcaattttagatgaattttgcaagttgaatggctcaattcggagttcgaatgaattagatatgaattttagaagttttgagccattttaatgaatttctataattaataccaatttatcgagcaattattaaatatttttccaaaggaaatgataagcgctgacggcagcaaggggaagggtgccgacaagcgggccccacacgtcagcgagactaggggagggcgcacggtggacacggtccaccgcggcaggggcggcaccgtggaccgagaccacgggtgtggtccacgagcgcgaccctcatcgacaaaaggggaggctggctcgccggccaacccaacaaggcggcggcggcacacgctggacgaccggcgacggcggcacgacgcgggcaaggggacggcggaggagggggaaaaggaggggaaacagagggagagctcaccgagcgccatggcggcgaggggcaacgggcggcggcgatgccttctcgagaagacggcgggggcggcctcgggcaacgaccagtggtgcggaaaggatggccgaggcgcgggacgacctagggagggtggtagagaggttaggatggggacaagtggcccgagacggtgtgaatcgccggccggaggaggaggtgagaggtggagcttaccggcgcgcgaggaggacggagctccggtgggttcccgacgacgagaagcgaacgccggacctcccctcgtcgctgcgaagctgatggaggaaggtgcgacggccggggatgtctcggagtggcggcaagcggcagctggaggtggcaaatggcagtggcgtctcgggttcacggtgggagcagtgcttcgggggtgaaggagggagatggagtggatgccgagctgcgcacgatggctgcggtgctggggaaggcgacggcgcagcgcgaggtggaccagagaggcgatgcggcgcggctggaggcggcaatggtgacggagagagatggtgaacgtggcggcggcgtttcgtaggcggataggggaaaaagagtaggggccggggtagagctcggcacagcgatgccgatgacggtggtggcgcggcgcggcggcccctagggcggcagtagcgggcggctggaggcggtgagtggcggtagtggcttggcctcgcggtgggaaggtggttccggcggtggaggaggaaaatgaagtggatgccgaggtgcggcatagcgcggcgaagccggtgggaccaacggcggcgtgcggccgtggctttagcggcggtggagggcgactggagggtcgccggcgagcggcggcgcgcgggagcgacgcggggagagcgagggaggcgatgggaagctcgggggaggagggaaaacgaacgaggggagcacggggagggtttatataggctcgggagggtgagatggagccggggtgagttggatttgggcggcaatggccgatggatggaggtggcggcgacgtggggaagtggcggccggattttgcgggagaggtgggggaatgaggaggacgtggggcggcagagtcccacggccgggtgcgggcgtgcggagtggaggaggtgggcggattcggcggcaatcgtgggcggcaacggcagccatggcggttggccggaggtaggaggaagagctgacaggtggggtctcgggtcccacctgtcggccagagggagagagaggaggtcggttgggggacgcaaaaaaaacttcgagagggaggcgatctgggccggaggcccgaggggagaagggacggggcggccggccttagagagagggagggcgcccaggccgcggggaggcaaagcagacttgggccgaaaccggcccaagggaaagaaggggaatttaaattggttttctttttattttaattgattaaatgaactttgtattgataatgttacttgggctccgaaaattcgcgggaaatttcagagagtattttagggcacaagaatattacaaaatattcccggccaatgatttttaaggggaaattttaattctcccattattttacttgattaaattgatttaacttatatttaatttctaaaaaatacattatttaataatttttaatcccgatcgaaaatcagggcgttacatcaactcaccagcaggacgaatgactagattgagactagcaatggcaccttttgaaacaagtttattgagccgcttttcagagataatcgatggaccaagaccggaagatgttttcttcgctttctgttttgaggccggttttttggatttccccatggtcgctgagaagactcgaatcagaaactctcgaagcagaaaactcgaaaggcgtgtctatacggaagtgtttgagagaggagagtattcgagacaaacgagacaaagacgggcgcaacaatgggccaggaaagcgacccccgggcgcttatatagctgttttgcgtgtgcgtgttttcgtggggcccacctatcaataattaggcatgaaaaccgaagtggccccatcccctactcgcgtagtatgtccggataagcaccgccgacgacgcacgattttccttcgtgcttatcggtgcccttgtctgagtcgtctcgtccatgaacgtaagcatttgacacgtggtttactagtaaaaaaattaattaaaaattaattacaaaaaattaataaataaaaaataataataaataattaagaaagaagataatacaaaaactcacatgtgctttcgcccaaaacagggggacgacagtttatcccttacatatttctgaccacggtttcggccgaaaacatcccgcccttatccgtgaggggcttgttgtagcaagtggtaaactttgccccccccccaaaaaaaaaggcaaaaacacatttcgcccaaaaagtctacttaaagataaaatactcagagagtttcccctaaaatataaaaactcgaatgaagttctcctctttatagaaaagttcttttaggacatgttttacccaaaggaaacagcgttacgaggaaaagtacattcgagttaatgtcaagtagacagatgtattcgagccaacatcatccacctgacattatttttcctaatagttgtatccgagcaggtttctagggagtgacaaggcgccaagataatgggaaagtatattcgagttttctggtgcggccaagacagctgaaataacaagaaaagaaggaaaagtcttatcgagtagttgactcattcgaggaaaataaccgtggggaccacttcgactactctaaccagctggcaccagatgtcgcctagggaccaccagcaaagtactattatacccctagggcctatggatcactaagagtaatacggtaactttatgtaagcccatgatggcaaagatgtaaatatttgtggtgatggtcgaacactatgaaaggccgaccagagtcctacagcaagaatacaatgaaatagagaaaaagtaccttatatgcatcctgacatctactcttaggctcactctcaagggtaaacaggaatctacactttctcgtttacacccaactctgttggtgccatgaggtcgtgacaatctcggatgcgagtaagccttgtacatctctggaaaggactccgacatggacctgaagtgattccacagttgcttttcactcatctgcttcttgtcccgtgactcaaccctgatgcagttcagaacatggcataggtagaagacctcctcagggctaagttggaaccagtgcttctgtgccgcagcaatttcgacggcgtggccaaaggcagcacggtttaggatcacggcttgttttggctcaactccaagaatggcaccgccacctggacctgacaaaattgccacaggctttgagcttatgaatgaggcattgagctcagcaacaatgactgacatgggattagctgctgctagtgctaagaagtccttgccatctttgcccttcttccatcttggacctgacaaatccatatgctgaacacactcgcagaggatggactaaaattgatgcgtggtcaaatgctgtagtgaatagcaacgacaataaagcaataagtaaacaaagttgtccaaacaaatacctcaacaaatggagattcactacatacatcactaatttatcgaacatgttaatttgtaaagcatagatacataaataatctgccaaaatacccctgatacggccctacctctcatactctctccactctctcctactcttccccgtacataagactttgccttgagcatctgccgagtgtgtgatactagtacgttgtacggtggactttaagctcgccccctcgtgcttggttaacaacatcacaagattgctccatgtgctaattaaagacggttcccgctcaccgctgatttctttcttctcttcttgggttcttgatttctcgtgaacagaatcatagctttccgcaatcgtaatcagccatggcgatcatagtttttgccagcaatcctgacaagaacttctccctgaggaacttgatcaccgggttggtgctctgctggatgaagccgacgacgtaggccgccgtgatcagccggatgccgcgccaccgcctctcctcggcgtacttctccagcgccgccttgacggcctcgtaccccgggtcgtgctcggcgccgtcggcgaggaaggcctcgctgaggcaccgggcgaggacgacgccgtcctcgagcgccgcgcagccgccctggccgagctcgggggtcgtcgggtggaaggcgtcgccggcgacgcagacgttgcccctgctgatgctgccgcggacgagcgcgagcggcgaccggaacctcagcggcgacgacaccacgtcgctcatctcgctccgctcgatcacgtccagcgcctccgccgggatcctcgccgccctcagcttcgccaccacgtagctccgcatcttggccacgctctcctccgcgtcgccgtctgcacaccacacgtgacagattgatcagcgaattaatccgccattgttgctgctcgtcaaggggaagtaactagcaatggtccgcaccatccggggaggggtaccaggtgtagttccagtagacggaggtgtcggaacaggggagcacgccggagcggaagccctggccgatgaactgcaggatctccgggccgaatccgtggccggccgggtactcagcgaggcccctggtggccgagcgccctgagaggatcggctttggcaggccaagccacttcgccaccaccgagttcacgccgtcgcagcctatcagcaccttcagaaaaagcacagtaatgcatcaggccatggctgctcttagtgagaagaagagaggtacaagtgatgatgaacaatcaaggttgcatctagccattgttgatctcacacacctttgctcttatcgttgagccatcggacaaatgtaggagcttgacattgccgtcttcctcaatcgagacgatcttggaagagaacctgatggtgccttccggcagttcgttctccagagtctccagtaggaagttgcgcttcacgcaccgaatctcatgcggtccactgacgaagtaacgacacaacgacgatttcagttttcaggtgtttactcgtataagtatgattttgttacaaaattttaacattcaggtctcagctagcggtagttgcagacactgtaccttttcccttgcatctttagactcaacttcgcggcaggctctcccgtggatgcagagaaggccaacagcctgccaacaagcacgacaagtcacaacttcagtcgatcacaaactctttagtcttaagagttacagattactcctgcaacttcagtaggttaatcgaagggtaaactcaaaagatgggctggaaggagcaagagacagtgtaagcacacaagttcagagctcagacacggagtgggattgtggaaaaagcccaaaacttataaggtctagtacatcagaccaggcactggcagactgacccagcatatggacctaaaatcaggttcatcagtacggcccaggatggcctatcaaacgagctgggctgtaaatttgatttcgcttaaacgagaattattatactcgcgttaggatttgttgtgatttcgtgacggtcaacggactccactgttcgtctgttccactgtctctgtctggctattatctggatctacaactagaagggaagggattggtaaagcaagtggctgctcacctctcgtagagcagatgatgctccctgatcttgtcgccgacaccaagggcgtcgagcgcgcggaaggcgttcgtccatgtcgtgaacgcgaacccggacgcccgcagcgtcgccgacgactccagcaccaggctcctcacccctttcctgcacacgggacgcaccgccggcccagctcgatcatcagctccagatcgatccgcgcgcgcgcgcgcaaacgcggagcagatcaaggcgaaacggtcggcacagaggcttacctgtgtaacccgagcgccgtcgcgagccccgcgaggccggcgccggcgatgacgatgccctcgacgcccgagccctccattgttcgcgaacccccacccgcggttggtgtcgctcgcaagtggaaacagagtgaggatggtcgaaggctgtactgctgctgaaccagttcagggttttctatgatgcgccttcattttgtagcaaaacggtcgaggggtggttggattggacggagaagaccggattccaacgaggcggcgcgtccatccgtcatgccagcggtgaaacaaactggaacatggcggctttcacgaattcttgtatgactagtacacatcgaaatattggtcaattggtccatgttagtcctctcgatcgatttggtaacgttgcgcgcaagtctgattacagaggatccagcattcccgggttcaatgattggcacaaaggaactgtcagggctgtttcgtactagaatcgtagtacgagtacagccacgagggcggcttgtgaataaacccaaaaagaattgttgaggcagcaggtatgctcgcaagcagtgcccattcccctccgggttgacacgggaattttcgatatccgaccaaaaacccaaatgcactcgactttatttttctgcacacaaaaaggagcgtttcacaggtttgggatcattgacacgtgacggaacagtaaaacagacggagcacatacagacaaacatcacaaacagcacgacgatatgattacaggttgcagacttgcagctgggcggcggccaaaacccaaatcacgtcaacaagcaccggaactcgagagcgtgccgcaatcgtagtcgggcatcatgagcagcgtcttggcgagcaccccggacaacagcttgtcacgcaggaagcccacggcggggtggtcgctctgctgcacgaaccccaccgcgtacgacgcaccggtcagctgcgcactcctccaccgccgggcgtccgcgtaccggcgcagcgcggcctcgacgacccggtgactctcctcggcggcgcagtcgccggtacggagcagcagcgcctcgccgaggcacctcgccaggacgacggcgtcctccagcgccgtgcacgcgccctgcgccaggtccggcgtcgtcgggtggagcgcgtcgccggcgacgcacacgttccccttgctgatgctcgcgaacgggagcgacagcggcgatcggaaccgcagcggcgccgcgagcacgtcgttcatctcgctccgctcgaccgcctcgagcacctgtggtggcacgttcgtgctccggagctttgtcagcacgaactgcttcgtcgcggctgaactcttgtcgacatccttatctgtcaaaagacacggcattaatcagtaatacgattcagtgttcatgtcctccttgcagccgatcgagtgttcgacacttggatcttggcagctcaggtgactgaccatctggggaaggagaccacgtgaagaaccagtagacgtcggtgtcgttgcagggcaccatgcctgcacggaatccctggccgaccaactgcagaaacctgggctcgaagccatggccgtccgggtacttggcgcgtccgcgcgtggccgtgtgccccgagtccgacggcttcgcgagccccagccatctcgccaccaccgagttgatcccgtcgcacccgatcagcacctgcatccatcgccaccatctcctcctcagcaaccgatcgatcgacagagacagcacgcacgccatgtgtttttacctttgctctgagagtcgatccgtcagacagatggaggatcttggcgttgccgtcttcctcgatcgagacgatcttggaggagtagcggatggtgcctcttgggagctcttcctccaacgccagtagcagcgcggtgcggctcacgcagcgtgcctcatgggttcccctgcgtcacaggtgttttcaggtgtgcgcatcacacgacaggggggaaggggagtagacagatatatcttctcagttctcaccgtttgccttgcgccctcagatcaatttcttgcactatttctccagtagctgaagacatgacattcaacctaagaacaaacatggagagaaaaaatcaggcttatccgtactgtacaccgtatgatacagacatacagtaacagttacagttagtgtgtgtttagttcacgctaaaattagaaatttggttgaaattgaaacgatgtgacggaaaagttggaagtttgtgtgtatgaaaattttgatgtgatggaaaaattagaagttcgaagaaaacgtttgtaactaaacgaggccttaggagttaggacttctactttaggacctcggtcaccctgctgagtcaacccaaggcctcagggcaagtactatgagccccttatcactaatttcaagaagtcatgtagacttatatgatgatgtggagagaagagaagagagaggggagcagccacctctcatgcaaggggcaacctccacaccaatttcaagaaatgagagaaaaagagataagttgattggttgggtgtagtgtaagtagatgcaatctattgtatgtattacatctaaattaatgtgtagatgatttagacaaaattagatgtgaccactatctctatcataaaacttgccctcacacattcagataatgataaagtggcaggagaaaaaagttagtactactgtactctgacctggaggtcaagatctcagtgactcagagtctcctactgcctctgaatctgttacatacctctggatctgctggtgctggctcctcatcttgtcgcctaccccaagggcatcaagcgcgcggaaggcgttcgtccatgtgatgaacgccaacccggacgtccgcagcgtcggcgacgactccagcaccacgctcctcagtcctttcctgcacgcagtgccgcacttcgatcggctcccatggagttggaacacgtcgctaggcactcagaagcaaaaaaggttgtgtacctgtgcagtccgagggccactgcgagcccggcgaggccggcgccggcgatgacgatctcccggccgtctgcctgttcttgctgcatgcttgcaactggctttgtgcgaatgcaaactgacttggctgcaggaaagagatgagaataaatgctgtgagcaaatcgagtgagcgccaggagtttaaatatgattgctgcgacggcgagggtgagtgagcagcaggccagcagtgaaggcactttgacgtcatcgctgatgatgatgcgccactacggtccggtgagagtggacagacgtcgaacgggacgtgccttctcattgttttacaatatcttggacacattttttgcggcaagatagcagcctccagggaaaaagtaaatgggaatataaaacgttatggcattggttaaagtcaaactatttaagtttaattaagtttaaagataaatatggtaaaattttcaaccaaagataataaattatgaaaatatatttaattattgattcaatgaaactaatctaatattataaatattactatatttgcctataaatttagttaagcttaaaatagtttgactttgaccaaagtcaaaacgtcttataactataggaggagtagtaaccactgccgccacggatgcaccttcatcaaggttttacttgacaaaatgacaatggtctcatccagcacagacccagggtatggtgatcatttttatgtcctcaaacttgctgatagtgaaagttttagagcctcatgggtaagccatatgtttaggctgatcaaccaaagcctttttccaattcaagcaaatcaatttcattggttaacttatttagttgaatggcttaatgagtgatcctatgtggttggtggttgtagccagtggtggatccagaaaaaaatagcagtggggtctgagcaaactagataagttacagtcccccctcccatctacatatggtaaaaaaaatgtagtgggtctttgtggggtctttcatagtctttacgtcagtagtggaggctcgagaccccgccgctctcatgctggatccgcccctggttgtagctacagttgtagcattggcactagagagttcataggattagctaccaccaacgatcctactctcctgttggccccgctatatttggcaaataaacctcatcccaatcatcaagtcgtatgggcttcgggattgagatcacatgcagccatagctaggactgcaagttagtgactccatggtatctcatccattctttttcagatcaaaagtgcaaatcaagtgctacagcccgttactatagcggttgcattgcaccgttacgatgggatttggttcatgtgcaatccctgtgactacaacttaagcagtcatactattgttcctactatggtcaactgagactttttaattcttccatttttgcgctcaacaccttatccctactagtgtcctagaaatatagattcccatccttatccacaaaatttagacctaaacccatacatgttttgaggcagcttttatcacaaaatccaattccatcatttgttcagacacatgggtacaaaatccatttcgtaatcttattaacttgggtacaaaactgagttcccacgttttagagcttgccacagtcatagtccgccattttcagaagccttccggcgagcactccggccaaccacttgtcccgcagaaagctgatgaccgcattgttactctgctgcacgatgccgacgacgtaggctgtcccgacgagctcgacgctcctccaccgccggattctagcgtactcacgtagactcgcctcgatcctctcgctctcggcggcgccgccgccgccgagaagggcgtcgccgaggcatctcgccagcacgacgccgtcctcgagcgccgcgcagccgccctggccaaggtcaggcgtcatcgggtgcagcgcgtcaccggcgacgcacgcgttccccttgctgatgctcgcgagcaggagcgacagcgggggccggaaacgcagcggcgacgcgaccacgtcgtttatgttgctcctctcgacgacctcgagcacctcggttgggatcttggagctcctcagcttggtcagcacgaactgcttcatcttttccgcgctctcctcgacgccattactttctggaacggcaactaaacaccgatcaatcactgatcacctgtcagatcaccattgttgacatagttgacacttgatagtgacgagactgaccgtgttcggaaggagaccaggtgaagaaccagtaggcatcagtctcgttgcaggggatcacgccagcacggaagccatggccgacgaacatcttgaaccttgggtccaatccatggccatcagggtaatgcgcgaggcctctcgtcgccaagcgccccgaggacgacggctttgtgagccccagccattttgccacaacggaattcaccccgtcgcagccgatcagcacctgcacccccgtcattaatttcagtggcatttgctctatgaatgaaacacagtttctagggaattactctgttttttttcctacctttgctctgagaattgcggcgtcggcaaggtgtatgatcttggcgttgccatcctcttcgattgcaacgatcttggaggagtaacggatggtgccttttggtagctcttcctctagtgctcggagcagccagtcccgcctgacgcagcgcagttcattgggtcctctgcatccaagcgaaggatccaaaatttcggtacggttcaatacaagaacgtgtggcccgtggaagcaaaacgacatgcaagtatggcctagagtgtaaggtgaatagtcatcagtagagatcagtgggagagaacatgacatcttaccgtttcccctgcaccgtgagatccgctcttcgtgttatctctcccgtagacgaagagaagacatgcaacctgtgaacaattcagaccaagaatcagtcactattttacattttcaccacacctacaagtgttcctctctttttctacatactcctgaagatgcagatgaagcttcctgatcttgtcgcccaccccaaggttgtcaagcgcttgccacgcgttcgtccacgtcgcgaaggcgaaccccgacgcccggagctccggcgacgactccagcaccgagcacttcacccctttcctgcacgcggagcagatcatcatctcgagttaacctgcggcagccaacacacagagcaatacgcatcaccggctcaccggtggctcctctcacctgtgcagcccgagagccacggcgaggccggcgatcccggcgcccacgacgacgacggcttcctcgccggcttccttttgttgcatgcttgatcgatgctagattctcagtagtcagtactccccctgagtactcttaatcaattgggaggccagtgtttaattaagaccaaacactaactgagtaaagcttctttgctcactgaaatctagtgctgctcgtggccgcatatatagataggctagcaagtgtttgggacctgggagactgggagtgatcggcactggacttactgaagcagatgcgacgaaaaagaagtcaggttggtggattcgaccttgtacacgaacatgcggaaattggattagcgagggcagtcagagtcgtgacggaaatgggaattttgtacggcccaaactgttggctagtgtgtttggatgtggaccatatttccttcctttttttttaatggaataagatcactttgactccctcaactgacctggatttttcacattttggtccttttgaaaaacttatttcataaatagacccctgaaaaaacttatcccagaaatagtcctttttggggcgccagagtggctggcgccgtcgttcaacaggacggcgccagcctggcgccgtccccctgccgacgtggcggggcgatgctgaggtggctaggggg

SEQ ID NO: 6048 - DNA, 124122 bp, Oryza sativa
tccccctagccacttcagcatcgccccgccacgtcggcaggggaacggcgccaggctggcgccgtcctgttgaacgacggcgccagccactctggcgccccaaaaaggactattttttgggataagtttttttaggggtctatttacgaaataagtttttcaaaaggaccaaaatgtgaaaaatccagctcaactgaccaccgaatctaaatcgtatccctcaaccgcaacaccagaaatctcgaccccctgaacttataaaaccggtacaatttgctcccttggtggttttggagggcggtttcactgacgtagcgcacacgtggcagtgtttacctgttctttgttccacgtggcattgacgtgacgcttacgtggcattaaaattaaaaaatatatgcgggcccatttgtcattcacacaaaaaagtttttgtcggactcactgacatatgggtcccacatgtcatcctctcttatcccttcttcctcctctctctctccacctttctctatctctccctctttttcttcgtgcgtggggagcggcgtccggatttgcgccgcctctgccgccaccgcagcagtagggattcgggtttggtggtggcggcgctggagaggcatcggtggtgcgttcgccgcgggggatgatggcggctgggctagggccgcgcctcgccatgcagcagcagtcgacagtcttcgtgccgcctccaccgtcgcagcagggttcggcttcaacgggtccgggaatgaagcggcgctggcgccacgggagatggggatggtggcgaggccgcgtcagccgtgcagtagcagccaactctcgcgccgacgccggcaccgccgttgctgcagcaaaatctggagtggcgacggtgtccccttcgccacgggggatgacgatggtggtggcgccgtcgaaggcgtcgcgcggccaagcaagaggagctcaggagggcatggcggctagagatccagagctccgaatcggccatgacgggcggctagaggacgagttgcggcagcagggcggcaacggcagcctgatgtggtcgcagcagcagagacggtaatggctcggtggaaggcgttgccggagaccactcgtcacttcgtgccgccgcctcgaggccaagacgagcccaccgccaccgcaaaaaacgaaggcgacgcgcaaccttgagttgctcccgcgcccgtcacccgaggtccaccgcccaccgccgccaccaccacctgctcgccgccgctgccaccgagcccccgcctgccgccggctcatgtcaaggggggagagagagagagagagagagagagaaataagggagagaggaggaagaagaagggtagcgagagagaagatgacatgtgggacccacatgtcagtgggtcctataatttttttgtgtgaatgacaaatggccccgcatatatattttttattttagtgccacataagcgccacgtcaatgccacgtggaataaagatcaggtcaacactgccacgtgcgcgccacgtcagcaaaaccgccctcgaaaaccactcaaggagtcaaattgcaccggttttgcaagttcggggtgaagatttatggtattacgattgagagatacgatttagattcggtggtcaattgacggagtcaaagtgatcttattccttttttttattggagtaggccagcacaggcccattcgtagacagcctgggccgaagtttttggggccgataggaggagccgcgggtcccacaagtcagtgtcctgttctcggtagaatacaggagcaccgggagcgtcgcggctgtgaccgcgaaaaggaccgtgagtacgtgtctccatgaaccgtaaatcgctctcgctcggaagaaaacacggaggaaagcggcaccggcaacgcgtccgggacaaagggccggcttcggcacccggcactgcagattttgatctattataagtaggtaagcgggtttatcacttttgcctctatcactagttcgctctcatgaataggacgagaaagagatgatagggaaaaaaaacgagaggagaaaaattaacgtgactgtgagaaggagggggagagatggagaagtatacggcgttgaggagtcggaccaggtccgtccaactgtccaagcgagtgcgaccacgattgagactaccggtcgtgactgaccgtggagtcaggttttctcacctgtattgatgaccttctttcatttttcatgtttttccctcaacactcaaaattttctctaatgagttaagttctactagcttcgtactccctataacaaaaaaaataatggtcaaagtacagctttaaaaatcataaaagttaatacgattcatattttatatttttgacacggaataaatatttttatgtcctattgataaaattgaataaccgtgtcttttatatttaaagcccttaacctttaatttctttctattattttatttgttatacatatcatacaattaataataccccgtatctagaatagtgtaccatgtaccatattcgtgtctgtatccgtatgggagtgtccgtataacatagctaaccctcatttgtgttttgtgccaactgtatcacaaaaatcagttccatcatttgttcatgcaacccacatgtaagtacaaacaacgatgtatttggatcgtgggattggattctaaactcttgatgagatataaattaaattatagctagttaatgtatatctataatcaaatttacttttttcgttgtaacttgtagaagttaaatttgatcttgcatgtttatggatttgtttatcacattttaatctatcatgttgatttttttttattttattttataactatttagatgacatgcaaacaacaagatgatatccctcaagagtttagaatagtttctagtttggaccgtccatattttttatggataattgctcatttggctctgttttgaagcataactaccaatcagactctacttattctaatttgctcatttgacccctttttcaaaatcaaagttaccatctaaccctactttctctatgatgttagggcttcattcaagaaaagggaaaaaaaatccatttactagtcaacctgatcaaaatacccttgatgacattcaaccatatccattcattagctcccaaccctatctctctatgttaggtgaggcagtgacgacgcacacgtagagggatggcacagtggtgccagcgtcgccggtgtggagagggagggagcggtggttgcgcatgaagaaagggagcgacgacgaaagctgcacacgaacggagcagcgataacggcgtgccaagagagggagcggtagcgcacgcctcgacaatgatgatgaggagcgatggcagctgggcccgggcgtcagagctaggactagggcgggaggattcagtaggggatgggtggcgaagctcaggctgaggcgggtggatgcgacggggaaggagtgtggagctcgggctgaggcgggtggatccagcggagaaggggcaacgatggctcgatgatgatgaggaagagcaccaaaggcaaggctcaggcggcagagttcgggctgtagcgatgggtaggcgatcaatccggtggcggctgagtatctagctacagatccggcggcaccgagacgtgcggactgcggatatggtggcggcatcgtggcagtggtggaattcagtgggtgtgggttagttgtcggcaacaacgacgatgacgccatggcaaagaggatggtggttgcattgacacgaaccttcttcctctctcccatccacaagctgtatgtattttgggtggatgttatccaaaattttgttaaattttattcatatttttctcaatctaaattaaatatgtcaaacatctatcaaatttaaagtccattttatcaaactaaagtcaaatttaacaaaaacaatttttgacaaaaatatgccaaatttgatgaaaatctgacaaatctaagtcaaacttatcacaaatcagtgaaacctacgctaagtgcattcattcatttgtatcaggggtcaccgatatggccgaaattatttgaatttttgaacaaaattttatcaaatttgaataaatagtaccaaatgagaaccaaaatttctgaaattttgttatggaattttgaaccctgccctcaaccactgatagcaaaatatttttttattagaagcagaattcataaatcaatagttggtcacttgtactaatgataatacaataatagtgtattacgagtagagagtctagagagtagagaccactgtaaaaggatcccggtacagaaggccaataaccattcacattttagagcttgccacagtcatagtccgccattttcagaagctttctcaccagcgctccggccaaccaattgtcacgcagaaagctgatgaccgcattgctgctctcctgcatgaagccgaccgcgtaggctgtcccgatgagctcggcgctcctccaccgccggatcctcgcgtactcacgcagacccgcctcgatcctctcgctctccgcaccgccgccgccgccgccgaggatggcgtcgccgaggcatctcgccagcacgacgccgtcctccagcgccgcgcagccgccctgccccaggtcgggcgtcatcgggtgcagcgcgtcgccggcgacgcacacgttccccttgctgatgctcgccagcagcagcgagagcggcggccggaaacgcagcggcgcggtgagcacgtccttcgcctcgctcctctcgatgatctcgagcacctcggctgggatctccgcgctattcagcttggtcagaacgaacttcttattcttggcgagagcatcatcatctggagcagcaaccaaacatgcgtgcaccggttaattcctggtcaccaatcgattcaccattcgtgacagtgtgtcaatgacagagactaaccgtgctcagaaggagaccaggtgaagaaccagtagacatcagtatcgttgcaggggatcacgccgagacgaaagccatggccgaagaacatcttgaacttgggatcgaagccgtggccgccagggtaacacgcgaggcctctcgtagccaagcgccccgagtaggacggctttgcgagccccagccattttgccaccacggaattgaccccgtcgcaaccgatcactacctgcatccgcgccattaacaattcaagaattctcagttcgcaatctttgggattcactgtgttttttcttcttctacctttgctcggagaattgcgccgtcggctaggtgtaggatcttggcgtcgccgtcctcttcgatttcaacgatcttggaggagtagcggatggtgccttctggtagctcttcctccagtgctcgcagtagccagtcccgcctgacgcagagcatttcgttgggtcctctgcatctaagccaacaatcatgtaagcgttgtctagaatgaacggtgtatataatcagtagagatcagtccgagcatgccatctcaccgtttcccctgctcattgagagacgttgcatgtgccatctctccggtgaacgaagagaagacatgcaacctgtgatgtgaaaaattaaggtctaagatatggagatggaaatttgcctccagagaatacaacctcctttcttgcatttcacgtaacaatttaatatgatatattaatatgtgatatgtcattgtataaacatgcaggttagaattcgatctctaaaaatatttataaataaataaaaatataacttgtacgtgtaaattcacggtcatatttgtctttttacaatatgtaggagctaaatttaaacatacatatttgtgaaatagaaaataaggaatactcaaagaagtttgagaccatctagcagaacacaacacgagattaatttaaaataaaatataataattttaaattagaaaaatataaatatgtgagttcaagtatcaatacaattttgaaataactgtaatccggaataataagaaatagtgaaaacagatcaatattgaacactatacaagactaactaaaatcggaaaaaaaatgaaaacaaaattagaaatttaaaaaaaagttcaactaggaacacgatttataaataacaaaaatttggagtaaaaaataaataatattgaaaaaacattctatctataacacaacagtgacaatgatgataaaagagaacaacatgcgagccgtaaagaggaagagtggtgacggttaatgggaaattaaaaaacaatatctaactaatgattaggttcagtaggggagaggcgacgggaaggtcgtataagagtagtgttgtgctggttgacgggactattagaaagtaaaaaaagaaacctaataataataatcatgtttaatttctaaaatctcaatgacaagaacatcgggcatgccgtgaaggagtctagtgacggcatttgaggggacttccaaaaaaatatgggcttgttcagattgtagccaaaataaaccttaccaagttttggcaatgtcaaaattttggtaaagtggtaatattgctaaaattttatagcaggatttcttatgtattgatcaaatttggcaacaaactaaatataaccattttttttggcaactttaccgaaaaatggtatggttgaaaatagcatcaatagatagacaaagaagtgaaagtcggtggtgggtgtgacttttaaaacatataaaaataaaaaaacaatgatgataagatttattttaaaaatcttaaaacaacgagattattatttagcaaattttaaataaattagataattttaaatgagtgctagccgtgtgtttacgcagactaccagctagttctaatgatatgtaataattttctcgtcaaagatatatcttcatgcagtgttttaaaccaggtgcgttgtacttactcctgaagatgcagatgacacttcctgatcttgtcgcctaccccaagggcgtcaagcgcttgcaacgcattcctccacgtcgcgatggcgaaccccgacgccctgagctccggcgacgactctagcaccgtgcacttcacccctttcctgcatgcggatcaatcaagcaagcaagcagatgatatcagctcagctcaagttaacatgcagctgccaacacggcgacacatacagaaagccaacacattctcagggggctcagggggtgtttgggagagaggggctaaactctcaaaaacataagtccctctggttttgtgagaggggctaaaatataacaccccctcagtttcccacctgtgcagcccgagagccacggcgagtccggcgattccggctcccacgatgacaacggcatcctctccggctctctttcgttgcaatatagttgatgccattctactagctagtagatggtgcaggctaactgggggtcactgttttataaacaaaccaagttcacataggccgtgtctagatgttttggcaaaaaaaaaaaagtttgacgtatacggacacacatttaaagcattaaacgtaaactaataataaaacaaattacagattccgcatataaactgcgagacgaatctattaagcctaactaatccatcattagtaaatatttactgtaacaccacattgtcaaatcatagcgtaattaagcttaaaatattcgtctcatgatttacatgtaaattgtgcaattggtttttttattcatatttaatgctccatacatgtgtccaaacatttgatgtaaaaaaaattaaaagtttgaaggtaaataaagacagtcgtactagtcagcttctgtaggctagctgtagccacaagcttcttacacctcacgtttttttagccgcacctcacgtttttctagccacaaaagtccttattgatccacgtggctacagcctacgggctgcatcaatcaagttcgtactcctcctagtattccctcgaaaataaaccaaactcttacaacaatataacacattctaggacgattagtttattttagaatagacggactctctctccatcccataaaaaaccaatataatactgaatgtaacatatattagtattacgaatttggacatatctctgtttaaatttgttgtactgaatatgtcacatttaattttagactcggtttttatgggatagaggaagtaggtgcttaggccctcgagtctgtgattaatgggcaaatcatactcactccatccaaaaaaaaggcaaaccgtggattcccgtgctaacgtttgactgtctgtcttatatgaaatttttttataattagtattttcattgttgttagatgataaaatatgattaatactttatgcgtgacttatctttttaatttttttcataattttttcaaataagatgaacggtcaaatattggacacggaaacaagggtttgtctttttttaaggcggagggagtatgccatacctagcttgacaattgatacccctgacactgattgaagcattgtgtggctgctgtactctagaaaattgatattttgccattatcgaaacggttcgctggagtgccacttacaaaagtggtctcgttaaaatgccacctttgaacagggataacatgttgcaatgccatttcatccatttcttcttagtttaatgatttttgtaatattttttcttgctgagatgaccaaaataccttgatcctatctcatgtctcctccatctcttcctactctccgttgcagatggtgggcggcttggtggtgcggctggggatggggacggcggccccccccctggggactgggacggggacgaccccgacgtgggtgtggaaggctgcttggctcggcggcgctgctggggacggcgtacctacgccgcgcgggcgcggctgccgcccatggaccccgcgctcaacaccgacactaactgcatccggggatgcgtctcccaggtctgggtccacgccgcgccgaaggagggcgcgccggacagggtcagcttccaggccgactctgacgcgcagctcaccaagggcctcgccgcgctgttcgtgctcggcctcttcgacgcgccggcgcgggatgtcgccatggtgcccgtcgagttcatcgagttgcttgggatcaggcagagcctctcgccgtctaggaacagcggcctgctcaacatgattagcctcatgaagcacaaggtgctggagatcaccatcggtgaggtaaccactgaggaaattggtcgccaagatgtggtccaagaggttgccgaaccgcctgctgctgtcaccgtccccatgcccagccgagccgccgccgccatccccgtccccagccgcgccggcgccacccaccattggcaatggagaggagtaagagatatatagggagagatgagataggatccaatgctattttggtcactcagcaataaaaaaacattaaaaaatcattaatttgagaagaaatggatgaaatgacattgtaatatgttgctcctgtttgagggtggttttttaacgaaaccacttttgaaagtggcattccagcgaaatccagtttttgaccatggtaaaatatcaattttctcgctgtactcgctgtcccctgctgtaaggtctcaaatgacgcttcctagaatttcccatgttctctccgtctcaacgtgtggaattgaagtactagtataacggaattgagatattacggctgcctcgaaccacaaagcatctaggagtatatgttaagacagagagaacacatgaatatattttagacggagataacgcatgataaagtagaggagagaacacgataaagatatgacaaagatgtcctttatcttcttatttatttgttctcgtaattaatgaactttctgagtctcttttagatgcaggcaatcaggttatattaaagggataacgacgacaggaggtacaattcttcattctctgatgtatgcaaataacctaatcactgtgggtcaggcaaatgatggagaagctactagaatttttcaaactgttcaaacttgttgtgctcaatctgttcaaactcctaactgggggaattttctattttctttagctcaagcactcctaatcaacaaaaacatcaaattctcaatatttttcatgtccctctgatagaaaattccactaaacatcttggtcaccctttgattattaacacaagaactagagcttctgcttataagtttattatttccaaattcaaagctcgtcttacctctcttaaagctaacatgctctctcatgctagccacttgtctttaattaaatatgttttcgcttcaatccctatttactgtatgtccacgattttacattctaagagcttattgaacaagttgacagctattattagcgcggttttggtggacaagagtgcataatgaaggctctaagaaaggtatttcctggcggtcttggaatgatttttgcaaatgcatctcctaatactatttctcagctttgggatgacaggacatgttgggaactgagcaaactcaatcaaatatttgatcagccaatggtacaacatataatgaaagttcagatcgttcctcgggacaatgaagacaaaatttgctggattcataattcttcaggtgaatgtacttcaaagagtgcatacaagcaggtatataatctatcacattcagttttcacaattgttacttctttgcagcttaatattcttttgaaaatctgttccactaagtgcattcctcctaaatttaaaacttttatttggagacttaatagaaaggctcttccaactgttgccaatcttcacttaaaattctgtgacattcctgatatttgctcttgtttcaattcttcagaaaatgaggttcatcttttttttcactgttcttttgctagagtcacttggcatatttcagaaatcacttttgttaatcgcatcactgatttaatgtataatgtctctgatattttagcttacttgcttgtcacaaacaaatctgagaacatcctacaaaaaacttgtgtcatgcttaggtttatttggatagctaggaatgactttttttttttgccgggacggcaagaacaccggccgtagtatattaagaaagaatgaccagtattttaagaataaaaaaaagaccgcaaaaaaaagagttttatttgtatcctcaagattcagaacagtagttacttgacataacacttaggccttagctacattacagacctgcaaaggctcccattccttttggaactcttccaattaaagatgatattgctgctgcctctatcaaattgttgccaggaactagatgttatgtagatgcttcttggaaagataatctgtttgggtttggtatctttattcatgactctctaaatcatcaagctatttttgttcaagcaaaatcagatctttatgtgtcccttattcgggcagaactagcagctttttaagttagctattttcatttgtgttaaacttcacattgcaaatccagtttttctttcagataatcaacagttggtgtttcttctccagcaatcaaattacataaatcaaaatcatcattggagccttttaccgctgcttgcaataaagctgcgttaattttcaggtggtgcttcaatcaatactacatggattccaagagaaatgaacaaaatgattgattacttatctaggaaaaggccagagaatcaagggttgttttgcctatagcaagctgtcaaaaatattaatcatgtttgtaatagcaaatactagttccaccaaacaaatcctgctttttgcctcttgagcagctgaaaatgttgttagagtgcgcagcccggcccaccaaccgtgggccacccaggtcacattgggtctgctccaccacagacccaaccgaagccataactttaggtcctaggattacacaacccaaaagactagtctgatggggtgaggaccgccccaccttttaagtgggactaaacccagcaatctccctcgtcacacatcgggcccaacaatctccccgtcacattaacccatgtgacctcgaagacttgttacctggcctcaggcccaacaatctccctcgtcacattaaccccatgtgaccccgaaaacttgttacccgggctctccaccatgtgacccatggaaattgttccgggttccaaaccggagctagtcttttgggttgtgtaggctcaggacctaaagttgtggctccggttgggcctgtattggagcaggcccaatgtgatctgggtggcacatggtcggtggcccaggctgcgtactctaacaaatgtatcccttgtgcacgtgttgtgcttttaatgtttgatgtaacaagttctaaaagaaagaacatgataaagtacagggagaaggaatgagagataataaattattccttacacttcctccgtcccaaaatataatagattttatatggatgagacatatcttagtactataatttaaacaagtccagattcatagtactagaatgtgtttcctcatttcaaaatcccttatacgttgggacaaagggagtataagaggcactaggttcggcaatagcaaaaaaaagagaaaagttttctgttttttcgtgcgcacttttccaaactactaaataatgcattttttaaaaaatctagatgcgtgacccacacaattgtgtggctagcatctatacaaaattatctatttttaaaataattttacataaagtttattaattagatatctcgttgtcttaagattttgagaaaccaaaccttatctccccgaattaaatttgaaaatgtactattcatttgttttttctctcagaaatattcgggatgcaatttttttacacaaatatactatcgatctcgcagaaccattaagtgaaaaatgacgtgggtgtgacgacacagatagtgtcgtgcggtgacattgcgagaccgagctgtctcgcatatggaaatagcgagaccgacgtccatgtcgaacggctccaatttaatttgtgattaattacccaattaatgactaactaataataattagtgattaattattttaattagcaattaattaataaattgctaatcaggataattaattaatttgaagcggccaacctgttcggtctcgctcgctggtaatgcgagatcgagcggtcttgcaccgtcactgcgtgacacagcgcgatctcgcgccgtccgtgccgtcatgcccatattattttcaaccaacggttatacgagataacggtatatttctatcaaataaattgcataaggaatatttttgagggaaaaaaaaggttaatgaatagtatattttcaaagttagttcttaaccttcctgtgtttctaattttatagtttttaaaaatcgtacctattgctacccttactcctatcgctcccttcgttatttgctcgatctaccattgtttttatttatttttatggaacctttaaaaattaaatcttatagtttttaaggtttattatctcattagtttttatttttataatttttataagtcccgtcaaacaacgatacctttgtatactcctctaatgataatacaataatagtgtattgcgagtagagagtatagagaccactgtaaaaggttcccagtgcataaggccaataaccattcacattttagagcttgccacagtaatagtccgccattttcagaagctttctcaccagcgctctggccaaccaattgtcacgcagaaagctgatgaccgcattgctgctctcctgcatgaagccaaccacgtaggctgtcccgatgagctcggcgctcctccaccgccggatcctcgcgtactcacgcagacccgcctcgatcctctcgctctccgcaccgccgccgccgccgccgaggatggcgtcgccgaggcatctcgccagcacgacgccgtcctccagcgccgcgcagccgccctgccccaggtcgggcgtcatcgggtgcagcgcgtcgccggcgacgcacacgttccccttgcggatgctcgccagcagcagcgagagcggcggccggaaacgcagcggcgcggtgagcacgtgcttcgcgtcgctcctctcgatgacctccatcacctcggctgggatctcggcgctcctcagcttggtcagcacgaactgcttcttcttggctagagcatcgtcatctagagcagcaacgcaccgatcaattgctgatcactaatcgattcactgttcgtgacactgtgtcaatgacagagactaaccgtgctcagaaggagaccaggtgaagaaccagtagacatcagtatcgttgcaggggatcacgccgatgttgattaatttcagctgtggcccaatgcaagccgattctctcggagctgaacgggaggatgaattagtctagcaggagtttgttagagatgcaaataagtcgcaaatcagttaatcgtgaccgagtctagcgctggcagtggcgcgggtgtgtgcatggagttcagagaaaagcggatcgtgggatggcgcgattttgcctcggattcctattttttttgcgttgagtataagtagttctcttagctctttattctttttgtaaggtttacattcagttgaatgagaaaaacccagaaaaaaattgccccatacattctcgcaagaattctttctctgaaacttctcctctgctctgtttgctgctctgttcgttgttgccgctgcagttcttgccgtgccgggcgtgaacagtctgccagcaaggtgtttgatcggagtttttttgctattgccaacaagtggtatcagagcactcaggttgagggctgatctgacaccatggcgttggttccggcgggagcgggagcggatccggcgagggggagctcggggagtgctttctcctacccacaactcacggcaacgaactacaccagctggtgcattcgggttcaggcgatgatggaggaccagggtgtctgggacgccatcgagccggcggccggggtggccgtcgacccaagaagggacaagaaggcgaggtcccatctgttgcagtcccagccggaggacttgctgatgcaggtggcgaagaagagatcggcgaaggaagtgtgggattgcttgaagacaaggttcgtgggcgcggaccgcgttcgcgaagcgcgcttgcagacgttgaagggtgaatttggtgccatggtgatggagccaggggaaactctggatcagtacgcgggccgcatcaccgcgatgagcgtgcgtcactcggcgttgggctcgacgctgggtgattccgcgatggtgaagaagctgttcgacacggtgccggaaaaattcgtcagcctcgtcgcaggtattgagcaattttatgacattgatactatgccatttgaggaggcagtgggtcgactgaaggcctacgaggagcgcatgcggaagaagaaggctgccgccggcggggtcaccaccgacgggcaggtgctcctcactcaagcggagtgggaagctcacttcaagaagaacggcggggaatcctcgccaccacagaagaacaaaccttcaggtgaaggtgctgggcgcggccagggcggtcgcggtcgcggcagaggccgtggcgcaggcggacgcggcgggacgccgcggggcgactcaggtgcaggctctggcggcggtggccgtgacaagagtcacatcaagtgcttcaattgcgaggagtacgggcactactctaaccaatgcccacatccgaagaagaagaagggagaagcacatcttgcacagacggaggacgccgggcctgccctgttgcttgcggtgacggaggatgtgccagagcgcgcgtcgtgcggcttggtcgtacgcgagcagcgcgtgtggcccaagctgctgctggcagacgctggtggacatgctggcgatgtctggttcctggacaacggggccagcaaccacatgaccggcgatcgaagcaaattccgggagctggacgagtcgatcaccggacgggtgaagttcggcgacgcttccacagtgcagatcaaggggaaggggtcgattcttttttcatgcaagaacgatgatcaatggctgctacaggacgtctactacatccccagtctgcaatgtaacatggtgagtttgggccaactaacagagaccgggcatcgcgtggtcatggatgaggatgtactcgaagtgttcgacaaaagtccatggcggctggtgatgaaggtgaggcgcactgtaaatcgtctttaccgaattgagttgaagctggcgcatcccgtgtccctgctgtccagcctcgacgacccggcttggctgtggcatgcgcggctgggacacgtaaattttcaagcaatgaaactgctggtggacaaggagatggcgggggtgttccggcaatcgtccacccgaatcagctgtgccaatcttgcctggtggcgaaacaggccagggcgccgttcccggcggcggcgcacttcagggcggaggagccgctcgagctgctgcacatagatctgtgcggcccgattacaccgaatacgatgtctggtaatcgctatttttttcttatagttgatgattattcccggtggatatgggtgttcgtactcaagacgaaggatcaatcgctcgatgctttcgtaaagttcaagccactggccgagaacacggctgggcggcgcgtgaagacgttgcggtcagaccggggtggtgaattcctgtcaggcgagtttgcacaggtgtgcgaggaggcggggattcaacgtcacctgacagcgccgtactcgccccagcaaaacggggtggtggagaggcgcaaccgcacggtgatggccatggcacgctcactactgaaggggatgcgcgtaccgggcaggttttggggggaggcggtgcgtcacgcggtgcatctccttaaccggctcccgacgaaggcaatgggtgatcgtactccgttcgaggcatggacggggaggaagccacagctgggacatctcaaggtgttcggctgcacggcacacgcgaaaaacacgcagccgcacctcaagaagctggacgacaggagtgcaccgtacgtgtatctcggtgtggaggaagggagcaaggctcatcgtctgttcgatccgcgtcgtgggcgcatacatgtaagtcgtgacgttgtatttgaggaaaatgtaccttgggagtggacatcagctgcaggacaggagccaacggatttcgcgatggaggaggagcctggtgagcagctgccgagcccggcaacagcggccggcgtggtaccgccgtaccaggcaccgtctcctggcaggcgcgccgggaaggaagcagtggtggcggcagaagaagtaccgtcaccggcaagcccggtggcagcatcaccgactctgcctggaacgcccacgcccggttctccatcgacaaactctgccggggtggtgccgtcaccgggcacagatgacaacatcgatacagatgatgggcctaggcggtatagatcgctggcagatgtcctgcgtgaggccccgcgtgtggatttggtggaggacgaatgtgatggagaggcgctcctagctgagtcagaagagccatcaagctatcgagaagctgccggccaacctgcgtgggaagaagcaatgcagagggagatggaggcaatcgagaagaacaaaacgtgggagttggccatgttgccagccgggcaccgagcgattgggctgaaatgggtgtataagctcaagaagaacacggcaggggagataatcaagcacaaggcacggttggttgcaaaaggatatgtgcagaaacaaggggtcgattttgaagaggtgtttgctccggtagcgaggcttgataccgttcgtgttgtgcttgcagtggcggctgatcgccgctggcaggttcatcatcttgatgtcaaatcggcattccttaatggtgaacttgaagaagaggtgtatgttgcacaaccggaagggtttgctagatcaggaaaagagcatcttgtgctcaagctgcataaggcattgtatggactccggcaggcaccgcgagcctggaatatacgcctggacagaagcttgagggagctcggctttgatcggtgtacgcaggagcaggcagtatacacccgaggcagaggaagtgatggcataattgtcggcgtttacgttgatgatctcattgtcaccggagaaaatccctctgaattgaaggttttcaaggaacaaatgatgggggagtttgagatgagtgatctcggtttgctcacatattatctcgggatagaggttgatcaggatgagagtgctaccacattgaaacagactgcatatgccaagaaattactgtctcagtttgggatgatggagtgcaactcagtttcaattccaatcgatccgagatcgcagctgagcaaggatccagaaggtcacccggtggatgcaactgagtatcggcggatcatcggtagtcttcggtatttgcttcacacgaggccggatctgtcatatgctgtcggggtggcaagcaggttcatggagaggccaaccgtgatgcatttcaaggctgtgaagcaaattctcagatacatcaagggaacgatggattatggtctcgtgtatgctgcaggcactggggcactgaagattacagggtatactgacagtgacctcgccggggacttggatgatcggcgcagcactggtggaatggcgttctacatcaatcagagtctggtggcgtggagctcgcaaaagcagaaaactgtggcactatcgtcgtgtgaagccgagttcatggcagccacgacggcggcctgtcaagcgctctggttaagattgttgctagcagaagtggcgggagtggaggagaaagcagtgaagctcttcgtcgacaataggtcagcaattgcattgatgaagaacccggtgtttcatgggagaagtaagcatattgacacccgttatcacttcatacgggagtgtgtggatggcgggcaaattgttgtggagttcgtccggactgaggagcagcgagcggatgcactgacgaaaggattgccggcggcgaagctggtgacggcgagacaccttcttggtgttcgttcactagggtcacggcagaattaagggggagattgttgattaatttcagctgtggcccaatgcaagccgattctctcggagctgaacgggaggatgaattagtctagcaggagtttgttagagatgcaaataagtcgcgaatcagttaatcgtgaccgagtctagcgctggcagtggcgcgggtgtgtgcatggagttcagagaaaagcggatcgtgggatggcgcgattttgcctcggattcctatttttttttgcgttgagtataagtagttctcttagctctttattctttttgtaaggtttacattcagttgaatgagaaaaacccagaaaaaattgccccataaattctcgcaagaattctttctctgaaacttctcctctgctctgtttgctgctctgttcgttgttgccgctgcagttcttgccgtgccgggcgtgaacagtctgccagcaaggtgtttgatcggaatttttttgctattgccaacagccgagacgaaagccatggccgaagaacatcttgaacttgggatcgaagccgtggccgccagggtaacacgcgaggcctctcgtagccaagcgccccgagtaggacggctttgggagccccagccatttcgccaccacggaattcaccccgtcgcagccgatcagcacctgcatgcgtccccgccattaacaattcaagcatcccgggtaatacttttaatctccaagatagatatatataagctgtaacaaaaataacaaatcaaactctcattagtatacatatattcacagttaaatttgttgtttttgttacttccttcgtttcacaatgtaagtcattctagcattttccacattcatattaatgttaatgaatctagacagatatatatgtctagattcattgacatcaatatgaatgtgagaaatgctagaatgacttacattatgaaacggagggagtagaacttataaaagttgaattttaacttgcatttttgtggatatatcatctatcttgtaaattttttttaatttttttcatgatcattcagttgacatgcactaaacgagtggacatccgctcgagtgattagaatccatcttatcccccgttcatataatcttttggattcactgtgaaacacttttagcaacttaggtagatatccatccatttattgcatgtcaactaaatagttataaataataattaaaacaacttgataatattaaaatatatcactctactaacagacaagttcaaaatcaacttttacaagttataacaaaaataacaaatgaaactctacatagtgtacgtatatttcacagtaaaattgctacatcttataaaagttgaatttaaaattaaatatgtttatgaactgatatattacatatcaatctatttatcagtttttctaaaaaaaattataattattttgttgatatgcaataaacgagtagacattcaccgagtgattagaatccatctaccgatgtacggattcactctgttctttttctacctttgctctgagaattgcgccgtcggctaggtgtaggatcttggcgtcgccgtcctcttcgatttcaacgattttggaggagtagcgtattgtgccattgggtagctcttcctcaagtgctcgcagtagccagtcccgcctgacgcagagcatttcgttgggtcctctgcatccaagccaaatcggcgtgtaagcacggcctggagtgtgtagtagagatcagtctgagcatgccatctcaccgtttcccctgcacattgagagacgttgtatgtgacatctctcccgtggacgaagagaagacctgcaacctgtgtgatgtgaacgattcagatcaaaacatagagatggaattttgctctaggaaatgtccacttgtttcttgcatttatatttttttcaaaaaataattaatatacagtatatcactcaaaaagtacaaaattaaattaactactacaatttctcaattaagaattaactactaacaaattaaaatgtacataatattcatatattcacgtacggccgtatattcttttttttttgcaacttgtagagctcgaattagacatacatggtaataaagtatacacatgaatttattttgtttcatctaaaaataaattatgcatgtttgagtgacatgcaaaaacgaaataacaaaggtgtatctcctgcagtgtttaggtctttgttaagtcttgtgcgacttcgtccactcattaaggcgcgcacgttttttaatatttaactctttaaatgcgcacgttttttaatatttaactctttaaatatttgaccaataaactataaattaaattttattcgatgaaaataatattattggattgttatttaaatttactttcatataattataattttattgcgacaaacattataatatatgagaaatttaaagttacaaattagttttaaaaattgcgccaagtttaaccgcactttagtgagtggacgaagaaagtacactagtacttactcctgaagatgaagatgacacttcctgatcttgtcacccaccccaagggcgtcaagcgcttgcaacgcattcctccacgtcgcgatggcgaaccccgacgcccggagctccggcgacgactccagcacccggcacttcacccctttcctgcatgcggattaatcaagcaagcaagcagatgataccatctcagctcaagttaacctgcagctgtgccaacacagagagcagtctatatccagttatccggcaaacgcatcgctcgccgcgccgcgcgctaatagctaagctcccacctgtgcagcccgagagccacggcgagcccggcgattccggctcccacgacgacgacgacgacgtcctcctcgccagcttccttttgttgcaacacggttggtgccatccttgtgtttggatttaagccaatatcatgcagtagtcagcttctttagccacaggccctcttattacttattaggagacacctcacgttttttttcagctttcttagccacaaaattctctattgatcctcgtggctgcaggctgcatcatgaatagcctatctcgcacgtgtttggatcctggagtcctgctgtctgcgagagtgatggcctctagccgtagcttgtgtggctgctgtactccggtgagtgttgacatgtttcccttaccacctataactgcacggttaccgcggggtatggtaaggttatcaatagtagggtttttgagcaaattcaaaaattctaaaaaaatagaaaaaaatcatggatgtagttcttgatttttaatggtagatggtgaagaattttttttttgaaaaagagtaagataaaatcaaatttgagggcaaaaccaataattgtttaggaaatggaaaaaagaaaaaacatgtattggccttaatttttgcattttacatccaagctaggttttcaggtatcctatatattattataattatccttaatttctacacacatttaagtgtttttaaatttttttagcatttttttcataattttatgttttctacaaatatcgcggttaccgctcaaaccacgcagtaaccgcgaaactgctaattttttaatttaaattttttgaagacgaaattcagacagttttcaacggttacagcgcggttatcatgataaccgtcttaccggggtgggggcggtaacctctccccttaattttatgttttcataatttttttcataataaatgataagtgcaaataatcacacgatgaagtagagaagataaatgggagagagaatatgctgtatctcatgtaagaggtaatctataggagcaaccttttccaagagccatgacccactaataggcatatatagcgtgccttgacgactgaaattattgctaatgaaaaaaaattgaaaatattgttcaccatttttttctcgaaaatataacactgttgaatttttcacaagattagatcgtcgtagcaagaacggcatgcaaacacgtaacgagtttgtctacccaccatcagatttggagcacaatgcgcgtggatccagctcctctgaccttggatggaaaaggcagagaataagggcccgtttagttcataattttttttttccaaaaacatcacatcaaatctttggacacatacatgaagcattaaatatagataaaaagaaaaactaattgcatagttatggggaaaatcgcgatatgaatgttttaagcctaattagtccgtgattagccataagtgatacagtaatctacatgtgctaatgacgacttaattagtctcaaaagattcgtctcgcggtttccaggcgagttctgaaattagttttttcattcgtgtctgaaaaccctttccgatatccggtcaaacgtccgatgtgacacccaaaaatttccttttccctaactaaacacaccctaacagtaaaatgtgtctgtgctacatcagaaacagtaatacgtagtgtttcactgtagcaacagcactctagctctctaactttacccatgtaaagtcagaggatccaaatccaatgcgcgtgtgggcgggaagctaagtaagtttattgggccacgatatctcatgtaccttcagcgcgaactcggccgtgtgagaccacaagcatgcatcatgcctgcacgaactcagggcctcattggatggatgtttgggctgaggcttttcagccaaaacccattgaattgcttattgggctgatgagtaccagccacagaaaatcttcatcaagttaaataagccaatcaaaccaatcaatggtttttctttagcttaaaggaaaaaagccaactttggcagtcaaagctatttgcttaccgatgagggcttcgtacagtgagtacaaccccatgaaggtgaggacgacgtcaacttcacgagttcacatttgctttgatcactttgttattaaggccgtgtttagttctatttttttttaaacttccaacttttccatcacatcaaaacttttctacacaaaaactttcaacttttctgtcacatcgtttcaattttaactaaacttttaattttagtgtgaactaaacacagtctaagagagaatggtggtattttaacttgtaagaaagtttcacttatgttcataaaattacaaagtgtgtattgaggttcgtaaacttgttttatcgtattattctagtccaaaacaacttggtttatcgtatcattcttgtccaaaaccttgtttgacctacttagcatgctacgtggataatgacatggcacttttttttttccctttttttctcccctctccctcagggaattttttttatttatacttttttttattaaaatatttacaaaaataatttgttgtttcgaaaatttacaaatctaatcgcctgccgccctttgagagggcgatttttaaaaatcgcccttccacagggcggcaagggacctaaatgtaaattttccagcataacttgttagctctataattttacaatttaaaattatattatataaagtcagatgaaataaaactttatatcaaaattgtagagctcaaggagatctacaactttgtagttaataactttttcatttaagatgttttagatatccaaatattcgttacaaaatataaaacacattttaaaaaatctcagatctacatttcaaacgacattagatggagataaactttatataaagttgtagatcttgatgagatctataactttgtagtttatcacttttccatttaaaatcatttggagtatcgaataagcattattagtttttaagcaattaaaaccggtgggaagggtttgaacacaaataaaaattttgtatttaggtcccttgccgccctttgagagggcgatttttaaatatcgcccttcttaagggcggcataagggcggcatgcaattagatttgtaaattttcgaaacaaaaaattatttttgtaaatattttaataaaaaaatgtataaataaaaaaaattcctccctcaggagtccggaccggtttgctgcccgccgccggcatgtgggccatatttccttttccatggtagtaggccagtacaggcccattcctaggcagtcccggcccgcaaatttatcggcccaatatgaggggtgtcgggtcctacaagtcagtctccttgctcgttctagcgtgttcggtgttcctcgatagaaaagaggactgggggtttagctgcgcgctctctccctcccccaattttctctttcctcatctagggtttccgcgtcgccgcggccgcgagtcgccatggatttcgacgagtacgactacttggagaagacggtggagggctccggggcgccgtccaacggcgccgccgcgcccagatccgaggagaaggagcgaagctctcgccgccggagcggcggcggcggcggcggcgacgaagagcgcgacgatggcgagcgcagatccaagcgctctcgctcggaggagaaccgcgaccgcgacaaggacaaggaccgggaccggcaccgcgaccgcgacaaggaccgggaccggcaccgcagcagccgggagcgtcgcgaccgcgaccgcgaccgagaccgggacgagaaggatagggagaaggagagggacaaggacaaggagaggagaagccgggaccgcgagaaggagaaggagaaggagaaggagagggagagggagagggagaaggatagagagcggaggagccggagccggtccgagcgccgccgcgacgacgaagaacgtgaccgcgaacgctaccgcgagcgagactaccgtgaccgcgatgtcaggtgccgattcatgaccttacccacctgtattggtgccgctgtgttatgaactgagtggtcttaacggacttgccgattgcttgattccaaaaagctgccatccataatctcgttttcaccacgtttgatgcgcttaggcatcgttgtctccaacaaaatcaattttatttttctacacttggtcatgatatattgtaatattcgcggaggattgcatgggatggggatagcaacatagtttgagtgtaatgagtatattattatggggtgcattgggacttttcttcttatttgtacaaatgcagcatcaatttgtaaattgcgtgtaatagttctgctttcatcgtttagcataatttatagcagatgatttgataactcttctatcagagtattcctattgcttcctataattctactgctattaacagttttttgtattatatacctcgacttcttgtaaattcctacaatttgaacattagtatgggtacctgcagattcaatttgctagagccatcttctgtggtcttgatgttgagcctgacctaggatatcaggtgatttttttttaatactactattattagataggagttagtgttctatgttagggttactatgatagggaaattcaagatggatgatacaatttatgcttttgagtggtggtctgagagcaatgatggtgccatccacgcataaagttttgttgcatccagaacatggagctgaactgtacttcttgtgttgcagaaatgctggtgagcggtgttttgggcttcttcactgaagcattgtgtcttattgttaaggggactcagtattcggcccgctgcacaaacaacccttattgctttttacccttttcaggagatgtcaactttgagttgtcagagttaagagttgtgcgaaacctggttagatgatggttcagagcccactcaccgttctaaaccgcatgcatccatgcagaaggggggggggggggagcagctgcatgcatgcatgtgcaacactgggtcaaatggtttagtaaaaccgtttttgttcacccccaatcatggtgatgcatgtctatgccttacaacaaagggctttttacactacattttttgcttatctccaaggcatgtcttgttacgatgtgacttgatagaatgttgatgggccacatattctaatgaaatgtctaactcgattagtcagttatgatctataatgatggctgaactatgctcagtgaacgttgaaagttattcttcctggacccctagatctgacacattcatttcttcaattattattattggataacttgttgggtagttaagcgttgtgatcttaacaaatcttgttatttaggtgagaccgttagaggtagggagagaggattgagtggtgatataaatttatattagtatggatggacactaacatgtagggaatgattgatattgagaaactgaggtagtattctttttatgaggaactccattactgttggagctgatgattaatgtgggcttgtattatatatatatttttctatattttcgtatcaatgcttatgacagttttgcttattgtctgtgcagacgtaggaaagaagaggctggagagcctgaagcagatccagaacgagatcaaaggacagtatttgcctaccaggtgcattttagtgtaacatttgaatttcactttgtgaccaggaaaatgctgaagccttttctatttgaaactaatgtttgtgagcataatcacagttatctctgaaggcggatgaaagagacgtgtacgaattcttttcaagggctgggaaggtgatcctcactttgaatttgcttgtatcctctttagtagtaaaatattttatgattagcagatgaacatttacggcctataattgtggtttggtgggaaaaaaagttcttctgatggttgctgcgcatttgttcagtctcttgtcattgcatcaaatcaataactgtgctgacattgattactttttgtaggtccgggatgttcgcctcatcatggaccgaaactcgcgccgttctaaaggagttgggtgagtttttatagtgaattctgtgcaacatatcagatcgttgttttatttgttacctgttttttttccttgagttgctaaaagaggggttttattttcttagtggcttggaatatctagcagtttgcttataatagccaaatatatctattgtttacacatttgatgggagggaggcagggtgttacttgtgtttcctgttttagaatctccaaaagatctgattagactttggtgttctactgattgttaccttggtcgtttggtgcctcccatggattcataacctgagatctagagagggagggtggggcttgattttaggttttacagtatcggaatgaactcgttagtttgtgctcataatgcttctggttttgtgtccaagtggcaatattgacttactgagaatgagggagatggacccactgttttggggttttagtctgtgttgctaagccatttgtttgtagcaagcaaatagcaaatgcctcctagctttctgtaaagctgctccagttttgtgctcatgtggcaaatattgtgatttaggttgttggattcaatgttaggcatgtttgcacgtgagtgtaggtgtgctgtaaggtccattgttggtgggcaacaagggaaggagatgaactgaatcagaaggtatgaaccagagtggagtagatgtctcacaagaggctgcaaagagatcaaatgtgtgagaattgttttttgggtggggggtgattggtagggtatttcaaatgttaatgaataccgaccatatttgtcaatatttttctggttgctgttatgattacacaagcatttttaaactgtagctacatctacgatttattatgggggaatatattcaccgatttttcatactcggcaggaatgtttataatttggtgtatctactgggataatcagctacttatgactaagatggaatacaagatctttttgggggaagtaagcagcgtggaacatcaaacatagcaattccacattattggatgccatttctgcgcattttcatatgattttggttggaggaatgtgcaattagtttgtgctgggaaaaattaattctaaacctgtttgaaaatgtttgatatgcaagattttatgtgaataactgaatatcttttcaaaagattgaacgaatgcggcctaattctatcggcgacatgatatcctgatatttattatgcttttgcgtttccaggtacatcgaattctatgatgttatgtctgtaccaatggcaatagctctttctggccagctgcttcttggtcaacaggtgatggttaagccatcagaggctgaaaagaatttagttcagtcaaatgcttcttcaagtggagcagcttcaggtggggcaagaaagttgtatgttggaaatcttcactcaaatattactgaagatcaattgagacaggtgatgccgacaaattgttttttagatgagttggctgtgcttttggaagaaaatttcccttggagttcataatggaaaacatattacttttatggggtagaagaattactatggcatccttgttatgcatatatagagtttaatgaattctctttaccaggtcttcgaaccgtttggtcaggtggagcttgtccaattgccactagatccacttactgggttatgtaaaggttttggttttgttcaggcaagtgtttgcttattaagcaattcttttgtttttgtggagagttctgtgtggctgacttctgtttcatcatgtagtttgcacgccttgaagatgcaaaggctgctcagagtttaaatgggcaacttgatatagctggacgtgtgattaaggcaagtgttttcttcagatttactagaatacatgttgttttcaagctatacatctcaaatataagggttctgcctgacactatgctaaactgctgtaaccaggtttctgctgtgacagaccaagcaggagttcaagtcagtggagtaactactggagatttggatgatgatgaaggtggaggtttggtgggtgccatttctggagacacatcgagaactggaaattcacttatcatatttgatatatatatcctcattttcttttaagtacaattacttgggacatagcatgcttttgcttgcacctcgcctcaatctttttagagaagattttactccctccatcccaaattgatcaccatatatgcatatgcaccaaaaccaatgataatttaattcacatcaatcaagacatcatgcacacattctcccacagcgcatgcattgattaaaacaccatgccaattacacccttagcatgcacacattctcccttgctgcattaattgtattccgatgaaatccatgttcatgtggttatatgatgatcaatttgggaaattttgaatttcattatatgatgatcaatttgggaaggagggagtaatgtgcaagaactttaccatatgatggtttagtatacactgagcactctgcatacctagcatatctactatagcaagcctttattgcatggtcatttgttcattcttagttggttaatgtttgaggctgtttttaaatgccacatacttatgcatattgcaacagtatctcaattgtgtctgtgatgactttgctgaatgctgatgtatgcaggcactgaatgctagttcaagagctcttttgatgcagaaattagaccgtagcggcgttaccaccaggtatatatatgtgagcttaatgggttaaactatctttttggtgccctcgtggccatgtcaatctaactacatcagtcatattcaatcttacatataacctttgtcccataaatactccctctgttttttaatagatgacaccgttgacttttggcatgatgtttggccatgttgaaaaaaattatataaaaatgtcatttattttgttgtgacatgttttatcattaaagaaatctttaagtatgacttataggcatatttacactaattataccaaaagtcaacagggtcatctattaaaacagaggtagtataaataggaagaaaaaaaagaccatgatacccctctttaaatgtggtatggacgggaggttggttaggggttagctcgtttgatggcacaagtagtactatagaatcccttatattttgggatggaggtagtagcttgtttaatagtgtgttgctcagtcaaccaggtaatttctgtaatttgttgatggtactgcagagccttaagttcatatttagaatactgggatgtcaaatgtccagaacgtcaattatcttgcttgttagagttgctgtcatttgtatcaaaatcattcgttattgacctttactatattatcgtcaggattcatccaccactacatcaacactgtttccatatgtatatagcttgtcaaggtcattctccaaggacctcttccaattctttggtgtacatcgctattgttaatattttgtttactccatttctaacatcaaatgtcaatcgcattgactactacaaatttcaagagagtgaaccatgattgagaaatgccgagaacatgccacagtaccttattattcttatggtatcatcaagttatcgtgacaagacatgttagccataaccttttaatttttcactgcatttccaattcaaaaaatgtgcgtggcatatattaactacaaatagttggtactggtttgaacacttggccttcctctgaattttttaccttccttttgtctgtctgcagtttgactgctgggatagccggtactggtttgaacacttctgttggattaccacctgcatcagttcttggtgctcctccagtcgctgcatctgtactgcctacagtgcctggtcttggttcagttcctggggtgtctcttccaattactacccaagccattgagacagccccacccagtgaatgcctattgcttaaaaatatgtttgatccatccgtggaggtttgttcttactactgcattctttttttttttgggttcaccaacagtccataccttttttaaaaaaaatctttactggtctgtatcctttctgtttggttgattaaaaactaattgaaacttactttattgcagacggaccctgattttgatttggatatcaaagatgatgtccaagaagaatgctccaagtttggccaagtaaaacacatttttgtggacaagtaagtttgttcaacactaattaccagtcaacaaatctgtaacagcttgcatacggcattattgtaaccatctacagcttcccagtacataagtcccaacacaatctagtaatctagtaaaatatagtattcaatagttaccagcatgtacttgtagagtgttaggggaataattctctattctctgctaacatatccaaaggctctgtttactgtgcttttatctttcaattttcttgtgtactgcaacttcagaaaggtgcagtgtacttttgctcctcgtactgcagtgcaattattgccgtgtgcaaacctgatttaccttgaaaagcctgccaattttacaaggatagcctaaggccatgtacaacgtgtgaccctggcctgtggtctcaaacctccacatcggacgggcgcatccatgtcagtggggaccgtggctctgcaggccgattccgcgcttgcagaggaaccggtcgaagcgccgtgcctgggctcgggagccgcgaagccacagcccaaggccacgcgttggcggagccggagccccgtgcttcgcctcgtccggtcggtcgccgtggtagtcgtcgctgctcaccgccgccaccgctgctccccgccgccgccagatgcgaagaggagcgccgccgatgacaccactgttccccgccgccgccagatgcaaagaggagcgctgctccccgtcgccgcaggatccggcgagcccgcgcccggatccggtgagcccgtgcccggatctggcgaccttgtgcgcagggtggcggcgaaggaagtaggatgcagcggaggagggcgtgtgcgtggcagaggaggaggagaggatggcctgggggaagaacgcggcggttgagaggaggaggcggcgctgcggcggcgcaagagaagaggagcggcgctgtggcggcgcacgagaggagaagtggaggcaacaagaggaggcgttggagaggaagagggtaaggcagagccggttggtaggaggagaaaataaagggaagaggattggagaggctgacagtgggtccatatatagattaggggtatctatttctttttgttgttagaaggactaaaatagttaattttataataacaaatatcatagggactaacacaaataggtaggggctgaaacacaaaatatactctgcagtggtctccattgtagatatcgtggtttttgtgtggccttatcctatgtggcaacctgagaccatagttgcttgtggcttgcattgtacatgccctaattatttggtattgttgcaactattttgcaggaatacttctggctttgtgtaccttcgatttgacagtataacagctgccatgagtgcacagaaagcacttcatgggaggtggtttgcgggaaagatgattacggcaacatttatggtatggaatacaacatttaattgaggtcaatcttccctttctaaattttgggtttgctgattgctcttttgctgtgtcagtctccgcagcagtactcaacgaagttcccgagctagcggacagcaactttcggttgatcgctgaagattcttgctctattgctgtgtaacggtctcctgtaacattatgtcatgcagccttttgtactttatagcatgggttattcaacactaagttcgcatacatcactcgtttttgcttaagacattatctataagctctcgaagtgtacggcgggcaaatattttaactcttggtgtttcaattgatcgtgccgtgatggcaaatattaaagaaatgttgtcgaattttggggcaatcgtaattgcccaggaaaatgatctcattacttgatttatacccctatcatccgtttgaaaagcagaaattcttgttttagaaagcacagttccctcgagatttcctaataagaaggggctatacatggttccattacatgtaaagtaaatcattggatctccttgaaaaaagctggatttgaatttaatgcctttttggccaagttacgcgtatcatccctggatgattcccttgatatgcgaaggagctccttgatccctccggttagaataatgtcacgggcgttatcttctgcgaatatgcgcatgtgataggaacatcagtgatgagggtcaaatactcaaaatgcgtgagcttgattgtacacagggagggatcgaaggtgacggcagctagtcagtttacgtaccattttgagctaaatggcaaaatgcaagctcaatatgtcttcgagttgaagcagaaaacgcggatgaattggccaccatccaattaagaacaccttcttcgatgaggagggatctccctttcctgtgacctattttgggtagaatggcaaaaaagttggattttccctctcaagtttgcatagttatcttcaggagaaaagagctgaggacagtagtgttccatagtgttcaaggtaaaaaaatatgtaacatgtgacaatgcaatccatgttaaggcatatttagcatatatgattgtgtaagcctaccaggatattattaattgattagtggtgtaatatcggttcgtgttcttgtgaacatgtgcgttatatgcatagatctactatagtaattttcaagaagtatgtacgcaatttcagcaggctctagccctgttggcatgttgtatcatatcagtgtatcacacttcagattgtcctctgccgcattttacctcttttcaactacacccagatcgtcataactatccaaataaattcaggactgttctgcagttgatattcatgcaaccatgtggagtttgatattcaaaccataagctcatagaaaacaacaaacaattacagaataatatgaacgaatatatccatcacaaatgagtaatagagaatgtactaaccttgacttattactcgggattcacattttgcaaaattagccattccccgtgctatctgagctatgacttcgttgtgtccagttcggaacattccgagaagtgcttttattccgccatcttgtttcaacataacatgcagcttttctgcaaaaaaaaaaagaaaaggagtacatggtattggtcactcattatcaatcaatgttctacatacacgagctctcttgtttccattccaaaggaatgctagctcgatagttgcatgtcattgctgttcaagaagccacaagtggtgcaccctcacaagtcacaagaggacaattgcccaactaaaattacattattctaaaacaaaataaattaaagaaatgtacttatcagctcttgacaaatatccggtgcaccaattaacaagtttgatccgtaaaatcatgactttatcttgtttacattctgcatcgctatccacctttttatcttcatttcagaactactagcaatcagcgttaaaaaaggccctgataagctgtcctgatgcgccggaggattagtggctactggctagaaggatatgaattcaaactaaacactcaaattgtaaatttagatttttttttttcagcaggtaactgcacagttaccctccggtactggtaaaaaaaattcaaattttggatttgaattttatctagtaaaatctggtaatcggtggaaccaggcctggtaagttagggaatactggtatttggaacgctgctagcaacattgtcaaacaaaaatagttaactcattaaaattgaaattgaaatttgaataaaaatatgacacccactgccgttcaagaaaattgaaattccatattaaaaggaatattttgctataatggatacaataaagacaggttgtaccgtttccacataggttggcaagggcaccagcaaccatccgcagagtttggggatcattagttttcgacgcaatatttgctaataatcgagctcctcctttgttcattattagtccctggtttgatcctgcacttacaaggatctaacttaatactcaagttattgcctgttcattttataaatatcgcaatataaatttgactaataatatagatatagttcaaatatgtaaaaagaatatctcatgctggaaacctattggggaattttccttcagtcaatgactgggccatttggcatgtgcggaagacatttagtgaaagactatagaacacaccggttaacaactacttccatgctgcaatattatcagcagtgagccaactatacaatgaaataatagccccttttgaccaaatgtggaaaataaatctcatgagaggttggaataggcattaccattcattgccaaattagcaatagcaccagctgtgactcgatgaattgtggtattttctgatgtttctagaagtgacagaagagcatccagtcctccttcttcaacgattttttcctgattaacgtctgcaatcccagatggattggtgataacaattaactatggttataacagttgccttctaaaggagaaaacatagcatagacagcagataactgaaacaaatcactggcttcaatattatgaccaagtgcaaattacaattcgtatggaacagttgaatatgttcgtcaacagaatttgaacaatatgccactttcacatttttcacatattataaccaaaagagatccacatatttttagggaaaaaaaatcctcttttcaggaatattttccatgcaaatgtacaaggaaaggcagtgaatgaaaaatattcagagttttacataaagtcccgtaccttcagcagcaagattagctactactttgacagcatggatctgcacctctagttcatcagacttcaacagagccaggacatttggaagaccgactgaatgccagttggaccaaaaataatgtcaagatggctacccacaaaaaacagctacactgatattgtaccacaaataaaagtaccttcttcaaatatctttgatatgttacttctctggctagatagcaactctctggattttcctgacttagacataaaaggcacactacctaatccagatcctgatctaaccataccacataatgctttagactgtcaaaaagagagattgacataagatatgattggaaaatgagcatcagaatgtcaagattataatgcaagtgtggtacctcttcagagcaattatcagccaaagattgtttcaaccttagaatttcatcttcaaggccctgtctatgtctcatctcctgttgcatcttttcttgagtagatttcagctcttcatacaccaactcctagaagaataattaaataaaaaggtacattaaaattgtttcagatttgagaaaacctaaacatctccatatgtttagatgtgctgtcccgtgtttgccataccttctctgatatgagatcagcaattctttcttcgagtgagcttatttgactggcaaattcttcagtggttctggagagctgcttctccaattcacaggctatatttttctgcaaccgggatatcctcatattaaccttttcaaaattcctgaaggatgcaaacaagtcctccaacaaaccttaaattattgcagggacatgcgcaatgacattctgccaaaaggccaatagtgaagaaaaaaaaggaaaaactatagagaacccaaggcatgtctagtctaaaatgtttttccatttcaagtatggagagtagtcctggttgaggaatgaggatattatatccaaacaagatgcaaccacaaacaaaaaatgtatacctgaattatctgactgttatattgtattagactattagttactatgaattatctgactgcattatagctacagttgtaaattctgaaagtatacctgaaaataattctgagcatcactcagttgctgttgtagtacatttaaatggtcgttcatgctagcagaacgtgatctttcatcttcaagttgcttcagcaattctcttattttcttctcatgagatttagttgtatcggcaagaatatttgtgtttgagatgttctcaagctgtttttgctactaacaacaaaacttgtgttagaactgtgaaattattgaaataggacatctcagtgtcagcagaactacatcaaatactaagtacaaaatcaagataaacattacatatgagagaaatatataatatggcaaagaaaatctaccttattctcatccaatgatgtttctaagtgaataatttgctcagataaaatattatttttgcctttctctttctcaaggtccagcatcaatctcttgattgtagattccaattgacgcttttccatcgccatattctgcgaaaataaatcacttgttacattatatctataatgccctgaagcaagttttatgtactgaaagtgatttttcctgaatgctcacaattaataattatatggaaagcacaaacaaaaatacaaccaatttacttgtcagaaattacaatagatatttacttcaattcatgtacccaataggaaggacaaaggtaagtaagaaggttctgtaataaacaaaaggcacccaaactggtagatttttgtggagtgacaaaaatgaatcaaaattaatatacaatgcaaacttcatagtctatgctttttggacaattagtctatgaaagttatacctcaatttgcatgttagaggtcacttttaaatcattcaaggatgcttctgattctttcagttttttctccaactgcattttctcactgtttttaagcttttgctgcctctccatctctgacgtaagatgatcaacttcatgttctaccttcttatataggctttcataatcaacttcctcctttatccttatcgtgttcactattttcattgcctgaaatcacataatgaacgacttaatgtggtgttataacttataacaaaaaaggaacaagaagaaggaaacgatataaaacaactagacaacatgagtttctttctttgagtaaatgcagagttgcaattttaaacaacgagagccattgaattcatttcaagaggaaccagtaacaagtagtttagttcatgcatgaattaagtctctgatgtaatgcaacatgcacagtttgcactgtgtgcaaattaatgctgctcagttcactctagtaatttatccagttagaagcagttgaaatgatgtttccaactccatgaaactaggtgcattatgttggtataagacaggtgcatggcataatttaatggcctgggatggagtagagttcagatattaactaaccatcatatatctagtgggattaactaaaaatatatctagtgggaaaagctctgaataccatttacaagaataggttccatacagtagaggccaattttgcacaaattggaatagggaaagtgagcaaaaattcatcaacgtagacagatcttagtatcttacagatggacctattgtgcagagagagagagagagagagagagagagagagagagagagcaatgaaatattgaccaatctacacttactcgctgcccaaacataattgtgcttgaagtttctgagaaatgccttgaagatggacctattgtcacaatgagtgaagtccttgcagtccctgcatttggagatttgagcaaatcaattacagtgttacacatgtagtgatgtggagaaaaagtaaccatgatgtttgaacaaatgtgataaattcaaacaatctaataggcacctatactttggacaaacacaagaaattcaatcataccaaaaggaaatcatacctccaaatgaatcacgcagtattcttgtaagttttgaatctcttgttggtatatgaggactattttctgctaacgcgttaatgcatttgcctagagatgttaatgacagattgatgaacttggcttcttcaatcatgtgaccttcacttcctgggagacaaaagattaatattacaaacaaacaatacaacatacgaaatgaaaaggtttgtttcaattatatggtaagacctaccagatttatcgatacgttctgatccagcaaggtcgacaatcaagagcttgctcttgagaacaagcggtaaattatcaggaaaaaggttgtcagtaccattaggaagagaggtattacttccatcttctattcttgaactcctctgtatatgaatctgaaaagaatatcaaattcgcatgggcatgtaatttactttggaacttaaaacagaatacccacagcaaggaagaaggagcatacaatgagaatagcatgactacgagatgattctgtgttcatcttagtattagcagcatgacgattcatctcaccaatttggagaagttgaaaaacatgttcaagatctctgatttcaacttttgcagcaccaggcaaagaaacttcaccagtttttggatcctcaacaatcggaatattagtcttctctggagcaagtaaatcttgcacagattctaagtaaagctataaaccaaataaacatgtatacattagtatggaaaaacatactacaacaataagggaccactaatgaatattcaaataattttatataattgagaaaaaaaatatggacatagaagcttaagcattaaatgaaccatggtgcactttggttcaatttgcagtacaccatgaactataacacttcatcccatttgtgcagttttttatgcaatttatctagcacgatagaaaaatgcctttatctttgtcgtccacgtttaacatggcaaactacctggaactatggatggataatattaaagtgagtgaaagtgttcaaacacatattgttatacatgacctatttgatgtcatgtattaaatacaaaaactggtgctatgtcttacataatctgttcaaaaatgattgtgacaatgtggcacgataatcatataagccttagcatataaatatgactgttcctggcttcctgcattaatcgagacagtttgaagaatcctagctaataagaaagttaaaacaattccaccattccatgccaaaaaagaataatgtcgatcaataagaaataatgatacatgtacaaaacaaataacttcagttgttgagaatagaacctggagaaatgatattgccacactatctgtctccaaagacatgacagaaaggatatgttccaatgctctgaccattattccaccttcagaagggtcgtcatttccaagccgaccaactgtgtatgtcttgccagtacctgtttgaccgtaagccatcacggtcccattatatccttctaacacgctctgcgagatttatcagaatagtttctacattctctcaggccaatataacaaaatatcatatgcaaatgggtcataagctagtaacaggctaaagggaaattccaattgtatacacataaaagtttgttcctactagcaatacagaaaagcgttcttaaggcatagttgcaggcctgttgtacactatttggcacctaagagaatcacttcctgataataatcaagttctaccaactgaagttaatgtaactacatagaaaacagacaaacataagcatttgcaatgaaaatatgttgctcatagttagtagtacgttacatgtgtaaataaaagggtgatgacatgtacgacttgcctcgactacaggttttgcaacgacctcatatacacgtttttgtgaagcattttcactgaaaacctcatcaaacctatatgattcacagctccagttgtttttctttagcttcagcttcttacactgcacacaataaaaaacaagcagaataagtaattaagttgttaattacttataatgaggtacaaagcgcagagagtaaaataggatgctcacctcaggctgcaactcaacacaactatcgaagtccgcgccatgagctaagtcctcagaattcttcggccggagccttacagcaactcttactctgcacgaatctgtgaaaaacaccctttatcaattctgaaaacataccatattgacatcaactccataaacgactgtaaagcatattaagctacattcaccgcatcagaatgtgagaaaacagcatcgattacagatatctagcagaatgtactgtgctagaaggctagcagcaccagggaaatggcgtaaattcagagcgaatatataactgatagcgaacatatatgacttgtatacatgtgtgtgcgaacatatatgacttgtattcatgtgtgtgcgatttaatgagtacaatatataactgatagcgaatttccaatgctgaaatgcataaatggtcatctctccagcgacaatgatattcccgtcgccgttgcaagtatccgtaacgtttggagtttcccgataaaccgacgaagagcgaaaaacccgagacgcgcttccacggctcctcgaacagaggaaatgcatcattcaccggacggcctccgacgaaaagcaccaacagcgaaaaacccccaatacaccgatgatgaagtgcaatctccgatgattcacgggtgcgcggagcagcagaggagcgcgtacctgaacccccgtcgttgtcggcggcggcggggcgcgcgcgggagggggacggggagggcctgcgcgacggaggggcgaccgacctggagcgcccggcggggcggggcggcgcgccgtgcctctccacgggccgcaccgacgcccgcccattcgccgccatctccgcccgccccacaaccccacccgcgccgcggatccctctcggctcgtcgccggcggcgcgtgctggatcgggtggaggaggaggacgcggcgagatggagagagagaggcgttgggttggggtttttgagttgaggcgcgcacgacggcgggcgggcgggcggagacggaaacggagtggcttgcaggagaaggaggcggcggctcttttcctaaacgctccacctcctcggtttgaattatttaatgcaggggggtgtgtgctttgcgtttggggttgagagggtgggatggttgatgttgattgaggtgatggatccaacggcggagaatggatgttggagtttgctggatgtctctcacgactgacactactccccgtgacgaccaccagccaagcgatcttttgttgcatttgcttctttttcatactgctgtgcatgtttggctgtttgcccgtgagagagtcataactaatgaacagtaattattactacttcatttctgtaaatgttttctagctgttttatgttaaactaaatgaatgcaggagctttactacgaataaaacaaaatatacgcgagttacacatcttttttatgaggaatgttcacctttagttcgattttatacgtggcagcatattttaaatgagctcttaatattaagaggttcaaggttaatttgtaactttacggatttattgccaccaccattatcctattttaaagaagtgtaaaaattttgttatgtactgttcttttctttaaaataatgttgtttatgtactatctttgttttcttttttttccgagctgtctgttttctaatagaggtatcattgattttgtcacaacactttaatatttgtcttattcggaaataaaattagtgcacatatggaaaaatataagtaatacttaaaggtcctttaatgttaaactaagtcgcatcaaaataaaaaatatttagttaatttttttaataaaataaaatggtcaaacaaaatgttaaaaaaatatcggcatcatccattaaaataacaaaacggaagcaatacttcaataagatatgctctctccatcccataaaaagccaatctagtaacggatgtgacacatccttatattacgaaaataaacatacatctataaacatatatctatttagatttgttgtattacgaatctaaatatacatctataaacatatatctatttagatttattgtaccactataatgtattacattcaattgtttttctttctggatggagggagtatatacttagtaagtggcactgaattatctatggaggatctcagttaaggtaacgaaaacaatgctcacaaaatctgcaatgcgctagtatagcaattcagtatgaaccacgagcaaagatgatacatctgcgaatttctccttcctcgctacaccatatgcatgatacatctgcctgtcgattgtcgaacaaaagatgggcactgtccaggtttacacggaacaaaaatgaacaccacaaaaatggaatctgaactatgcaacacaaacattacagattttcgatgagcctgtatagacaacactagcagctcagcaacccccgtgtatgaatggatttggaaacccaatttatagtctatagacagatcattgtgcccatttctccactgtaggcagcaaaatccttcccacgtacaaatagcgttatttggcttcgagatcgtgctgtaggagcttctacgtcaaaaatcggatacaaatgagcaacaatacacttgatccagtgacctcacactctgcgcagaggttgagaccccagaccccaattcaccaagacagtaattgcaccatttgacactctgatattgactctatgaacttcccgttgaattggcagctgacgcatatatctccaaggagtgctctggtatgtatgtaagacctgtagtagaaagatatcaaacaaaacaagcaggaaacatggaataaattccactatagtctacatacttctttctttttttacaatcaattccaacaggaaataattatatgtcaacatcctaaggaatctaggatattcacattgtgacagattgttaaaaaaaaaagtgttcctccaatgccactaatttgtttttctttctctgtgtttttactatgcttgcaagaaaaagtatacctttctcccttatcgttatttgaagtgtatccagtgtaatgatcccatccgttaatggaagtagctcaagcttgacggtggtgcttgaacgtgcaggaatacacctaccacaatggtgacaacaaatgttattctttagtgtatagaaatactccctacgtcccaaaataaactaaccccatacgggatgtgacatcctagtacaatgaatctggacatatcgtactaggatgtggcacatccagtacgagattggtttattttgggacggagggaatacaaggtacatgggatgtgtcactcaaagaaagaaaagcaggtgaggatcaataccctaaaggaaccgcactctgcaaccacagatgagtacagcctccagaagtgctaattctatttcctccattgtcactttcttttggtgagccagcaaggactgaattcattcttcgaaaaccagctcgatgtttacccaagccagatcttctcacagactcattaagattgtcatacgaactatttggtgtggttggagctgagttcaaggatacaactgaagaagaaccagacgcttctggagcaagaaccgttacggtaaggttttctgatgtcatattagtagcctcaagggttaagacctggaaggtaacagtggattgcactatcaaaatgaaacatggataatctgcataatatacctaaaaaagcataggaattacctgcactgggagttgaggaactcgagcactcgaaataggatttcgcaaagacagttctgatgatacagagatcataaggtcactagcaacacagggtcgccagctggtggcctgcttgaagaaaagttttgattctacacaggaaagaaggctggaagtcagaaataacaattcaacgcttcttccaagtcacttacccccatctgttaagtagtttacctgtgtaattgcagcgatatgatacaagtacagcatactgatccataagagagccaatggtctcgccaaccttagccaaagaaacatttgtggcagttccattcatcttagggagtgacaaagtcagaggtgcatcattgttggtcctccggtccctaaacgacatagttgctggcttgagaataaaagagtgctcctcgcctctcctggaaaggaaaaggtaacatttaagaaagatggaatattctagaatctgacataaacttcaatgtttagagtaagaaatactcaacatacaaccatgtttactactactagcatatacttgaatctggtgaaagtaaaagggaaatgtggaattaatccagtcctgctttgactaacccagtactctagggctctaggccatacaagaccaacttgtttgaggccaaactcaaactcctggatttgatggaccccgagggggaattgaaccaatcaatttctttgcataaagctgaaatggtggatagagagtgaaatcaatgagaaattgcatatacctgagtgcaagatttggtaagctatgcccgtgcccaacctcaatactggcaattgggagtgacaaaggagcacctcctttggatgcctcctcaaagacaattgtaattgcatctaccaatacaactatatctttcacatgctgtggagaaatattctgaaatttgaagatagaagcattaggtttgaaagcttctctaagtaggagatattaatggttagggatgttcgcgtaaccttgattagaacacacagaagattttccgaagtacattttgcggcaaaagagtgaacctcaattggttgaatgatctcaacttttctccgccatcttttccctggtagatatacaccttctagaccacaacgtacggaataccgttcaggctccaatggaactcctctaaaggaaagttgtccatcatttataatatcaggtgttttcgcaggcttttcaggcacaaattcttgactttcagaaattggtggtggcctaatgttgggtggttgagtggaggaggctgaaggcatggaatagcttctgaagtgacttaatgaaaaaatttgagaaccagaagcagaataagattgcttgtgtgatgcactaggattgagagtaggaggtgataaggatcgcggaggaagtgtgcgatccaaagggagcagccagcttagcagctcctgacatggatcctcatcaccactagaaagtccattgaccagattcttggttatataattgcttgatgaagatttctcaaattgaagaacttctagcactggagcttccattttgttaacaccaacattcacttgcaaaacaacctgcatccttccaacaaagaacatgagtgattaatcagcatatgtataacatctaaaattaatcaacagatacacgtgtgcttcctttctttctgaaaaaggggatttcaccgaaggtaattctatatgacttctaaagatctcagaacattgctcaatgccgtgatttataaagttgcagaaaatgaagagagtactaaaaggcatgggcatgaggtattagccagttatgtcaatctgctaagattgacgcaaataggtagcacatgagaacagtctaccatgtttatgcctggtgaagttattatgattaaagcatccaacttgcaattatttatgcagtgctcataagtaaacttccaatgtgcatacattatacaaaagttctagttatagtatcacccagtaactaaacagaaggatcattcataccacgatgtctccattttgcagagcatagcaccttgctgtaccacgagcgattcctccagatgtgctaccatcaaaaactcctttatcagaaatggtattataagcattactccttgaacccttattgttttcctggttgtctgaatatgattgctcttttggcacctttgatacagctagttttttattggaccagagaggttcatctgactctgcaattcggacaaaaaaattggacattttgaatctttgaagcatactttcaatttgttgcttgtgatcttccaatcgaaggagagattcggtctccaaaatatcttgttttgaaggagagatttcgttgttgagttcaacattttgcatgtcatcttgttttgaaggagacatttcgttgtcgagctcaacattttgcatgtcatcttgtgtcataggagacatttcgctgttgagttcaacactttgcatgtcatcctcaacaacctgggaaccattctctccattctttacattactatcaccattttctgtggcatgactagatttatttgtggagtattgcaaagaatttccattcttagacatcacggcagcaattctaaagggagatatgacctgtgtttcttgcttcgaagcggacatgcacgccaatatatgaacctgctcacctgataactgaactagttcagattctagaaaacaggcagaatcatgatgcacttgtgccagaccccctagactaagtcataggaaaaatgcatttaccaggaaaaaggaaggggcggtccaaaggctgtaactgcaacatgtctgaaaggtcattccagttatcaggaagctcctctgtggaagtaaattgaagatgttactgaccgtagatgtaagaggattaattgttacaagcttatggcacttctaaaagcatgacctatgttccatggcacttcaaaaggaaaattttcagaaaaatatggatttccttagaacatttagcagatcttgtagagatattcctaacaaatggattcttattaaccagtaatgactttaaatgaaaataaagacgggcaagtcaaagggcacatactgttcggaattgtgatccatccttcgtcatccaaaacatcggtatgctttccagtaggaactgaattttttgaatctgcatctgcagagtccccaccgatatctacatctccattatcagtatcttcatcttcaggggaggggtgatatggatcatcggcaataaggccctccagagttgtaactggcttttgtaggctatccctttgctgatcttgctctggaatccgcggaagctcgggtgcaacaggctgcgaagtccggtagaggaaattcatctctacccgtcctgccaagcaaagcaagagggtgaaaaaggagataatgatacgcagatgattaaacaaacaaaatcacaccaccgggagctccagttcgacagagagaaacaggatcaacgagaggaaacagagattcatcgatccggcagctcattgaagacaaaaacaacgggacatcagatcaggcaaccacccgcggcaaagcgagccattcgaggcagcaattagccatggcggcgcctgatctagcggctacacggcacagggggcgccgcatttccgccgatgcgggagcctgcctagcaatcttagcaaccactgacgactctcactgaagaagtaggagaagaggaaggcttagatcacacttacagcgggggcttcctatgggcatcaaacgatacacgcacagctgggctcggagaaccgcgccccgccggcgcggggagggagagagaagaagcgagcgagcgagcgcggcggcggcggcggcggcggcggcgacggggagcgatcgcgtgagggggagcggctgcgtcgtgcgcaagagaggagagaggggagcggggcggcggcctggcgctccgggggacggacggatctgagccggagaagatggtccatggcgatgcgtgggtcggattaaactaatcttcctcgttgccaacaactaacccaaggcccagctgaggcccatgcgagcccaactatctcacgtttcttttgtaagtttttggaatatcaatttttttttactaaatttcagcaaaccccatgtttttggttgaagttgtataaaaccccagttattgcacataacctcgtaattcttaagtttcacaaaacaccacacatatacatatttggcaaatatttacttaaaattttaaaacatagaatatatacaaaacttttagtcgttgatttcttgattaaggttatcagtttaactcttcgctactttaagaaatattgtttctgatatcctgaaatcaattgaaatttgtatcagagtgaggttttatgaaacatttaggccataaaacatgtgattatatgtcgcaagtcatcacacgtgtgattgtctacaactttgatcataaaaacgtgaggtgttatgaaatttactccattttttagcaactttcaaatacccacttatacaatgtctttttttgggtagcattgctaccattggcaaaatgttcaagaataaaaaggaacatgcttttgtcaatcacaataatattccagctgtagcagaaccataacatggttaattcctgctcaaaatacagattacgagagaatttggttcgtatacctcctggattgctacttgttgataagtgttgaatcgtgtagcaaaatggttcgtatacctcctgtacctcacgtaagagcatctatattgataaagtgtagcctctatcactaaccctcaacctgacaatatcccatctccaccaccatatatattgataaagtgtagcctctatcactaaccctcaacctgacaatatcccatctccaccaccaaacactgctgccttgttgggcactggaaaatgttcttccaagcagcttgtgtgttcttcaagccaaaagtatgtctttgtctatcttcaccatccgcaccaacttaacgtacaggcattggtgtggagtagctttcaccttgacgtgagaaggagcaattgctattcttcgatggagttgtgcggatccacattaccgtcgaaattagcacccgtggacccaggttttcactctacttcttgccttccagtgacttgagatcagtttgtttaagttcaacaaacttcccaattctgaacatgtaacatccaacaagggttaatattcagtgttatttttcctcccagtctgtaagaataaatggaaaacaaaaaggtccaggataccaaattaatttatcattttgtgcatggaatcatgcctctaaaatgatggcataccagttatctttgaatcagccaactatactggacaggtcttagcatgcctgctggcagatgctatcaagtatacagcaccatgttacctcacaatatttgacaggtcttatgatatagttattgttcatatcatttacagcaagaaagtgccatgctctttcttgcgatgtttcatagacatgatctttttcttacagtatatagtgttcagtgttcatatcttttacatgaaaagaacatgtcatgtcgagtaggtgctaagatgctaaaaagacagtgtaaatgtataatggtccatttcaaacatatacagatgtggtaaactgcattacctgagatctggtggaagcctgaacctgcctatccgaacacgtttcaaggcataaacctatcaagaacaaggataaaatatcagctacttcccagaggggggaaaacattccaaggtatacaattccagcaaaaaacgcacttactggtacacaaggatatatgcctacctcacccataagaatataagataagtgcacttcttagacttcactgttgtttttagaaacacctaagactaggaagaaatcccaagctgatgtgaacaaaatctttcagacaagtgatgttccgttgtacaggtattacagttagtacaatttatcttatgcactgtagtgcttgtagaagcacaagaattgagatctgcaaagtgctttgagataatatcaactaataaacatgctaggcatctcaaaagctactgttctaagaactatatagtagaatgtagtatatcatcataagcaggtttgagaagaaaaactctgaagcgcaatgtgctaggtgtatgacatttttttagtaagtacactatgtctttagcacactgctaatctctgtcgttgtaatattcgatcatcataataatatttctgttgaaaagaagactctgaagcacataagatgcatttcaatcctcttctaaaacatactgttaatttgtcaatagtgctactgatcattaatcgtcctcatttctaacaattcaatcagataagggattaacaaacaacatttgctcttgattctagaaccaaattacttgagttaccaaatttgatattgcacaatgggaaatgttaagatatgatcaataaaacataaagggaaaacttgagaaaaaaaatattgagcatacaaacaaacctctaggcctgcattctgcacgagttcacgaacttcatgatttcttccttcatgaacctgccagacattaaaaaaaatagcataccaatgagtagatgaccaaatgctatgcctttgcaagtttacatctctatagaattgctttagttaagaatacatgcaagaattttgagcaataagtccataacatattgatgtcattgaaaatactgtatgttgcccagagtagtgacttttccttctacactggtttttactcacagggctgaaatattatcaagaaatggttccaaattagctggtaacatgttaaaattatttagctagttttgaacaatgcgaaacatattattgcttaagctttgcagaattaccagtttcttatggtttccacggtttcaatcatttgaaaaagtaagcaggtgaggcaaattatcgatccaaccaactgcctgttagacatttaaagtgaactttacataatcactaaccactttagcttgtcatgacatttaaaaataaatcttgaccgcaagatactatctaaagagacctttcgtgtgtcatgtatcatgttgtatatcccataaaggaatgataggatagattcattgctagggtatatttttcactgaacagaaagagccaagttgcctatcttctacattatcctatgaagaatttggaattcatgaaacagacagtaaagtcaatccggaatctaataaaatgaggtataatagaaaatataagtaccgctattctaatccgggtcctttttgtattggattgtacatccaatggttccactagatcaggtatacatttgacgccatcaatttttgtgccttcactgatagctataaggtgatttctgtgcactggtccatctatagttaccacatatctgcaagatcaaacaactcaaagtcaatgttggtttcatttgaaatttgataaaaatgatatttcagatatttcttttcgcaattaccagtgcatattgataatgaataaatgagagtaaaaaaatgtgaatattagggaatggcctaatatcaaataaatagaaaaggtgaggcttcgaacccaggccggctagcccaccaccttgtggagctagccggaagacccctaggcgtttctccaaataaatgagagtgataccaacagactgttaaattttcttctacaaaagatctggatagtgtctacagtgttcctagtacgtgattttgtattactgtacttcgaaggacacaagaagttgagcttactccttcattatatttgacgaagggtgtgagagtttctgggcaaactcacctgaaagagaaacaaactaactttaggtattggatggtcaaaatattgattcccaagtatttattatgaaatacaatgaaattaccgtcatttgtaattattatcaaaccacttgtagcaacatcaagacgacccacagtaaacaagcgcggttttggtactcctggttgaatcttgttctgcaaatgttaattgaaaatggaaaattgtaagtcctagctataaagcataagaggtgaaagatttcacaaatattaggaagtaccatcactataaaaaaaaaagaacatacccaacccttcaaatagtcatcaaataaggagataatggactttggttcaccacaggaacaaatatacctgcagtacattggaaataacatttagatatgttgctcatatggactgctgcctccatatatatttcaaaaatgctttgatggaacaagatagcggaatggaatataagagctgacccttttggcttgttaacagcaaaatataacttcggaggaagcttcttggaaatgcggtttccattaacatagatagaatcctttgagatgtcaactttggtctacataaaaaagaatgtataagaatcatatgtaacaaataataaacttgtctatgaatacatttgaagcacatggatcaaaattcatagtaaaatgacctagctaaattaaaacaatttatattttaccgcaatagtacgatagctggtctcagaccagcaccaaataaatgaggataagagctaaaacattacttagacatgcaacaaacttagagaagtagcatttcatcattcataaagctaaaaaaaaaaacatacctggggtgcagtgcagacagaaccattgacggtcaccttcccttggaagatgagctcctcgcatgtccttcgtgaggccactggaaggagcaatcaggccagcattcagacaactgatgtgttgctgtaactaagtaatataactttgattgaattgattctgtccaattcaagcacttcagtaaaatcatgcgtgataggaagactacctcctgccgcggcaaggaccttggcgagccgctgcggttcgtgctccttgatattctcattgtagaatctcctcgcggccttggagaacttgggcggcgccgtcgcgggggcggccttcctctccctcaccttggcattggcgacgggggtggcaagggcggcggcgcccttgtggctcctgcgggggtccttcttggccttcttggcctccgcctccgccagcgcaatggcctggaggacgtccggcggcggcgcggtgcgcatggacggcttgccgtcctccccacgcacgatccacggcaccacctgctccgcggacggggcgggggatgagggtttgggtttcgagggggcgggggcggtgggctccgcgaaggtgatgttgaagtccggggcgctggaggtggaggaggaggcggcgcggaggaggaggggagggaggcggcggtggcggccgcagcggaggagcacgcaggcggcgggacgggagagcaagggcgggaaggagacggccgctgccgcggcggcggcggcggcggcgagggccatggctcgagagtggagagtgtgggagggggtttatcggttatcggatatgcccgcgacggcgcctgtttggttgcttggtacgcctggcttgagacgtgccggaggggagaccagcccgaacaacgttgccacactgacgtcagttccttttttttttaagaaagaaaacgtcaaatggggtcgggattaaaactccgaccccccctccttcgtttcgagaaaattaaaagtcggcgatttagattttttttttaaaaaaaaatacacgacagagattatagatgcataagtgcacatatgcaatatcacgctcacctccacaaatacattctctataatgtacttataactctaaaaaaaataaccttgtttagaaatatgaaaaatgtatgttaatatagtcatataaaatagcactatgctgaaataggctaaactgttccgatataatacatcaaatcacaaactcgactacttgggcaaataatgcccccccccccccccccaaaccttgtttggacaattggataattggattatcccttaaaagatgtagactaaacttgcaatattccataaatatgtgcactttaggatcagagactaaaattttgatcccttcctcatttcgtttagattaacaaaataccaccttatagtatattcatcactatttaatggcattgtgatatcttttattggatacaaactagagagtaacaccagtcatatagtacaactatttctaactagtccacatttcactttatgttttgtatgaaatactccctagaatttagtttgatggtttcactgtagcttagttacatgttttatgtttgatggattcaccgtacaagcagttgtccatgttcatctctataattttttttttctgcacaaaaagtgataaagaggagattcattaataacgccatactttatatgttttgccattaaaggaagccaaatcctctctcgtagggaacaagggagaactaaatactaaacctgattgaaaaacggttaggaaagctatattgttttatagtgtgacaatgattggtttaactttgggttaacaactgttatttttttcttaaaaaaaaagggaagcaagaccgctgaaaccgtccttgttgtcaccgcagaccaccttacacaccggataaaacaccccaaccgggtacgggctaatctgaccccttcattctttcttaaagctaccaaccaacggcccagatccaacatcctcctcctgtggccaagaacaaaaaccgaccaagagaccaagcgccggccaccacaagaaaaaaagagcgcgcacgcatcgcctccccaaaaaatccacccatttttccgcgatcccgtgcgcatctcatcgcccccacctcgtccgccatggccgattccgccgcagccgcatcctcctccctcccccgctcgctggcgtccaggaggccgctgccctcctcccctctccgcggcgggaggccccggtctccccgccgctgccgcttcgggtcccgctcgctccaccggctgcgagctcgagctgggaaggacgatcccgaggatctgtatgggccctacccatgggatcagtccttggatctcaccactggcctcggtaagttcatgcccccacactctccctgatcgttctggttggtatccgaattcgaatggttcttcgattcgacggcgagcaatgagctgggggctacttgcgctagtcttgcggtgggggtgatggttgatttcccagctgttactagtctgtgatatgatgatgaactcattcattgttctgcagattttgcttatttcactttgtgagaggctttatacttgcgtttatggcgtggctttatttggggttcaatctctgtttcttaacagatattcagtgggtgccagaagatagagtcacactgttcacttctgatgggcttgttcaaatagggggttccctggttcctcgtcgaattactccatcagaggtgccgaatcattcaacttgggctcgtttcattaatcgttcatttttcagtaataaactatgtggtatattagaatatcttgacattcaagtaggaaaacaaagtctcttgcatcatagacagtagtaaatttattcttgtcagtaaaactagggtgcatcttcagttcaggagtgagatatgttatagatattgcagacactattgttcaatgatcaggaatgttctgttccagggagacatagtttcacattaaatcagtttcaatctcttttgcatagtgcatcacagcctaacttcatataattcaatcatagacttggatagatgattagactattaaaaatgtttgacttgtcactatgctaaaagtgcttatattttgggacagagggagtatcaaacaacaaaaactttttcagcatcctgaccagcatcaaatgttccactatgaaatataagctctttcacacctctgttcatgaaacatttggatatatgcagcagtacttatggaaacgtgtcatgtcagcaagaaattgaaggggaatgaatccttgaaaagcagtatcacatacattatagcaccaattttgtatctcccatggtggcaccaagctaacaccatagagtagtgtacgtctgtcatgtaatgttggagtatcttattgcataaacaaagcatgccatatttatggatagccgtatctttttagtatttgtgctcgcattcagttcagttgacctgaaattatatccaactgaaacaaattccaagtcgattacaagtaatccagtatgaaatctagcacagtgtgaatcatctcaagaacacgatgtatctcaagctgacaggttataattatgatctgtgcccaatgtgctagtttagaccgaatcatagtaatgtactgaattacttaaattgtgctagttatgaaatgataattacttaaaagatgttgattttagatagaactgcaagttttattatgtattcaccattatttcccatattatctgtactcacttcttttgttatattttgaccagaagaggcaacgaaaagtaaaaggtatacaaaatatccaacggtttcaggagagctcgtacatggacccaaatcaaagtctttgccttggagcactatttaacatagcagcaacaaatgtaattatttcctcctgcctatttgcctatcatgctgttgctttcttttcttgatgtcatttctcatttcagggtctagatatgggaagaagactatgcatctttggcttttgtcgctctattgaaatgctaagtgatgtagtggaagatacagtattggagcatggtggtgaggtatgtgcaacagtcttacatggaaaaaaaaatcttttggtactttgctccttacagttttatatcttcattctgactaccgcatagactatctttccatatttgaaataagccatgtaaagggtaccaacagattaccttctttctgagaaaaaaaaagatttaaaaatggcgcacatggacaatgatgtggcgttttatactgaagtagattgcgaagcaaacataacggtgcccaaggaaacatgccaggtgtagctaagttttttctaaaaaaaaacttaataaaaggttgagtagaaatgctaaattgtcaatgtttttaaaggaggaaacatctatctagtcagctcttgttacatttggattttttttagaactttacatttggatactaaactgtgaattgagtaaagggcgccaatctgcaggttgtcacggcagagaaggcaagcaaagatggcctccaggagaagttgaccatgtctgttgcagtgccattgttgtggggtgttcctccagcatcagagaccctccatgtcgcggtgcggagcggtggaggcattgtggagaagatctactggcaatgggacttattttaaaagtcccaagccgtccagtcattaacaaatgatccatgccacggtgtaaatactcattcagtctaattcgctgctcgcattgtgtcagcaattgtaaattgtgcatatatgtaaacagaaaactttggaatctctatacatgtacagacatggtcacacccctgcatataagaaactgtgagttaacagctcaacttctacttttatccttgttttaatatttaccagtgaactgtcgtcaccgtttgagtattggaatattggagatttggagtaactaaacaatgcgaaccagtcattagttgactccgggaatcgggagtaactaatccctggcctatgtcattgtagacacgtttatgagttttggagtagtaactaatgggttgtttggttgatgcctaagcttgccataactaagcttaggtaagttgtagcatgtggcaaaagtatggccaagaaatagttagccacaagtgtggcaatgttagctctagttatctgagtatgacatgtgggaccatctaaatatgacatgtgggacctaagggtagaaaagtgtggcatgacacaactgtggcattgaaacaaacacacgcctaaaaactgtggcatgactgaaatgtggcgtggcaaaatgaagcaatcaaccaaacaccccctaaaacaatgtgttgacttcgggatttgggacaagattactctgtgttttatattgtcgctgggccttgatcatgatgagttgatgatactccaggtgtgatgcttcctgcactaacccgtgctagttgtcgcgccggtggtgtcatgcatttagacgaatcgaaaagacattttcaggggcgttagggttgcgagttgtgggtcgtttggactgtggagatcaggccaggaaccaggacgacgatttttaagacctttgcaggcagtgcaaggctgcaaattatggcattttcgcttgcgtttatacttataagctaaactttaaatttgattttttcgtcctagtttatttttagtatttacttttgaatcgctaagaatatatataaaagttttactcgcagataatttttatttgctaataagtgatttcgaatcaacgtatgaataagcgaaacaatggaatggcctagtaagagatttgttcaaacatccctttcatcctccaacatgaggtcgccacaatgccacttgccatttttctggaccgtaagatagttgtccaaataccaaattagccaaacagtagttgcgtatcgggatttataatgacgaactgttcaaagctttattggacttcacctagatcaatccggttgaggttgacactcactctctccctcgtgcattcagatttgtgacaagcaagaggggatctccatcgcgtgctgcattctccgtatggaccgtatattcagatttgtgacgagcaagaggggatctccatcgcgtgctgcattctccgtatggaccgtatatagccatggtcgtcgcctctcgccgaactgaaattactccctctgtcctaaaatatcttatctccgttatatttaaatatagtaacctagtagtacaatgtttattcttatactatttgctatattttgatattgagagagtaacaaagagtgtgtttagttcacgtaaaaactggaaatttggttgaaattggaatgatgtgacggaaaagttgaaagcttgtgtgtagaaaagttttgatgtgatggaaaagttgaaagtttaaagagaaattttggaactaaactcggcctcagcatcaaacatgatatatattactacaaatcagaacagtaccacattgatagaaatcagaacagtaccacattgatagtagtaggatatgttgtatccaatcgtaattgctacttctttgtttcacaatataagtcattctaacatttttcatatttatattgatattaatgaatctagatgttaatcacatcaatatgaacgtgagaaatgctaaaatgacttatattgtgaaacggatggagtatattttaaaattaaaaagtaggagtataaatctatgtgcgaaagttgaatctcgtgcatacatattgaatatgacctttgatctagacggtcgttcctatccactgtaccctaggtatctccatgatgcagacttcgacttcgttttcattccacttccatttgttcgatcatgaatgtgttggtttaactattatgggagtgttcggatgtcccttttcctaactcacatctctcgttttctgcacgcacgctttttaaactactgaacagtgtgattttttaaaaagtttatatacaaaagattaatcacgcgctaatgaatcgctccgttttccgtacgtgggtgatgggttcccaacacccaccatcgaagacaacctatatgctctattgctcattcatgctccacatctactaccccagtttttcaaaaggttctcgaattggattgacataaatccaattgatatgacggcgttatggttgattgttatatgttcggaaggaggtgaacttcttcccactacacaaaatatgatgatttattggggaagtattaaagatgtggtagtgaagttgtgggtatgtgactccatttatcagggttcaaaacttcaaatcatgttgtcacgtatgcaggtggactttcaacaagattttcagggatatgccgttggttttcgtctcttatgatgcaattgtggttgattgttatgggttcagaaggaagtgaatttctccccactaagcaaaacatgatgattcattgggaaagcactagtagtgtggtggtggagtcgtgggtgtatgattccatccactaggatttaaaatcatgttgcacataaatattagaaatacgcacatgcaggtgagattttaacatgattttagtgagattaggtatatgccgttagttttcgtctcttagagtatgtgttaggggacgttcgtagggggtgtgagtgtagtgttgcatgtgtagtggtgtaatatataatgactcattagtgtacaattaattacttcatccgtcctaaaataagtacaattctctaaatttgaattagaggcgtgcacttatttcgaaacgaatgaagtaaatattagttcaaaatattttaaaatatatattaatatgttttttacactaatttatatgtaaaaagtttatataaaaatatattattattcgataatttgaaaaatatgcccatgaaaagtttggaaaagtgaagttagtaaaagagaagttgggaaaggagcagtactacaattctacaaatgtacaattcaacagaatttttttgagaattaatattatttttatggaaaatcgcaaaagtagtggtcaaccggagaaaatcgcgaaagtaggtccctgtcgaacgggtgcagttcgatagggcgcctatcgaacggccagagcgcgactggcgaggagatcggaaggctgccgttcgacaggacctgtcgaacagcccccgttcgacaggcagggctgtcgaactgcccctgttcgacaggagggctgtcgaactgcccctgttcgacaggatatccgtcgaactggcgcagttcgacagggtcgcgttctccatttatttgtaataagttattttttttaataatatgtaatttattttagtgtgtaagaaaggaaaatatttttgtaatgttatatgtatatgatttagggttttgataatgtttggtcagaaattgtagtatttatttgttggttaaaatatttgaattatttagtttcattattttttgtatatttgaatgataatttgtcatgattcattcgaagggtatgctactgagtaattatccgaagaagtttatgaaatagtactgatagtactaagttaatcgtaaagtgtttctcaaatagtacagacagaacataaatgactaaaagtttaatacaaatagataagtcaaggacgatcagtgcccttcgcacgcttgctaggtcctcccttctttctacgcctaatctgctcagtgggatatgtcaaattatcaggggggtgcctatctctagctgcctactgtggtgtcacgtctggcccctgaccggcctccgtctcctgcgtcggctgtgtgacctgaggtgctgcgtgccagtaatccatccctacttccccctggggaggatcagtggaaaagaagtcctcaatgaatgctgtgcgaggggagtaagcaggcattccgtgatgcgtcgacgccgaaccgtactcatcgtctgtttacacaagaggaagaaaccaaaaaatatggcgtagttagtaacgatacatataattagaaactaaagcgtgttattgtttaaaatgacttacatgtgtgctgtgtgtggccctgctctggcgcacgcggagtgatatgaagtccccatgctggtgtgttcaacacgttgtcccccgttggcatgtaagggaagtgtgccgacccagatgctccctgcgaggggtgaacataaggcggagtttggaatacctgcggacgtggtggtgccgtgctcgacgtgggtacccctgatccggctgaccccctggtgtactccggtgctggggtgtgctgaaaggaaggacgaccgtgagatgtgtgggccgcttcgtacccgcgacgtgaagaggatggaccactccgatccacgctggaacgtcggggtagtggtggtgatggccgtcggcccgacgtctgcaccacatctgccgcgctccgacaggagacacgacgtagtagtgcggcagcacgtgcaaggaagttgtgaaggatgctcgccacgtcgtcaggcctgacgactggaggtctcgcctctagtctttgcagcagggtgtcggactccacgtgaacgtgctcaacaaattccgcatgttccacaaataatcaaggcaattaaaattatttaaccagttgcacatttattaagagtatttaacaagatgcacatttgttagaaataatgaaccagttgcacatcatttataaatactgaactagttccacatttatgtaagaaaaggaactagttgaaccaattgcacatttattagacatactgaactacttgctaactttttaaaaatattgaactagttgctcaaattccacaaataaacacgtaccattgagttgtaagctgatctaggctgaggggcaaacgtgtcagtaatcgctgcctggtgggggacggtgctatctccttgtggaggaaaacacctccatcgtgtaacactgcggtaccaacgaaggtaagctccataataactcccatcgtctggaggtgtctgaagtgccaagttatcagctgcgtgctcccactcttgtatcgtcggctgaaccgtggtcacaataactagctcgtaggaaagcccgagcccctttctggagtacctgcacaacaacaaattcacacattagaaaaaatgttgtgcagtgatttattttaaaaaatgtaggattaaacaactgtgatgtgaactaacctatgaagactatcagccaaaggacgaccatctctcggagggaagtcctgatacatgcccaactgtttgagaaccctgtggacattgtgtggctcgacgtgcacgtccaccacgaggtgacaagtcgtcatccagagttgcatatctcgcgtgcaaagatccgcgagaccgtgcggtgcacgatcattgacatcgtgctgagtgtagggagtccaccgaacacggtcaggcgtaagctgatcaaagtcagctacaaactgagtgtagacacgatgtagatacagatattacagtaccagcacacatagatacagataagaacagttcagtacatttcaatttaaaattacaagcccacgacacatatattatgatattacaagtgcagtgcagttcgaaatttaaattacaattccaatacaaatacatgacgatattaaaagtgcagtgcagttcaaaatgaaaattacaaggccattacaaatagattcgggtaataaaagtgcaagaaagttcaaattaaaattatagacgcaataaacgtaaattgaacgataacgatcttcaaagtagggagtccaccaaggataatagcgaactaaggattatttttcttcttcgacttcccctttggaacgcgacgaacatcagcgcctgtggcatcttgccctacattgtacatgctgcaatctttacgggaatggttctccccgcaaagaatgcaagctttcttacgacgagaacgatctttcactccagcttcatccataaggttcttgatcctgcgcgactggcgatgacccttagtatcaactaataaatttgagtcaggaacccaattggtttgccctggaggaggacgagtgaaatcgcacacggcacgccaaccacgcaattcaccacgccaagttgcctcccacgattcctttctaaagtagggagaaacaaaaatgtttccatcaacacccccttttgcggaagcagcaagaacatgggaacatggccgatgtaacaggtaaggcttgttgcaattgcatttgcaagcgtgatactctggccacaacgtgcattccaatgtgatgtcagtagtcccaatgccgacaccactcttgtcacgaagtcgtatctcaaataacaactctgtattcccagcaggccacactctgtggattcctcccttcttacttttctcatccatgtactgtgtaatagcggggctatacttaacactgggtttgctgaggttcagactagccatggaataccttttacagagatacttctgtgtacccctcgtgatgccctccaggatagcaacaagtggtagaggtcgtgtattcttcataacccagttatacacttcagcaagatttgttgtcatcacaccatacctcgatccatctgtatcgtacaacaacgaccatttctcccttggctcaaattctacccactccgtgaagcacttcgtgacccttccacgcttcctgcgccgagtaatacttggtgcttcattaggaatgggttcaagtccctccggctcctcctgtctggcaactataggttttttcctaacctcttccatgtgtgtagtggtcaaacgatccagttgatcccatatggcatcaaactttctttgttgattctgcttgcataacttcttgaacaggtccatcaatctcttactcctgaattgtctataaaaattagccccaaaatgtcgcatgcatcatctgctatgtaaatctggccatggcacggactgtgtgacatcttcttgaagcttctgtatcgctgatagcaaaccggcgtgtcggtcatgcagaacacacacatttggtctgttttcaacaacacacattttaatgtgccgcaaaaaccatagccagcttgatgtgttctcgctttcaacaaatgcaaaagcaataggaacgacatggctatccgcgtcgactccgatcgcggttagaattgttcctctgtacttgcttgtcatgaaagtgccatcaacacagagcaaaggaatgcaatttctaaaggcctctatcatgcacccaaatgaccagaaagcccgacgaagaacattctccccatattcattcacctcatcgagaatagccatgtgtgtgcccggatttcttgcctgcatcacctccaatagtgggggaagattgtgataagaatcctcataagttccaaacctcatctccaatgctttctgttttgccctccaagccttgtcgtacgatatctcatatccgtactctttctcaacgtcatgcattatggtgaaaggggacaaagatgtttttctaaccacctttgaatataccatttgtgccacaaatgccgctgtcaggtttctgtgcaccagacgggtattctccaacaaacacgtatgttgctcaaccctcgaagctacccataaagtgtcatgttgtggcttgtaaccatgcactctccaaggacatccaccctgtatgcacttcacgtcatacgtcgtcctatttgaaaccttcaccctgaactcacgcttctggacaaatgcccacctcttcaccgcatcttgtaagtgacctttgtcatgaaacatctgtccaactttcacctgcttactatcataacaccagtgggcatctaaaccatcgtttaccttcatacgactcattgatatggtcgtccaatcatcgggtatgttggtttcgttgtcccacagtgttgtatcttctccttccactacaagcgcaaggtattcctcgttttccacttccatctgatccactaccgcctcattctccttcgctgcatcaacacgcataggcgaatcaggttcttcatcgtccaagtcgttggcctcacgattagtaccacgaacaatgacctctccttgtgtattaccctctactacttcttcccctcgaccttgcttagtctgccaaacattttcagcttgtccaccttccaacggagtttcttccaccacggcatgacttgactcccccgatcgatcaacacatgttgtcttctgcaccactattgccaggctatagcctttctcccttactttactaacaaacttcctccaactcccagttgacgcaacctccactactctccactgccatccatgttgacccctcactggccacacggcacttatgacaaatttatcgtgcactggatctaccccaaacatattatacaaccaccctaacacgtcgttcaaacccatatgctccggtgcattcagactagtatcatggaaggcatatacagtcaaatccaccccgctatcacatatttgtataggagcatcgccataatacagacgaatgggcatatcacctgacatcctgataaaacatgacaaatagtctcacgtttaatcatttaatcattcgataattaccctattacaacttatactatattgccgtgtactaatttacaactattagtaacaaacaactagtttaataatccaaataaaatataacacctttgtacctattttaacacacaacatatcaataatatgtactaactaagaactaatttaaccgtacaattacttaaatacctctaccaacatttagcaataacaaatatgtgctaaccatacatactaacatcgaacaatgcgaaacaattaacaactcttaaaccaatttttttattaaactttcatatgcattgtacttagggattactaatgtataccttaacttcactgctggagggcgtcgccaaccctttcctcccggccggtgcctcctcggcctcctctccggcctgctatcccctcccctcgctccctccggcgctcacggcgacgatgtggcgactcttggcggcagctggcgatgtggtcacaaatcgaactcgcggcctgggtggacggggctttaaaccggcctgtcgaacgcccattgttcgacagggtcggtggagggccctgtcgaacgcccccggttcaacaggcctcgcggcgccgggtggtgggccctgtcgaactccctccgttcgacaggtgagcgtgtcgaacgccagccgttcgacagagctttgtcgactgcccgtcgttcgataggtgccctatcgaattgcacccgttcgacagggacctattttcacgattttccccggttggccactacttttacgattttccataaaaataatattaatttttttctcaaaaaaattccaattcaacgcaccctcgagtcagcactcaccacaacaaagccctcctattctcccgcaccaaccaaacccaagaggcgggggaagccatggcgagcgcgtcggtgccggccgccggctacggcgcggacggcgtgtaccgctcgctgcgcccgcccgcgcccgtcgcgtccgacccgggcctctccctcaccgacctcctcctccgccgcgccgacgcctgcccctccgcggtcgcgctcgccgacgcggccgccggcggccgcgccctcaccttcgcggagctgaggtcggccgtcctctccaccgccgtcgcgctctcctcccgcgcgggcgtgcgacccggcgacgccgtgctcctcctcgcgcccaactgcgtgctctacccggtctgcttcttcgccgtcaccggcctcggcgccgtcggcaccaccgtcaacccggactacaccccgcgggagatcgccaagcaggtctccgacgcgcgcgccaagctcgtcatcaccatctccgccctggtgcccaagattgcggggctccgcctccccgtcatcctcctcgacgacgacgcgaacgccgcggccgcctccttgcctccggacgccaccgtcacgctctacaccaacctcgtcgccggcgtgaaggaggcggattaccgccgcccaccaatcaagcagagcgacacggcggctctcctctactcgtcgggcacgacgggggatagcaagggcgtcatcctgacgcaccgcaacttcatcgccgcggcgaggatggtgacctccgaccaagacgagcgccgggaggggcccaacgtgttcctctgcttcctccccatgttccacatcttcggcctgtccgtcatcacgtacgcgcagctgcatcgcgggaacgccatcatcgccatgtcgcggttcgacatcaactccctgatggaggccgtgcagaggcaccgcgtcacgcacctgttctgcgtgccgccggtcattatcgcgctcgccaagcacgggaaggccggtaagtacgatctcagctctctcaagttcatcggctccggcgccgcgccgctcggcaaggatgtgatggaggtcgtggccaagaaattcccggacagtgagattgttcaggtactaattgaactgaacatttgatatttttcactgtttactttcataatatatgctgatgaattgttgaaattagcttatggttggttgctttgaggtgtcaatccatacaggataggttgatccatcatggcatcatcccgtgattacgatgggattagtcaagtcattgattgaccaacccattgcattcctcaaacctaacacgaaataatggttcagagttacgtttgggcagtgaattcataacaacatttgttctgaccgtacgttttataaggacatacctggtttgatttggaatgactacgaaattaagtctttctttggctgtgcctttgtggggtctgatcttggttgtgccttccagggcgtaatatagtgttcatatgtgaaagggcatgtagcctagtgattgcagtgacctgagtagcaccccaaggtcctgagttcaaatctgcataggagtgaatttcagattgtgttatttgagggctaagttccttgtttgataggctaagttcctaatttaaaaaggttgcatatatccggttggatgtagaggccgggtaaaaaatctctaaaaaaatattgattcgatagaagctggaaaatgacatttaagtgcgggagactgacaattttgtcctataaatataacctcattgaggcaaaggacatttaatttctttttgtttctatatttatacttaaatccttaaagtgtgttcgcgtgtgtgttggtgataggaaattaagaatgtcaacttgcaatatctgaataataatggatattttgcctaatgcagtgggcattgaactggttcattcgtaaactagtcctatcagatctgtttggatcaatttggtatattgtatgtgctaatttcagtctgatgtggtccacaggccaacaccaagacaactcgtcaagatgtaaaaacttgctctaaaagatgtgatttctggtctgtagccaactgttctagactcaagaggtgtgcaggcatttctagtgtgtcttcaaactgcaacttatgacagctaaggcctttttgttgacatagctgtaataaacattgtccggatacatctttgatgcagaggctggatttatttccgtaatccagttttggtcaaaaaaaaaaaaagacatacaccgtcatggtctagcacctaagcaaccactgcaataagatcacagaactatcttaaagtggtttggtagtttgttgcaccacactccttgtgggaacatgattagtgtggtggcattcttttcttccatgatgctacagtgtatctgtaaaatcaactagtaaggttaagaattttatatctcaagttgtatggcatgttatgctcctctttcagggttatggtatgactgagacttgtggaatcatatcgctcgagtacccagaaaaaggacaggctcgtgaatttgggtcaactggcacgcttgtctcaggagttgaggcaaagattgtcgacataaagacattaaaacatctaccgcccaatcaagtaggagaaatttgtgttcgagggccaaatgtaatgcaaggtaaaatttgaattatacatttgatcaattattatacactggttctcaaaataactatttcaaataccagtatcagtctaatactataatcatattacaatggaactgtagctatttatttgtattctttgttttcaattgtacattgagtcattgacaatgcacaatttaacaaagactagtgatgtcgagcatacaaaaaatatttgaaaatattccacctactagacctcactatttttcactgacaatagatcccaatatatcttatgcattctgtcctgcaataataatagaacaaaacaattgcttacctatctgaatgttgcgtttgtagggtatttcaacaatgtgcaagctactgaatttacaatcaagcaagggtggttgcacactggtgatcttggatacttcgacggaggaggccagctttttgttgttgatagacttaaagaactgattaagtacaaaggtttccaggtaaagaaattgattctttttccctaaatacttttttttgtccaaaaaaaatttctggtcagcccctctacttatgttagtcacatcagggcccttgctaatactatgtaaattatgtcattgaatctcgtgctgatgagttttataagcagacttgaaagatcatatacatataggatcaattcagagtttgccgcaaggatagattgatatagcacaccaaaccttctgaaattgtcgtggcttactagaataatttcgtgcatatattatttatttattaaaaaaatgcttagcaggagctctttccattcactaaagaaagaatcatatagaatagagctggttacaatcagaacaccaaagagagaataatataggattatttctgggctccgttcgtcatgtatcttaacatttttgtcttgagcataccataacctcaccttttcttttttatggaatttcctgtcttttttgtttactctactgatagattgcatctactgagattacaatacactgaaaagccttttctctattaccatttaccaaagcacatatttatagatgggagttgtctgaataagatccttcttgttttagtatccactataacaatcataacaggaatccaacctaatgcttgtgttttgtcttgcttgagcacgcgtcatattttgtccaatatatggaaatagctaatcatctcctttattttacttctttagattgcacctgccgagcttgaagggttacttctatctcatccagagattctagatgctgttgttatcccgtaagttgaaccacctaaaaatttaagtgtttcttgctccttatgatataaactgttcgcttgttacaacattgttgttttggatcgttctctctctgttgtgccttgtttcttaacggagctctacttgtttccaaggtttcctgatgctaaagctggggaggttcccattgcctatgttgttcggtcacctgacagttcattgacagaagttgatgtccaaaaatttattgaaaaacaggtgaggctgatttggaagttggaaccttgtttaattgggattgtagactagtggaactttttagcagcatgagacaatttgggtaaagctcgtccagatactaatgttaatgaaacatggagcatcaattagtacatcgagtttcattcatatttttcttagagttctacccactttgactatacatgtacctggtaaaaatccaagatctaaatagcaagaatagtttgctgtgctggccaaacactggtattagcatccaacatttgcaatccatgaatgaacaagtattttgtgttttccatcgactgcatactaccctaggtgctaatatacttttttttgacacaaaggtgctaatatatttcactaatgaactgcattatcaggtggcgtactacaaaagattgaagagagttacctttgtgggcagcgtgcccaaatcagcttcaggaaagattctgagaaggcagcttatcgcccaagtgagatcatccaagttgtagcaaattaatctgcttctctttgggaatcaatcgtgcttatgttttgccttgattcagccattttcaaaacttgtccgcgaaggtttatgtagcattgtgaagaccacgtgaatgtatgatgtatcagaatggaacccccatactgtgcattataataatggaacataaatgccaatttcaagataacatactctggaaaggatatagtactaaagaaaaaaaaagctctgacttaggctgcgtttgttagttaggccttgtttagatctaaaaacattttagccaaaaacatcacatcaaatgtttggacaatgcatagagtattaaatgtagaaaaaaaaccaattgcatagttccgtgtaaattgcgacacgaatcttttgagcctaattacgccatgatttgacaatgaggtgctacaataaacatttgctaatgacggattaattaggtttaataaattcgtttcgtaatttacaggcataatcttgtttagttattagtctacgtttaatacttcaaatgtgtgtacgtatacttcaaaaattttacacccaagaagtaaacacggccttagggttcccaacccaatccctttcgcgcgcacgcttttccaactgctaaacggtgtgtttttttgtaaaaaaaaaatctatacgaaagttacttaattaatcacgcgctaatggattgctccgttttccgtacgtagggcactagttcctaattgggggaaacgaacacagccactatcctctagcattgagcctacaagtaccaacttattccgttccaaaaatccaatctagttagggataggacattacctctccaatgaatgtctcatccctgcaaggtcaatagtgcagcaagcggtaagctccaaaattttatcatgttaagatagagctaacttaagaagccaactcatacaacaggctaactacaaattatctataagctgccttggttagagcaagtttaatagtatagcccactactagctccaattcatctatagccaattcatacaatagtttcttactatactattaatatatggtctcacatatcatacacacattgtgtcttggagtccgtgctacagctgactacatatctatagcctgctgctcttctctccaattatttatctccataaaatatgtttatagctagttaatagcctgctattgtacctgctcttaaagcatacatacattaaatataacaagtttttttttgtgtgggacctacataacaaattttttctcatctcccgtgaccgatacagcgtggggcgctgtgcaagcgccggcgctaaaacaagcatccgcttgtttctcttccagcgatttctttctctaatctggtattaggctgattaataagttttggagccttcttaacggcgctattgtacctgctctaagtaggttaggtttatgggatagagggagtacgagactcgcgcatcaatcatttcattccatgccaaacacatgatgcatgtgattgacaattgtttggaggcaaaaggtaggggtagcgatgtgtgctacgctggcagccttgctgcacgtgtcatcgtggaggacgtacgtgtaggcaggcgtcttgatcgacgagctcctcggctcttctacgggtccggtgcttgtgacttgggagagatccgagagggtaaaccggccggcgagaaacgggaggaggcagcttgcgagcagcaggggtgcatgcctcttgcgggacacgagcgaaaatgccgtgcgcgtggcgcggaccgaatagttgatgggccgaataccggcacgagagggccgtggtttagcgggcccctcatggaccgtagtttggccttttaggccttaatttccatgggcttctagtcacgtgtgtgcgctcctaggctattgacggcatagatgtctatcaaaaccggtgcaattttactccgcttaaaaataagttcactttgctatatagcactctatccaaaggaaagatttgaacttagactagctgcgtaggtactctattttaggttgatatctactccgtcttgatcagaatcccacagtgagatgagatgttccaattccaattgtgctagtccctgtttgtaatgtgtaaatatttttcataaataaattagtcaatgtccatctgaatctagagtaaacacttgtaacccgcttgccattgtttttttttcattaaaagaaagaagaaaagttgcatctcatttagaattttaagattaatcattttcgttaaccagccttgttttcatgtctaagaagacgactttaaaaacggcctaaaataatctttaaaatcatatttcacaatctgactttttaggaactaatgaggtggaagaaacggtggccaagcttacatggtagtagcacgtatatcgtttcacatgcattggttgatctaaaaaaacaattacaattgtgtacctgtctctctatataaaaaggggaaatttaatacacttttatttgccagccagattgagttggcaacgaattcttaacaagaatgacaaaaaaaaaaagggaaaatgaaaagagaaaatatcatcgagcttttggtcgctgttaaaaaaaactcgacacgacattacttgcaaaattaagcctagtaattagcggtagtagtatgctcgtcccttctacaaacaggcgagagagagagtgagaaaatcaaaaacgataaatggcaatgcgcgctcgatcaggccgccgtgcgaacggctcagctagcagcgcggcatcttcttcttcttcttcttcttcttcttcttcttcgtctactgttgcggctggcccgccatgctgaaggattggctcttcatcgccgtcgacttcttcgccggctcgccgccggcgccggcgccggccatgctgaacgattgtccgcccatcgccctcggcttctttgccgccggcgccgcctcgtcggcaggtacttctgcggtcacccgctcggccttcttcttgttggacttggtcccctcctcctccgccgccgcctcatcgccggcggcgccaccagctgccgcttggttttcatcctcggaggccgcagcagccgtcttcgcctcaccggccgccaacctttccgccatggcgccgcctgaagcatccgtcttcgcctcaccggccgccatcctttcctccatggcgccgcctggtgccaccttcctggactccgaggcggcggagggggacttcccggtggccggcgcaaaggagcccatcatctcctcggggttcagcgagctgatccggatgacggacgggccgtcgtcggtgttcaccgggttgttgaactcggagcacgatttcctgatctcgccgtccttgccggtgatgaccttcatgccgctgagcttcgtcatggccttgccgaaggtggcgtcgaactggtcggtctttttacccatggactccacgatgggcttcgttcttgcgtccatccccatgaggcggtcgatggtgagcggcatcttcttgtccatgacgagttcgaagtagttggggtcgacgacgtcgggggtgatgggatcaagggggacggctcccttgtcgccgtccttgccgtcgcagaaggcggtgatgttggagcggtaggtcgggtcgatgggcgccgcgtcgacctcgatgaagaagcacttggccttgccgatggagtggccgccggcgaggaggacgaccatctcgtcggcgctgaaccccttctcggagaactgcgccatgagcttcgggacggcgatgtccgggccggggagcgagtcgccttcctcgcggttggagacgagcgagtcgcggcggccggtgggcacgtcgtagttggggcccccggcgaggcgcacgctgtcgcgcgtgctgagcgccacgatgtccgcgcacgacaccacctgcgggcactccttctccagctccgtcttgatctcgtcgatgatgtcgtagcccttcaccgagatgttcggccccgcctccttctccgcgctctggttcgacagcgggtcgatcaagatcgacgcgtcgcatccctacaccacccacacacgcacacgcacgcacgcatccaacatcacatgcaagtcagcatccgccattgccggcggcgggcaaggtcgtagaacgtgaacgtacattggcgaagcagtcgtggaagaggaggcggaggaggagggcggaggtggtagggtcctccttgaacttgcgctcgatgacggtggagacgaccttctcgacgttggggcaggtggaggagtagaagtcggcggagagctgggcggtggcgagcagtggcgccgcggcggcgacgacgccggcgaggaggaggaggagggggaggcgggtgtccatcacgaggggtccagtatcgtgcaatggtggggctcgttgcgggccgtgcttatacagagcgcatgcagaggtggtcagcgcgggagaggagtgagcggtcgaggcgcgcgcgtgcgctggacggttcatggctatcgcgcctttcgacttctgggggtgtaataatagcaggggatgcttcttcctgcttccctcagctcttctcggcatgcatagccacgttaccttgttcaaaaaaaaatgttttctggtcgttttctggtgtatcgacgggacgatcgatcggctggaggaacggaggatgcataattaatctaagagaaaatccaaataaatataattgacaagcacacaatttcaaataagtccaagtttcatgaaatgtcattgcatcagcgatttaatttgtctcaaaaatatcatcgtcgttaatgttccgttagtacttagcatctctccattaagtgctataggataaataatacatttatcgtggcgggatgatcgaaattctaacggcaatttcatcaacggtgcagatccagatccggatctaggtgctatggtggtccctatatggtggcgtttggtggtagcgatggttcagctccacgactcggtgaagctcagcggcccggctaggtggaggagcgggtcatcaacagcgctgtccagtcgtggtgcgggttgttgtggtgtgtaggtggtgtacatagtgcaagtagtttcgatgtgcaggtggcatatggttggataggactccaaggtgaaagtcttgcttggcttgacggtgctagcggcggcgacatcctctgacgctgttcactttcttgaaggcgttgctatggagtcctcattcaactccacatcaaaagatttcttcgggtgaaaaccttatattcgtttggattgggcgatgtcgtcgttctgttagcgtgtccttaaagctttgtttaggagttttttccttattggatggttgttctttagttcagtaagtcaacggcaggatttttgccggttttatataaattaaccgtgccgttgtgagatttttagatctgttttttttatagactctcttttttctcttctatagtgaaatgtgggagcacctcggaaaataacatccatcagcaatgtctcttaaaaaataccatcacctctcaaaaatcacaagaggaaatagatacacaagagaagacgaacaaaactaggaatttcgaggaggtagaggtgaatgtatagatggccaaaaggcccgaggcccgatggcccggcccatggcatggcattttggcccggcccaagcacagcaccgggctgtgcctgggccactccaccggcacgttgggccagcccgacacaaccggcccggcacggcacgatgggccggcagccaagcccgatacacaaaaaaaaataggggagtaaaaatagacatattatatgccttggacgaaagaaaaggatgtaaaatagacttattttatctatacatatgtcagcccaaagaggagggatggaaaatatacttattttagctatatatatgtcagaccaaagaggagggacaaaaaaaatagacttattttaactatacatatgtagaagcccaaagaggagggacggaaaatagacttattttaaaaaaacccgatgggccacccgtgccttcgggccgccacggtacggctcaacagttggtgggccatgcctgggcgggaggtgcagcccatgggctggcacggcccggcacgaagtgccgatcgggccgtgccggtccaatagctggtgggtcgtgcctagccgtgcctgagctgggccgtgccgggcgggccttttggccatctataggtgaatgcaatgcagcaatcagaaaaaaggagcacaactcttaccccttcgaaattccttcacgccttccaacaaattcaatcaaccactcccatttacgaagatgcaacttttctacataggcctggtttagttcttatttttttcttcaaactttcaacttttttatcacatgaaaactttcctacacacaaacttttaacttttctgtcaaatcgttctaattttaaacttctaattttagcgtgaactaaggcacccataatagaaggccaaatcgtcgtcgataagctgcagtcttcagtggggaagaagccatagttggctgccagtatcgccgctcccagagacaatccagagcaccacacaggcactatcgaggcggcttgtgcccagcggccgcgcgttttccgcgagcgacgccacccagagcccccgtccctcgaacccaacccgcccgccgaaggaagacacacaggcggataggggcacagccccgcggcggcgacgctggggcatcgggagttcagtagatcaactgcctggatcaacgacggcagcctgggtgaaggtcttgccgaaggttcacgttgacaaaaaaaaaaaacaaaaggaaaaggttaacggaaggcaactcacgttgattgaacggcgatggtaaaaataacaaaaggagaaaatagcttataccatggtattttgtagagcttacatctctatctatattatcataaaatttattagtggtaatggttttgtcacttccacctatcttatgtgctactatttgcttcctgaacagtataatacattgtttatcgtatcatctttaaccagagttttaaagtgataatttattattatatcaccgttaatcagagctggagaatgatgattaattttagttagctgataacccatttaatataattagagcccgttgtaacatatggatattttgctagtatcaatggtatttcttagaatcgatggtttgtcgataaacaatcttagaaatttcccctttttccataagagcaggtacaatagcaggctataaatcagctgcaaatatattttaagtagataaatgaggagagagaaaggtagcgggctacagatttgtagccagctgtagcacggactccaagacgcagtgtgtgtttgacagatgggaccagatattaatagtgtagtatgtaagtattgtatgaatgagctattagattgattataaatgaattggaactagtagttggctatactattaaacttgctctaatggcaatggaaaattggtggactcttcaaaatacattggctgattggcggacgaaaggcctagagaaccaccactccaaaagctttaatgaagtgtgaacgtgtgattgttcaaccgagatgcatttgcagtttttttctggtcacctgaagttgaggataatcacaccagcgtgtaaagatgttcacaaagaagttgttcgtgtatcccatattcccttgtttccttcatagccaaaaccaaaaggcaataagggaatcagatcgatatagaagtatggaaaattttgctaagacaagtagtagtatatcatataactaaggcaaatatccaatacaaatgtatatgcctacaataagcatgcaaaaggctgaaatttcactcagatcaaatgctaactacttcaaaatgctttaaacaattacatgacgttaaaagacgtcttttctcaaccatggcggaacagattaaaagccggttagaagttactcggggagtgatacaggtctggtcagggcacccgccactctaccaatcagactgcagcgttaaatcggaataaactacttttccaatgcccactaatttacaggccatttacacaaaaaaataaaaaataataaaccaaacacgccagacaacaatcaacaaacacactacactaatgctcgtgcttcactcgccctttcagtattcctggaatagggggtgagcttggcaatctagctgtaccattagttgatcttgcaggttgctgcacttgctgcctataaatatttggcatgcttgagctctcacctccatttgaaattagatcatgaataccgtcgatttgttcttctccacaagaactcattgctttcagtacaaatgagtcatcatgcaactcaaatggtgtgctgcagtttcagaaatgtaaatatcaagaacttacgctgatctaagggaaatctaagaggctgcaccgatatcaaattatttctttcaacaaaaataaaaggcatattttgatatgtttcattcatttgatagttccttttagaaagagtaaattgcactcatggtgcaagaacttgtcaggtgggcgtgttttagtactagaacttgaaatttgagcatattagtccattaacttggctatatggtgcatatttgttcaaagtgaaggccacattacatatttttgccacatcagcaagggacgctgtcgattgcacatcaggcacacaaatcgcttatctcccatcccaacaattttgaaacaaactcccgactatttttcatgttctaattgttccagatgatatataatgtctgcttctttccatttattatgaattcacgactcccaggttgatccattacttttggtgaactatgaatcttgtgaagctagatcatctacggcaagatgtggcaatgcatatcattcctgttcacatgatcaaactttggaaatatataggcaaaaatcgaacaggctagctaactcaaagatgttactgtgtgcttcgtcagtggtggtggcgggtgatggtgatgctagtcttctcgaagcaagcgttggccttttagatcaagctaaatttctactgtctagtttcattgttcaattgacagtataactatgaattgattcatgcatcaatcaagagattacagtgccctctatcaaagctaaatctagacctatagagcttttgatttgatattgttaccattgaactggggatatttgctaaaatgaaccttcagtctatctgtcgtttgaaggaagaagcaaaaacatgttacatgaatgacatgtcttgctaacgtggccgaaaattccgtgtggtattcaccttgaccaaaagcgcaccgtctagtcaagttggtgagccagtttgttcagttttcaagttcttacaatagaatgcacccacctaacaaattcttgtaccgtgaatgcaatttactcttttagaaaagtaaaatgaatttcacacttgggctctcatcttcccaatttaggatgccaatgtctccctattattcaagaattagtgatatggcaaatgtcactaggataatgaggacctgcgacctgtaattggactaaaactagatgacttagctcaaccaataaaagctaacaacacttttcaaaagtcacattatttacacttccgcttgtaccgtcccatcactagaggtttggagacaaaaatctctaccatccaaatttgatatagcagctgagattttagttcttttttacagagtgaattatattatattttaagggttaaaagaccactgccagaatttaaatgagataagaggatgcccttccagtgaggaccttctgcaatcatatcatgaaagaatagaaaaatggaaacagaaagagaaaggtgtggcttgctagataaattgtaaaggtgtgaccagatgggagagaataacaggattcttgttttacctattaaagtcaaaatgtacaagttgcatatcttctgatatttcaacttccacagttgcatgaggccgtgtctgcatgattcattcttgtcatttagcctgaagtcatgtgcaggaaacagtgccatgaaacaagagaatagaagacaaagaatttatgaactattcacctgaacaaggataaatggtaatgcaactccacccgagggaatgtttcctgaaccatatagctgttcatttctttgtatcaacttttgcatacctacaaacttaacatgccaaaaacaatgttaccgagtaagggcattatgtgtatcacagtatctaccactaaagccacacaatttgaagactatggtacactgctagctcagtagaacagttcattttatatattgcattggacatgactaaagaaaagcaggttgagctatatcattacttggtcttgcagctcctgcaaatatgtatttttcttctcaatcctacttttcagtcctacaagttccgtctgtaaaagagcataaataaattaataaatatgactaccaaaagtacatcaaatgtcgataaccagtgggaaaagaagacgaaaaacctgcaaatcttcaatatcatttatactggttcgaggcaaccccttccactgaatttcctttttatctttagatataatctccatagccatcagaacattcagagcatcataaacccttctccgtatatttttctcgtcatattgttgctgcatttaacacaaagtgagcatacaactgacttaagaaataattggtgatgcaggcaagtcatttctcaactgcattgggattatccggatctggtggcaaaatgctgttattgggatctgcaaattcggcaacaagttcatctgccacctgataaagataagtcagaaggactatgagacttggacttcaccaataagggtaaacattgaaaactatcaacaaatgcatagccaaaattattacaactttttgccagagagacaaaatatgatagtttttagcaattttgaggaactccaaacatgaacatgaatagatgcaaagacagattgttagtttaaatataacagtagaagagggtgatatgtatagcggatttacaatgatcaatatggtggatgtcacatattacaacacatcaccatagtaagatctgagcaagctgatcaaacagcagtgttacataagacatgtgagtgagttaccaattttatagccccaaatcatgatgcggaacatggcagttttatagataatgaattgtttgacaataccaccaggtggacggacaatatgaacatgttggcttattggagcaatagctagtcctgccctgtgcatatattgctattaggttttacattgcatacatagcctaagtcctcttgaaataactgattgaatcttcaaggatagagttaacaagaagacaactatgcaaagaaacagggagctgacacatgcaacatttgtgatctcaatttgctgcttcaatccatgtgatgtgaccacgtacatgatgccatcagatgctcagaacaagatacatgaactcggtagaaagaggaaagcactaacctcgttgtatgttgttctccctttactttcaactttctcacaaactgcaaaagaacaaacagtgtcatcatgagtttttatagcacatacttgtggtgcttataaataaactcaaatggtgtactaatagggaacaaatgggatttaacacacctttcatactaaactggcgcagccccctgccacctttgtcaggaccaactgctcgtgctcctctcttcttcttcttgctgaataattttattcatagcaaaaacccttattgcaaatgcacaaaactagataacaatgaagggatttattttttgaaaaggagccttaagaggtagagaacttctgccaagtcgtacttccaaattcataatgcagaaaaacatgcactggcatccaaacagcagtgttctacagtctggaatctatgtagcaaaagaggtcacatgactgatgttttactgatcatcgtgagtacagtatacacgtgtaatagactacagatgagaactactccgtatatatatagaattaacactttcagcaaggtaaacctacagagcataatcgtataagcatccccagaaaatcttacttgcaaccacacatcaaagtgatggcaggatacacttccctaagcattttgcagcccaaacacagctaattacaacactacggacaattttaaccacccggtgcatctccggagcattttaagtagcgtacagctacagagaaaaacaaaaaccaaccaaattctcaaaatcttaaaatcttgtaataacattgggaaaaaaacgcaaccccgcggcgaaaactggcaaaccaaacgctgacctcgttggagcctgtgaggaaggcgcatcgtcgccgtggatgtcaaggtcgttgaggcggaggaaggtattctcactaatcggagtagaggccgccgccgcccccgccgccatgcctgcggctgcggggacatgctgctcgctgcggctggacggggagcccgcgctcccgccgctcgtcgaagcggattgcgctccgcccgagggcggcggcgtggccagggacggccgcgcgccggccggctgcggcgggcgctggaacgtcgaggcggcgcgcccgccgtcgtcgtccgggcggtgggcgacgccggagaccatgggtggccgagatcgcgcgaatcggggaccagaattggggaggagttggagcgcggaaaccctaaaacgacaaagagggggcaaattggagggagagaaagaaatgagaaatcgacgagagggcgggcagagacgcggagacgagcttcttttctcctctttgcgtttttgtttctttctttttatttttatttttttttcttatgaaatttggcggtttcggctccgtgacgcgccggctgccggcgcctgaaatgagcccaaagcctagtgcggtgccaggtggcctcatcgtctgaacccaaagcctagtaggaatgagaacttgggaagcgcgagcatttccgacgaaatcagcctctccaaccattcacatagctaattcctctcctgatttggctatttggtaagccagactcgcagttttttcatctacacttttcatttgggtctataacagtgagacctatgtatcaatccatcacttttttttttcggaaatccatcactttatttctctccttctccttcctcccacgtcccaaccactactccgtacctccatcctcaatgcaatatcctcccaagtgccaaccactaatctattcctccatcctcaatcctccaccctcggtagtagtggtgggagggcgaggacgacggcaacattaagcaagccgctacacttgcgtagagtgggtaggcgatggaggaagctagagttgaggatgaagatgtgtaagagggcagggagatgtatagataaatggccaataaattcaaaatcaatatttgtttagtagtaaaaagtaggccacaatggtgataaagctattagcgcatgattttatccattaaagctcaaatcctactgctgatttgcatgtattcctagagaagttgtaaagcctatatacttccattatcttaaaaataataataataataataataataataataataataataataataataataataaacaacgttattaataagtcatactacacgttgaattcaggcccaaagttccagttgaacccaatacaggcccagtacacatggataacaccacgtgcgtttaggtcttttaaaatacaccgaattgccgaataaaaaaagcgttttttcggcccaagtggcacagcgttaggcacgtcagcccaaaactgacctcaccgccgcacgcggcagcccaccaacttaggtcgttcttatccaacccaccagctcatcgcaagccagtactagtagttctagaacgttcgagaaactgaaccatcgcgcgtcgctgcagcggctcgccggtttccgagacgtgggcccacacccacttgggcccttgatgggccctacttggtccaaagcgagcgcggcttccgccactggattccagcgaaggacacgtacaccgcctcccgcacgtagggcccatttttgttcgagaaaagtgaagaaaaaagaagggaagggccagggcccacgaccatctcggcacacgtcgccttccaccttatcgtcacagcgatcgtcacacggcacacgataattttcgtcgcacaaatcgtcgcctcgtacgtgtggttcccttaaaaagggaaaacgtcgtacgcgaggactgaagaaaaggggaaccaaagccgttgcaattaccatcctcctctgactggaaatatcaacgacccctttctaaaaaaaaaaaacaactaatgccaacatttacttgattgatcaccgtgttttaccatagtttttgctctgaagctacgtggcaagaaaggacagtactgtatctctgtcacgtatgagccgtggccgcatagaaactcgaacattgtgacaaggtagtactgtacaaacttgagttgtggagtaccaaacagtatctggtcggtgacatccaaccaaacagctgttgatcctatctaaggcaagtagtactgtactagtactaaagtccagtacactggctacgtaggagtacacagcagcaaaggcaccagcaaaatctacgcgatgacgccacgtgacatgacatcgcaggtgaccgtagccaaagccaaagcaccagccgcggcaggcaggctggctttgctggtgggaaattaccggccactgaaaggaaacttgcgcccgacgcgtacacggatccgcacggcgggcgggcgagcggactgacagggtggccccacccaccccaccgcggcgtctacggtttctttctctttctctctctttttttttcttcttcgtctccgtcgcctagtcggcttcgcctccgcttcctcgtctcgtctccctccccctatttatccccgcccacccagcgccgccattttattcgcttcgtcagaactcaaaatctcaaattccagacttccagaggcgagcacaggaggaggttggaaaaatccatccatgggggatgagaaggctgctccgaaggcgggcgccaccgccgacccggtggtgctgaggatggagttgcattgcgccggctgcgcgcagaaggtcaagaagtccatcaagcacttggccggtacgcatctcggtctcgattattcgccgctgccgcctctcgtttctttctcttttttctttttgagccttttttggggggttcgatttggtgtctgggtgtctgaatttttgggttgtctctgggatcgcaggggtggagtcggtggcggcggacgtggcgacgaacacggtcgtcgtggcggggacggccgaagcggccgcgctcaaggcgaggatcgaggcgaagaccaagaagcccgtcgaggttgtctccgccggcggcggtggcgccgccgccaagaaacccgccgccgagcccaaggccgtcaaggacgatggcggcgagaagaaggacgcccaggcgaaagaggagaaggggaagaagcaaccgccagaggagaagaaacccaaagaggtcggtacacaagaggcaaccctaccaacgccatacgcatacgcttctctgctcctcccaactactcgtttgacctgagaactcaaaatgtctctctgctttgttgttacaggaaacggtgctgctcaggattcgcctccactgcgatggctgcgccgaccgcatcaggcgacgcatctacaagatcaaaggtgaggattttatttttttaattaatctttcctctgtcagtttttgtactactctcgttctgctgtttgttttgttgctttggctccaaaactgacgccttctggcttttgctatgtgtcaggggtgaaggaagtggtaatggacggcaatgccaaggatgaggtgaaggtgtcgggcacaatggacgtgccggccatgctgacctatctcaccgagaagctcaaccgcgccgtggaggccgtggcgcccggcagcaagaaagacgagaagaagaaggacaagggcggtgacgccgacggcggcgagaagaagaaagacgccgccggcggcgacaagaaggacaaaggcaagagcatcgaggtcgccggcccgtccaccgccgccgccgcggcgtccatggcgccggcgccggccgaggcgagcacgtaccacgtctcgccgtacggccacggctacttcgcgtacccgcagcagcagggacctccccccagctactaccagtactacggcggcggcaatggcgacggcgtgggctacgccaaccccaatgccggcggcgccggcggctactaccacccccaccccaacgacgtccctacctaccagccgccgccgtcgtacccgccgtacccctaccagctcgacatgtcgccggcgccgcagctgttcagcgacgagaaccccaacgcctgctcggtgatgtgatcgccatgtctccggcgacagagctcagaggccaatctgacgacatgtacataccgaggactttagacttagaagatcagaggcatccaccaaacgtgttgttatgctttcgatcaatttttgtccaaacttaccccttctgttgtagcgtcattttttttagatcaattcttgactggttaagcgaaatttgattttaactagagtattagcggatgaaatggactgatggagtgatgatcttttggtcgcaaaatgcgtgcctagtcagagatgttggttgaatcgtggactagttctgtcttggtcgcgttgcttttcatcaaagacgtggtgtttaaccaggcgattgtaaattaaaatatatgattaaatcttcgttggtcttgtgctgttcgtgaggggcaaagaaaagtttcctcaaacgcggagtagtttaattttctttcaaacgattcgtggcggcaaaattgatctcgttcttccccgtccgacgtggcgccgacgaggacggatagctacgtcggtgattcggattcggatattctcccagctctgtgtgtaagaagtcttctccgcgatattatttgatgttctctgtgtgctacctggttgcattgccgttgcgattaatcttcaaatttcagattattgcggcgattaatagttttataattgaagacacacatctttttcgatgtgaagctttggccatgcgtgtgcaggccgtcgttaccatcattcatatcccttttgacatttgagacagtaataaagggtcggtaaatccaaaaaccttttcgtctttactacgttaactctgattcgtagaccatttcagaacaactgcattttctgatctacctgcaacttgtgaaatccagaactatcacctcggcaatatttgtatacagcaattctagctctgtgatctacacatgttctgtgcaattttcacatgggaataagaaaaaaaataacaaaaatttcagcgttccagacagggagtcaacaatgttcatcaaggtcttcgttatccggaatgaaatgcccacgtccttttcgcccacattttgcaggtttggcgtgccacacggtcacctaccattgaagcaatccaaatcactaacacgcccatgtttgaagaacgcggcaattgataagagaataaagaaagcgattagactgcactagctttggaatatgaccgtattaagcatatttagactacgaacaattagtcccgggattggactacagggtcagaggggtatggtctctctccatggggacacgtgtcctgttcatgattgaaaccttcctggtgaattatccttaaatatcattttcttccactgtctaatctcacatggaaatcctaataatcattttgttcttatatatccgaaggttatccattccgatggcctctgctcttaattaatttgtgcagttcttttaatccctgatgctgttgcatcgttgatccgttgccaaatggaggaaacaaaacacacagcaaaactattttttttcatgctctgtttttgtcttcatacgtgtgcctgactaagaatattctcccaaatggcaattaaatatggcgttgattaactcaggcaacatgtcagaaaaacacggacttctgaaagctgaaacttggaaaatgttggactgcaattcaatttctggaagtagtggataacctaatcctgtacgaacaactgctggatatgaatctcttgtcggtgtgctgattttccattagttaattgaataattgagtcggtgttttctttaattatggtttggggcatgccgcattgccgccctgattacgcaaattgtttttatattttttgtctcgtgggtttacgaatcggaagaattgggttgtgtttagatctaaagtttgaatccaaacttcagtccttttccatcacatcaacctgtcacacacacacaacttttcagtgacatcatctctaatttcaaccaaaatataaactttggatccaactaaacacagccttggtctgaccggattgcaatgccggtcgttgtgcactagacttatttttttttaattttatctacattcatgttacattattcgataatatcataatatggcagcaatatggtgcttttatattttagggaaatgttaaaaataatatactccctcatttcctaaatatttgacgccgttgacttttttaaacatgtttgaccgttcgttttatcaaaaaacttttgtaaaatgtgtaaaactatatgtatacataaaagtatatttaacaataaattaaatgataggaaaagaattaataattacttaaattttttaaataagacgaacggtcagatatttttaaaaaagtcaacggcgtcaaacattttgggatggagggagtatgtatcactggctgtgaggataacatcgccatgtcattgggtcgttctgttctctgttccagcctcattggatgagaaacacattaatattcaaacaatatcatgaatactgttggtttggtcagcttgtcctagtcggatctttggacaaattgacctgaatcgagctggcaaccgtgctaattttcaaggaaatcaaaattttgaaagaaacaaccaaccgaccggtcaccggtgatcttatattcttatttgaatagtacttgcagaccgtcataaatcacaacactttggttgtgtttagttcgtgtgccaaatttttttagtatacggatatacatttaaagtattaaatgtagactaataacaaaacaaattacaacttttgcctgtaaactgcgagacgaatttattaagtctaattaatctgttattagtaaatgtttactgtagcatcacattgtcaaatcatggtgtaattagtctcaaaagatttgtctcgcaatttacagtcggactgtgcaattgttcttttttcgtccatatttgatgctctgtatatgtgtcaaaacatttgaagtttgaaaaaaaaaagttggaatctaaaagacggccaatgtcttgtaaatttaactgtctgctacgtttgcgcaatgcagtgaagttaagtatagttcaatgctcccatgttttttttttttttttttttttgagaaactttcatggaaatgtcactgcaactgaattcaggttctgtctgaattggattgcaactagacatgatccatgtaaactcccgcctaaattgaaaggcaatctttgcactgccctttaaaacctttttcttctttagctcaaatttccttttgactttcttctttcttctttatgtttccattttttatttacccgcaataaaaagaacaggggatcacttttcactagggaatctatcaaaaaacaagaaggaaagaaacaaagacagtttcagactttggtaagggcagtgggccttgctcatttcaccctttaatcacatgtttgggccttctttaatcccagatttggcactccaaacttgtccactttctgacagccatttccctgatggcaggtagcttctgtgtgtgccacatacctgcatatgctggatgagtggctgccaaccatgatcctggaccatttcttccattctttcactcatcctggcagcttcaggtctggtgagaccgtgagagtggccagatcacaaacttttggctcaagtgaccaactgaatctgaatgtgggtggcctgcaggtaagtgtcagtactaacttgcaaggccaacaatcaactggttactgatctgatctagtattgcagcacattattttcctgctaccaactgcaagatcgtcatcattcttaggcctgtttagattccaacatttttcttcaaactttcaacttttccgtcgtatcgaactttgttacacacacaaactttcaatttttccgtcacatcattccaatttctttaaatttccaattttagcgtggaactaaacacagacttatgccagctgtatggcttcgtttgttaattgttattattgttaactttgctgattacaaaagagtcaattcatgcagttctttctttgttttatgggggctacttgtatgaaattattgaaatctgtaatcaaattgcacacagtcagaaaccggtggttagaggccttggtcctgaagtctcaactgtacttccttgaattcgctagataaatcacagaagatgattcgacgcattaactaacaccattgagttcagcatcatgcatcacaacgaagagatcaaagtttcaattagtaccacacaatgatcttgactaacaataagctccaaaccagcgtacagagttacagacagttttatttggcgtgatctagactttgcaagcaacaatttgggcgatagagataagaagggaaaaaaacagaggcacccgtactaacacaaaatgtcagctgatcatgacgtactgtttaccttcctatgatctgaagaaacctcacaatagtgttaactgtttactgcgatacctcaaccatgcaatatataatttttcttttctagatttccactatgcttgtattccaattaaaaatactactatcttctaagattgaccttagttttggattcagaaccaccaaaatccaggattgaataaaataccacaaataaaatatatccctagcttgaccttacttttttattgtcccttcttctaccatgatgaaagggttgaaagccaaacaaaaaagaagtcctttaagctaaagttaaagaacaaagtggatcgcattgcatggccccccttgacacatcactttcgttcctctatttcttcagacatatcatcacttgtatcaggtttgctgcatacatgcaggagaggatttggtggagaaagtgaaagtggaagaaaaacattcttgcacgagcagagcacactactgcctgatgagtgttctttgcgatccaactttgtagaattgtaggtcaccacagacgctttacgcacatgtgttgttgcacgcgatgtcgcatgctttgatccagacatgaggagacgaaatgcgtccatccaaatttctggcaaaagtgtcgagggaagcatcgaagtttcaccatagtttacttgaagtttcgcaaattaactagctagaccttgcactttacagtgctgaaaaagttgtaaaactcgcagcggcttcacaattcagttaggaaaaatgaaaccggatatataggggctgttcagattgatactattttcaaacattctatttttttttgttaaagttgcaaaaaaatgtctacatctagtttgttttcaaatttgataaatacatatgaattccagccaaaattttgacaatattgacatattcggtattgccaaaaattagtaagatttatttggctacaatctaaacagatcttattttttggcccatgttatcaaaccggcccattccatttccgaagtagtatcacgtcatttctctcttaatatacaacaattgtgctttttctgcagctccgtcacctccctgtcactgaagttccaaagtaggaggctaggtgcagataacttgtgtcttgcaagtgtcatagatattgtcatatattcaaacaaaataattttcagttcacattttctcagtgctgcaaaaaatgtaaaactcgcagcggcttcacaattcagttaggaaaaatgaaacagaatatatagaggctgttcagattgatgccattttcaaacataccatttttttaaaagttgtaaaaaaatatctacatctaatttgttgccaaatttaataaatacatatgaattccagtcaaaattttgataatatcgacatcttcggtattgccaaaatttggtaaggtttatttgctacgatctgaacagaccttattttttggcctatgttatcaaaccggcccattccatttccgaaatagtatcacgtcatttctctcttaatatacaacaattgtgctttgtctgcagctccgtcactgaagttccaaagtaggagcagagaacttgtgtcttgcaagtgtcatagatattgtcatatactcgaacaaaataattttcagttcacatttttttgtggctgaaatctcaacggatgaattcccagaaattcggacaataacacaccattgtcccctgcaaacttctaagcaaagctctatgacttgacagttcgtgaaactcgtcctaaaatccaaaaccggccggaaattccaaagggggatttgacaggagtgataggcctacatgagcccaaatgcaaaaaggccccacaaataaattcagcctaagcccactaaaattctgtggataaaatcgcatctccgccgtgtgacactgacaccctgacccaccagtggggcccactagccagcggcaacgacctcctcccccctcttcggcttcaccgaccaaaccaacacaatcgcgcggatcaacagactcgagtaggggagagagagagagagagagagagagagagagagagaaggcgacgcggcaatcgatctgcccgcctcacctccggccaccgaccaccgccgcctccgcgtccctctgcctcacctcgacgccggctagcatcgccggcgatgggttgctcctcctccgtgccaggttctctctctcacacgtttccatcccccttttttagattagatttcctcgttggctatgtttcggctgcggatattgttggtaccgagtgttaggtaagcaggtgttgccgtgggggttttcaaattgggttcgattcgtggcttgctgctttggaaaatgggagggagggaccagcttttttatgctgaaagctgattggggataaatgttttcggtcacagcgttgatcggggcgaaaattcgcgcaatctggacggttttgaactgtgatttagtgaatttaagtcaatttgtgggttaattggaggttagagcagggtgtctgcacgatctctatgaatgggaggatcgtgtgtggatgtatgtgagtgggggctggggaaagtttgtagctggagtagaagaattagccattttccgccatttgttaacacatagcactgttttgtcatccagctcgaagcactggagggttgaacaatattagcaacgataactccgctactgattcaaaggacttgcgtgctaaggtttactgcacattttgccctttattactacaataatgcctctatatcatgttactagcagctttctttaacgtgtccatccttttgatgttgtagttggtattgcttggtgactctggtgtagggaaaagttgcattgttcttcgctttgttcgtggtcagtttgatcccacttccaaggtgattactgttttgagtctcttagtttcagttgataatgttattcttcaccttagatgcatgattcttactttcagaagttcgattgttttaaacttatttcctcaaataatttcaggtaactgtcggtgcatcatttttatcacaaacattggctttggaggactcaacaatagtgaaatttgaaatatgggataccgctggacaagagaggtacacatacagcactatggttttagcttcttccaatcttgggataatggcatgctgttggtgcattagaagcattggttttgtgagaaagttctagtagtatgtgttactgatttttacaattgatccatcttacgtgccacacatgcatatggtttttctcaatcaagaactcattggtaccagccaattttaggtatgctgccttggcacctctttactacagaggagctgctgctgcagttgttgtctacgacataactagtccagaatcatttagcaaagcacaatactgggtgaaggtatgctatcgccaaattatctgcttttctgatgtctggttgattgattactctttctatcttttactatgagtttgtattttttgcccgaaactgttctagtaaaattttatatcatactgtaagattgctgctaaaatattataaatgtgttgaagcttatgctcaaagattaccctgactagcgtgagaagtgtatataatatgaacacttgcatttaatcttaaaatgcaccttctagatttatttcatcaatatcaattgattcagtgagattgtaccatgtcgactattgtgaagtatgttatgtttccacttcttttttcaggtatgaagcactttcagattgttttttcttatattgcaggaacttcaaaaacatggtagtcctgatattatcatggttttggttggtaataaagctgatctacatgaaaatcgacatgtatcttctcaggtcagatcttgtgtgaagttgtagtaaacatagtatcacaatatgctgcaaaattgttttgacgatatggtgcacattctgaaggaagcacaagagtatgcagagaagaataatatggttttcatcgagacatcagcaaagacagctgataatataaaccaagtatttgaggtatgccccctagcatatgaagctatttgctttcacgatgtccaagaagcaggatagctaacaagagaacatgctattttatttcaaattaatcaagctgaacaaaaacaccaaagcttcaaattcatggaaatcctaactgtttcacccacccccttacgtgtaagcattgaatggacagctactgcgttaggccatcaatggtcatcatcatactaactcgttatggtatgatatttttccattaacaggtcaccgtttttgcattattaattaaaaacagaaagattcctgagttagttagaagaggtttggggtatggaagaacagctctaacctcatattaaactctcactaagtcactagcacatatatgtgtggataaacaatctcagcacaagaatcagtgattttctctgatctcgcctaaggatcaccacagatagggacagcctaatgtgggcattttaacaacaaagttcaactctacacagcctacgccctacggataaacacttcgttgcattttcatcagtcaggttcctggacattgtccacatgcactgtcaccttcatgttcttttcctattgatgtttttatcctcttatgtttaaatcttttgctacactacatagctgggaaaagaaactttgtgaacgtcgtcctcataacttgatcatgttccttgtacaggaaattgcgaagaggttgcccaggccaacggcgtcttgataattagcttcggtgtttgttgaagtggaacacatacaagctggtaatgtgcatgtaacatgtctgtcagggcaaaaactgctgtatggtcgattgtttggaaaacaaaggatactgtacagtttatcccattgtgttcaatcgtatcgtattgtatatgttaatagtgccgtcgtgtaacatcttagtttactaaaacaatctaatatcggtactaaaaaaagttgcttagttgctgtgcctgtgtacacccaccacaccgaagtttcatctaaacaagtactccgtgtacaattgcagatggctaacctcaaacagacagaaacttttgccttttacgctctacaatttgtgcagtataatgaattaatgccacgatcgcatacgaacacgggacactttccttacaatcgaaggcagcaaaagatgcgaaacttctcttccgagccgaacacatgctcctattcctgcacgagcaggcacaagtgaacaacaactacctgatacactgacatgtcgggcccacactctctcaactcggcacggggccccctccatcttccgggacccacctcatccgaactctatgtcgcgtgggccacgggcctcgtgggacccacatgtcatggacctccggggactcccgaaccgagcccaacccgtaggacggtaggaggtcgaatcccaaaccccttcggcaagaaaggagctatttaaggtagactaatcccctcgtcttcccccacaatcacttctccccccggaatatctccgccaagagaagagaagagacacccaacaacccaaaacctagcgcctctgcgctcgaggcccccccgaatccgcgaatccgccgactcccatggcgagccagggagagccctcctcctcctccgatccgtaagtttccccccttcctgatctagccttttcgatctggtagattatcgaatttttgcgatttttttgcgatttttttgggtgattttaatgttcgtggggtggtggtggtgttgtgagcaggaaggggaagaaggatttctcgacggcgatcctcgagaggaagaagtcgccgaaccggctggtggtcgacgaggccaccaacgatgataactccgtcatcgggatgcaccccgacaccatggagaagctccagcttttccgcggcgacactgtgctgctcaaggtttggggatccttgcctctgtaattcttctgttaagcttcaattgcgagggtttgaaggcctaatctgtggtgcttgtcctggatagtaggaactgatggtctgaattgtgaatatgtatgaaaaaagaacttagctttcttgtctctaagcttaggtttgtgtgtctactgttttgtagaggataaattattagtgaggttgaatgtttgctactttctagtttttgcccctgatgttagccttggtgtagattatttattcagattacatatggttagattatatgtattcatgactcatgactctttagcttccttagtactaggttgttacagtaattatgctgtgataagtgatcctctaatttgattgggtacagcttacaatctgtaattatgtcaagattattgcagttaacttctaaactgtgatggctattcactaggtagcttcacaacagtacttatttagttttataatgccatgaggtcgggaacttgggattctgttttgcattgtatgataattcttgtgtcatcaaggcatattttattatttgctgctgacattttggctcactgcatcacagggtaagaagagaaaagacaccatctgcattgttcttgctgatgacacctgcgaggagccgaagatcagaatgaacaaggttgtcaggaagaacctgagagtacgacttggtgatgtcgtgtctgttcatcaatgcccagatgtcaaatacggcaagcgtgtgcacatacttccaattgatgatactgttgagggcatcaccggaaacttgtttgatgccttcctgaaacgtaagatttctttatcactgaagtattttgatttttctcttatagaaggttctagatagagaattttagagctttgctgccatgttctaaaacagtattagccatttcatttgaacttgcttgtttgatacttaattatgtcgaggaaagtttttgtggctcctaatttccatgaactgtagtacctatattacgatgtacattataacattaactacattgttgctaatattatggcaaatattcaaccttgatatgtttaaacgtgctcttgcaacctctagtgtcgccttcttacatcctgctgatactgtttttatttgtaacttttcagcgtacttccttgaagcataccgtcctttgaggaaaggagaccttttccttgttaggggtgggatgagaagtgttgaattcaaagttatagagactgaccctgcagagtactgcattgttgcacctgatacggagatattctgtgatggtgagcctattaagagggaggatgaggaaagacttgatgaagttggttacgatgatgttggtggagttaggaagcagatggcccaaatcagagaacttgttgagctcccattgcgccatccccaacttttcaagtctattggtgtgaagcctccaaagggcatactgctttatggaccccctggctctggaaagaccctcattgctagagctgttgctaatgaaacaggtgctttcttctttctgattaatggcccggagattatgtcaaagctagcaggagaaagtgagagtaatctcaggaaggcatttgaagaagctgagaagaatgcaccatcaatcattttcatcgatgagatagactccatagcaccaaagagagagaagacccatggagaagttgagaggcgcatcgtttcacagctgttgactcttatggatgggctcaaagctcgttcccatgtcattgtcatgggtgctacaaaccggccaaacagtattgatcctgctctcagaaggtttggtaggttcgatcgggagattgacattggtgttcctgatgaagttgggcggcttgaagttcttcggattcacaccaaaaacatgaagctggctgaagatgtgagttatcaccactacagtctagatgcaaaatattctttattggttgcatttttttttaatagttattacattgttgtcgcaggttgacctggaacacattgccaaagacactcatgggtatgtgggtgctgatcttgctgctctttgcactgaggctgctctccaatgcatccgtgagaagatggatattatagatcttgaggatgagaccatagatgctgagatacttaactcgatggctgttacaaatgatcacttcaagactgcactagggacaagcaacccgtctgctctccgtgaaactgtgagtatttttagtatgatctatttgcacattaccaggatctattcccatttgtttccgaggcttacatctagctttccttttaaattcaggttgttgaagttccaaatgtctcttgggaggatattggtggactggagaatgtcaaacgggagctgcaggaggtacttattgctcttttctttcctcacttatgagttcttatttgtggttaacatactttaaaaccttgcagactgtccaatatccagtggagcatcctgagaaatttgagaagtttggcatgtctccgtccaaaggtgttctgttctatggccctcctggctgtggtaagactttgttggccaaggcaattgctaacgagtgccaggctaacttcattagtgtcaagggacctgagctgcttaccatgtggtttggtgagagtgaggccaatgtgcgtgagatttttgacaaggctaggcagtcagctccttgtgtcctcttctttgatgagcttgactcaattgctacccaggttagttatctcttctgaacaaacgatttccatggttttttcatgataatctttatggctgattactttcaaccatatttcagagaggaagcagtgttggtgatgccggaggtgctgctgatagagtgctgaaccagttgttgactgagatggacggcatgaacgcgaagaaaaccgtgttcattattggtgctactaacaggccagatatcattgaccctgccttgctaaggccagggcgtcttgatcagcttatctacattcctctgcctgatgatcaatctaggctgcagatcttcaaagcttgcctccggaagtcacctgtggccaaggatgtagacctgaatgctcttgccaaatacacccaaggtttcagtggtgctgatattacagaaatctgccagcgtgcatgcaaatacgccatcagagagaacattgaaaaggtaacataaatatcttcaatattatttagttattaattccaaacatacttctggcttatgcttgcgtgctaacggagacttgattttgatttcaggacatcgagatggagaagcggaggaaggacaaccctgaagccatggaggaggacgaggttgatgatattgctgagatcaaggcggctcacttcgaggagtcgatgaagtacgcacgccggagtgtgagtgacgccgacatccgcaagtaccaggccttcgcccagactctgcagcagtctcgtgggttcggcaccgagtttaggttcgctgaccagccagcgtctggcgccggcgccgccgctgaccccttcgcatccgctgccgccgcagctgacgatgatgatttatatagttagatcgctgtgctatttatatttaacctccgtgcttttgttcagtatgtctatttcgctttggtaaactttatcatatgtaacatacggggaaacagtgtactatttttaagttaatattttgagaggtactgaaccgaattgcatgtttctgtatggatgtgtcgtggatgagcatggttgcgggttgtattcatcgattggagcatggatagatttgcgttgtatgtttgtgaggtttatagatgctcctgcaaggctggaacttgttgaagtttgtttttatagtgttaatccgaggcttcatttggtcggcgagacaccaaccgacaaaaaaaaacaaaggtcagagggcagacataagttgacataagagattactccgtttcttgataattgataatttcggcgttgacaactaattgcttttgaattgttgagaccaaattgaaaatattttgaacgtaccacacatctataacattaccattttgtactgtttgaaaatattcaacaaatatatgaaacggatacaaatagtccgatcaaaactatttgtaatgcgtagatttgtccctaaaagtacttaaataatatcacagattcattggaattctaaaaattctcaaatcttctctcgcattctctcctctttacctcctacgtaaagaaacatcatttactcccacttcatccatcaatactgtcggaaccagaaaagcatgcataacacggtgatgccatctaattaatactctctccggaccgataatacttgtcattttagataagggtgaggtccaactttaaaatctttgattatgaatcatttttaaaatcattatctttcaaatatggtgattacatgtatagattagtcttaaaaagtattttaataaaatcatatatttgttaacacttttatatatattataatagaaaataatggtcaaagttattttttggagaccgtgttcttgtctaaaacgataaatattattaacccggagggagtacgtaggattgagcaaatgcacattctgctattacatctaaaagatttggcgcaacgcgcgttttgattttacactcgatatgccaaaattctgtcgtgctcatgtagacacaatatgagcacgccgatatatcgtttgtatgctacgacaaaaaaaaaactactttgcctcgcccacaaagctcagctctcaccggatgttcttcgctttttctttttccttttttcagccccatctgacctatccgatcgtcttgattgttcctgcctgatctccatcagcttcgctcttgcatctcggaagggagcatctgatctcatggccaacaattcctagcagaagagggatttcacatcaaagttaagaactagtagcaagagtttttgatggaaaaggagtttttgatggaaaaggcggaatcttacttttatatgatccattgcagcaaggttgaaacctatagcatccttgcattcctaaaggatgaacatcacataaatacattaccaggttgctgcgaaaggtataacgggagataacaaaagtaaccaaaagttacctttactctactgtaaagaatgcctttcagttctgtaagtatcgatcttgcagatggtgtcgtagttaattggctgtggtgtgtttgaagcagcactaggcaaaccctacaaacaagctcaacctgcagcgtacaacagacatcaggatttgtgcagatgagggtatggaacaattaggtcaatataaaatagagtaacacaaacgtgtggaactgaattaatcaacaaaatccatgaagccaccagtgatgacccaatatctctgtaattttttaatgtaaacagtagcttaaacaacttccatgaatcagcgtaaacctagccattatggactacacatttttttacgtcctgggtattcatgcacataaaaaaactcacaattttgaacttgaagagagacagctagactgctagttatgaaatggcttgtgataggaatggtgcgattctagctgagaacaaagaaagtggtttctgacaaacaacactcgaaaactcgcagtaaaatgaactagaatggaatgtctattgcagtcataggattggaaactgagaaagttgacaggtaaattacatttatgacataactagtatagagagcaatgaagtactagcattttaccttcaaaggaaccatagaccactcctttaagtaagacatgatcttaagtgcatctgagaatggcaatgactgttgcagggaaaacataaatatataatcaaatgatgaatgattaatatacaaggatgaatctgtttagtggttttttaaatatgctaacgaacacaatcaatatgcttgacaatatggttatgtactaaaacaacaaggccagattgaacaaaatcaaagaattgtgttctatactaccccagtagggcatgacactttatggttccagaaagcctttcttacgtgtgcagtcttgttgaagttggaattcatcctatcagttgaattttgtttcctttgcaataggggcaatcatgggccactttggattgatgccaaaatgtgccatgccaatttttttggtagtttgaatagtaaatatgatggtttggtttgaagccaaatggatggtaatgcacatgcttaatttggtataattctaggactttcttcaccataacataaaatttggcttctaattggtatcaatccaaacacattacttagaactccaccctaccaaattattggtagtgccatatgcctagattttggcactaccaatgttttggtatggcactaaaccaaacaagccctatatcagtgagtttcatccatatcttccctaaaaaaaatctacaatataccactcacagcaaggttgccagatggccctgggcccacatgtcagtggggcatcggtggaatacgtggacattagatgatactcaatgcataaaatggatcaccacactacaaatattggctagtaatttactataacaacaaataattgatggtggcttttccctgaaagccgttctgtgagaaatacaggacaaaactaaaggaatgatgtcatccattagggaagataagggaaaaacttacaaggagagcctgttccaagtcatttggacgaacatttgaaactacattcaaaacataatccgatggtgactgcccttgcattataacattgggttgaaatgtagttccattcccattattttgtccttcctgaaattataataaatgtatagctgaagtaaatattccacttggtgagtcatcatttaacagcagtaacagaatagcaacaagggttgcacattatgtttttagtttcactttttaatacctggtgctgatcaaggcgttttacttcttcctcggcagtgtcaagtgcatcaataattgcatcagcagcagttactgtctctttggttttcctaccaggaacacctacagaaccctcatcaggagcaccatctttttgcccatacttgtggtccatagcactatctaaatcagcctcgaaagtttcctccaaccttttctcttgctcttcctgcatttatttttgtgggtttcagagctaagaaaaatctaagcaaagatagcaaacattcaataacaggattccattaaaacaatacaatcactgcatacctcaatgaagagttgttcttcagtacgatcccaacgccgaatagagcggtcatgagaacctgttacaataaaatcaccacgactgctgatggcaagacaccaaacttcagcatggtgtccttccagtgttaacaacaactcgaatttatcagcatcccagtactttacagtgcggtctttcccaacactgaacatataatgtgttttagaaacaaacttaacatccatcacactgcaaattgaacacgtgagaaaaaggtgtaaggattgtgccaacagtcaaatcacaaagaaaacaaaagggcaagaaataacctgtccgtgtgggcaaatatagacttatggcagtcaccaaaatccataccccaaattttcaaatttttgtctgcagaaccagtaactattagaactccatcggatgatatatccatgcagagaactggaagtttgtggccataaagggtaagggcaaacttcagtgagtccatagtgaagacctgcaaacacacagcacaagatgttgaggaaattgatgaaatcaaaaacttaattctagattgcatttttatttccatgtttgcaggatgccaactggcacctcaagatataaaaaaagttcagtacaagtgcttactgcgttaccaagtttgcaggatgccaagaaaatattaacaataatagctttgcccatataaactgactggcggaaaatagatatttgcttatgcttgtcctgttctaaattagaaaactaaaaattttatggacaaggaagtaaagaatcatgctctctatctatatacacaatacataatcataaaaataagccccaaatttgtgttcacataaaggtccccactaaaaagaatgtagttcattttctagagaagttcaaaaccatacaaaccttgactgcgccatccaagagagcaacagcaatatgattcccagttggactgatggttactgcaaggacatcgtcattcattttcaaagttttgacatttgttacgctcagctgcttagagtcctggaacaagatgagaaaacactaaagttattctaaaagcctatgcagacgatatttatgatgcttatcagattaacattgaaagttcaactagaacagatagatcgatgatcttgcgcattcattacatcaaaaacagtgcaacacaagaaattctttgacattgaatttttatatttctgtgtaacatcatttagaaatttggcaaaacatgcctcttcatgtggagaactggttagtaaacttgcaggcgcaaaataaaccaaaagaatgtcattaagagatgcatcacaataaattgttgttcttcttggcatataaataatggagacttggttaagaaaaacagacacttctgtagagtcataggagaacagacgatgccaagggattagacagaagactcacattatcagatttctgcatcaattggtattcccagaacttgacatcatgatcagcacttccagtgacaaaaccccatgcaccagcagttccatcctcgtttggaatgagtacaattgatcgtatggaaccagcatgagcttctataacctcaatagagcttccactattaatatctataatctccaaagtaccactctttgtgcctacaagggcataccgatttccaggaacaaatgcactgcacaatccataatcagaatcaattgtccggagacagtcgccagtactaggattccatatcttaacagcattgtgacttgttgacatcaggaggttgtcctctgagttaagtgcaagactcctaatatcagaacggtgtccatgcatctcaatggaatacatattcgacacattctcattatccactgagtatgtctcaagcatgttattattcagagatagagacaaggtggcaaggcaaccttttggtggattgtttggagaaaatgcgacagagcaaattttcttgttaacccgcaaaacatggagaagcttaaatatatcggtgacaacaggagtgggattctgcaagtcttgagccgacaaaggatctataacagtaccattcccttcagcagccatggatttggccaaagccttctccttctttctgtgcatcctcctcttggccttccgtgctgcctctgtttcatcaagaaccctataaatatccaccgtcttcccagccacctggcatgccacaagattaccgttcttattgaacttaacagtcgctaccctttccttgctttgccttggaatctcaccaaatagcttcagcatatcccacttgctccaatcctcaccctcctcagcagatttccggaccgtaaacacccgcagctcttgatcggccgacccagacaccaaaaacctctcgctgggatccacatcaattgaccatatttcactgcggtggccaccaacaatctgaaggcagtgctgcgtgtcaaggtcccaaacccggattaacttatccttggagcagctcactagtttcttccctgaatccagaaacaccaaacccgtgacctacagcgagtaatcgccagattagtatgactgaactttgctacccaatagagacagagaagagaagcacaatgtagtatacctgatcacggtggccacggagtcgataaaggccggcctgtccaactacatcccaaaggataatgtcacagtccttactgccagaggcgatgatggcgccagaggggccgaatacgagggcggaagccgcagagcggtggccatggagggtcgcctcacaggagccggtctccgtgtcccatagcctgatgctcccatcggcgtgcccactcgcaatctgaagcaaaccaacacagcgcacgagatgatgaaaccagctcaaaatgcggagagattaaaccgcaaaaggggaaagggaggaaggttcagcgtgtgataccgaggaggcggaggcggaggcggcggaggggaaggtggcgaggcaggagacggcgagggagggggacggggcggcggtggcgaaggagagggaggggaggccgcgcttgaggtcccaggcggcgaagcggtcgagggcggcggcgaggaggaggcggccggaggggtcgtacgcgacgttggactccggggaggcgaccacgccgaaggagatcgccggctcgtaccggaggtaggccttcaccatggcgcccggccgccggcggcgtggtggaggaggaggtggagtgcgtcgctgcggttagggtttatggcggcgcgtgcgacttcggtcaaggggggtttaaaagccaacacactagacaaaaaaaaaaggaaaatagaaaaatagatataaaagagtaaaattcataaaaatttcgaggcatatctaacataaaacctaaattattataatttttttcagtgaatctcagattttaaggtaaaatatcttaagcttatattattgtttttaatatatttatgtataataattataagataataataatacgagatattgcagagtacatatcatttttttcgattattggtagtatcattagtttttatatatataagcaaccggttatatatttgtattgtgttttttcaattgtataatagtaaaggaaaaaatgaattatgccggagggatgtgtattttgagcttaataatgtaaatatatacttaaaatattataactattaatgaaattatgagcatgtgatataaatatggggattcttcaaaaacattttctcttagtatctggtattttctaaaataaatcataatatatgggattttatattacatagtactccttcgttttatattatcgttagatttttttccttagtcaaagttatatatgtttgactaaatttatagagaaaaatagtaatatctacgacagtaagttagtttcattcattaaatttaacgttgactatattttaatacaatatttgttttgtattataattcttagtattgtattttgatacaaacttaaattatagaaaaatgattaaaaaattcaatcgaggtataatatgaaactgaggaaatgtgctttaaaatctatagtgttttccaaaatttactccagataaaaagtcacacaaggggggggggggggaaatctctccatttgccagtcgccacatctccctatcgtctccgccgcaagcccgcaagcgaagatggcgacgccggcgaacgccaccacattctccggcgaggtgtgggcggagctccgcctggcggactccagcgacgtgccccacatccacgccctcatccaccagatggcggagttcgagctcctcaccgacctcttcgccgccacccacgagctcctcacctccacgctcttcccctcgccgccgcgccctcccttcacctccttcaccgccctcatcctcgacctctccccgtccccgctccccgcctccggcccctccaccatcgcctcccactgcctcgacctctccgcgtccccgctcgccgacccggaggccgccgccttcgcctcccctcgcggcggcgggcgcgtcaccgcgggcttcgtgatctgcttccccaactactccaccttcctctccaagcccgggctgtacgtggaggacatcttcgtgcgcgcgccgtggcgccgccgcgggctcggccggatgatgctgtccgcggtggccggcaaggccgccgagctcgggatggggcgcgtggagtggtgcgtgctggactggaacaagaacgccatcgacttctacgaggggatgggcgccgaggtgctcccgcagtggcgcatctgccgcctcaccggcgctgcactcgacaagtacaaggggaaccaggaggaggggggaggcagcaaggcggcggagtagatcggccatggatggaaacgtcgattcttggctgtccaatctcgagtgagtgattagtgataataaaggtagtggattttggttccacttatctgctccttgtggtgatgtatttcttgatagtgattcagtgcattggatcggttcttcattgctatgaattacagtgatgttttagcttgattatgtcatgaacttgatctgaaacatttcggtatcaaattcttgattgaaccacactgatttcggtatcaaatttctcatagggtgtccaagttgattcatcagagttcagtaacacatggcttcagtgcaatttgcctcccatgtcttattcattatcatctaagctattttcatttgtgtcctgaatccctgatgcttccatcctggcaaggaaacatataaaagaaaaatggaagaagtggagtaaaagctccaatggtatatgaatgtcttagctgggtcatgtattcatgttgtttaaagatgaacgaaaatgtatgtgactgcggcacatatgctactaaaatgttacacatcatctgaccacaacacagatattttgattaagacctgcaactatgtacaacagaagtaggagctgaaacaacgctcctgggatgtgttgaacagttttttacaattactggaatctacattgtttctaggaacatgtaatttcttcccagattgagtttctgaagcaagatctttctgcaaactgtctagtaacagtatcattctagctggattggcttatacattcatctttgttcttgtcgggaccacagccatcaaccactgtttgacgaaactgtattatctaaatgatgattgaatcggatgcatattgcatgaggctttagggcctgtttagtttgctaaaacaaaatttttggacgtcacatcggatgtttaaccgaatgtcggaagggattttcggacataaataaaaaaaactaatttcataactcgcctggaaaccgcgagacaaatcttttgagcctaattaatccgtcattagcacatgtgggttactgtagcacttgtggctaatcatggactaattagactcaaaagattcgtctcgcgatttcccccctaactatgcaattagttttttaatctatatttaatgctccatacatgtgtccaaagatttggtgtaatgtttttgagaaaaaaatttgggaactaaactaggccttaatgcaagctgtattcttgttcggacgtccagttagtcagattggttgcaaacatcgaaatccaattgatgacagtataaggtgcatgtaaaattgatcagcaaagacatttaagccaaaacgttcttgtataatctactacacattttgaccccaacctgtatggcaagttttctatcataaaattgaaatattcaattctatcatcctgaaaactttgcgagtaggcaaaaatcatgagaagaggtcacccgccggtcagcccattggtattttctttctttcatgaaaagaaagtttttcttccgtaatccgaagatgatagtatgattaatgattctactagtaattgtgatcggacggtggctttgcctttgctcgccttctttcttcttccctactccaaggcttattaccgcctctttttcctctccacgccttgctgctcagcttccttctcaagaaaaacactaccctataaaatgtaaacgacgccacctctcccaaatcatcgtagcaacagcgacagccaaaaaacatcatcaaaattcttcggggggagagagtttgatggaggagaagggtgcggaggcgatgacgcagaaggcgccggagaaggaggcggcggcgatggcgtgctaccggaggacggtgggggaggaggcgacgttcaaggagagatccaaggacctgttccggcagttcaaggacgcgccggcgggggatcactgggtctgcctcaagaacaaggtccgcgccgccggcgagtacgccaccctccgtactcgccagggcatcaccatgttcggcgagccaaatgtcggcgacctcttgggaagaaccaaggatgacgactccaagaagacgccttccgcgtaaattatagaccaagattgagtggagaagcagtagcattcttgagggcgaaccatctaagtttgttaataagtgttctctctatggttaaatgattgattagttcgagttttactccgttcgtgttgattagtccaggctttcgaggtgtaatagaatactgcaacaatagaagtgtgtttctttttgttttggttattttcccttcaattcatcaaggacacgctgaatttcgcctcccggcttacacggttacacctataaaaacatctggatgaaagcacagttcatataccatcgcccaacaacaatagttgtcatatcgtaagccatattattattagacagcaatgtgctcactgagaccatgagacattaacacatttttcaaatggtacttggaagttatccaagtgatctgtattcataaactttacggactgaagaaagaatgaatgatcccatgtaaatgggaaagatcagctgcttatgaaaatctacgttgatgcatcagggggtacaatccttaacccccaactatttctctactttctacactaaacacattgctaacgaaggaacaaacactaggcctatcagacgtcaggtggttaaatacgtgatctggtacaacaagcatggcctcaacagctagagcttttgcccccagctgtgatcactcatcagtaacatgaaaagtggcaacctatcaataatgattaaacttctttctatggcgactataatctgagacatatctgaaactctggccacagtcaggagccgagcacttgtacggtcgctcgcctgtatggactctgatatgctcagtttgcgcccacaaccacttgaaagtcattggacaaccatcccaggggcatttgaatggcctctcatctctgtgtacacactgatgacgcttcaggtatttgtgagagctgaagcgcttgccacaagactcgtcggtgcagatattgcgttggtgagcacgaagttcagctttagtctcaaatgtcatgtcacaaaattctatgtcacactgaaatgcttccacctttgccttcttcctcttatttgcagttgaagcttctgcagtttttgtttcgtttgtcatgtcttcaacaatcgcaggtctagtccttggtctcaagctttcacatggagagcggacaaagctccccaagctttggggactattaatattgaactcagatccgctctttcttttgtgtttgcgtctggcataacatatgatatttgttctgtttgaacttccaatgcttctagacactatgtctgatgagcagaagccatgcgacggatcagtgatctctgcaacttcatcctgagttacatcatctgcagattggtcattgccagccagtgtcatcaatgtcaaggaagctttgccaacctcatcctttccagaagagaccttagattcatcggctagaactccaagtaaaatatcaattgaatttgactctgtgtgcatggatgttccattttttctgggaattgcagttgttgaagcagattgcgcaccttctgaaatgatgaaatcactgcttggagattcatgaggtaattgtgtggtatgaatgctattgagcttagcacccttgacatcagtcaaactggccacaacctcagcctttgaattatggactgcctgcaactcactgcccatcaaatcatgagccatagacagcttttcgcttgaaaaggcagcatcagtggagacagggcagtccaaggtcagactgcaacttctgtcactgctagaaatcatctggtcacagctcgactttggtgttacaagaacaacactacgatcacatgtttcaggttgatcatctgtatcaggttcgctgttctttaatacagtgtcagaacagtaagacgtattaccacagctatcctcattttcaagggttgatgatgctgcccccccatgtaattctcctgcaaccaattctgtgttgggattattacaaagtaccatggccaactgatcttgttgaacttgcaattgttcatctttgcacactgaagttgcattgtcagattctaagtgctcatgattacttatgaagttcatgctgcctccctcagcgataagcccattgtccaggaactgttttacagtactcaactcagttgattcagcaccacattgttctctggtaggtttgccagctgacactgcaacagttgtgggtgaatcctgggaatcaaatgaacagatagggtcatcacatgcactcacacttactggacgctcacaaacttgatgcatcataggatattcagcaacagcaattggaatattaataagagaatgtccatcctgatcattcaccttgggacgcttgcacatatcagctacatcattggattcttgcaggacacaatcttgttgcagagtttgttcacttccaatgttttcatgagcatttccagaagtgtctatctgagtttttgtaactgcgggcttaactttgtctggagttgccacaacatcagggctggaagcataaccaatgaccttatatggagtccgtgctttcctgcaaagccatttcaagtttgaaacaactgaaataggtgatggcttggaaaataatccccaaaatgataaaggaggctgttcttgactctctggtgtttctttcctaatcttggaactatgtttgaggtttagacccatccgtgatgtccaatctgttccctcttcctcatatccctcatcatcaattgaaatattaattagatgcaaattagacttggacgcatttgctagtgcaacatctttatagtcaaactgaaactcaatttcctcagctattgatattgcaagtgcttttagtttgacataatctgcagataatggagggaaaaaggttatcactgaattcaggggacaaattaatcaaataatcacagttaaaacaactacattgattttcaatcatgatttaaaaagttcaagatatttggaaggaatcaaaagggcccataatacttaaatcccctcggctaatatctcttattttcagttaacttcagctgacaaaaacatgtcaaataaacaataaataaaattccacatccagtgtgcaggattaatacaatctacgggagttacattgaatgtgacaacagaagtctgcatcaatcgtacctgcatggcatatgatgagggcatgaactccacctttgctcgcaagcaactcctcaatctcaagggcatgttgtaagcaaaagatccgaggccgtgcaaatgcacagcctgtattccagctgatagtttcctcactaccttcgacatctggtacattaacatcacctctgcctgattgtttactcaactctgagccagggcaatcacttggtattttcttctcaggggtttctgtgtcaccgtaaggatgaatggtattttcactgctacaagaacaggaagtgccaatatgtttccctagggttccattaaactcctttcccatcaaagaaatgtcacttctaattggcttcacatcctgatgactgaggttagcattttccacagggctggacgatctattggcgatgagtgggcatcctgatacatgggggagaaacatttgtcaagtttttgtacatgaaaagaaaatagaacaaatcattaaagttgaaacatagaagatgctcaggatgatggatggaaacccatgcacttcagtaatacaaataccaagagctcagctagacaaaagtctggctatctctaacttattgacgaaaaagacagttatattaatcttgtgtagtaatcaagcaacaacgcacactgtacaataaaaattatggtactaaacctagttgcaggcataacataaacatttgagaggattacagatttgagtccaaatgatcataatacccttgtgtgcattattatacgttgctaaggagtcgacattcattatcctccaataaaatatatgttcaagtgtatgacaacagttccctcttgccgaggtttatcataacaaaagaatctgcctcactgtagctcactgaaggccactagaacaacagcaacgtgaagtacacacactgggaacgcaattaatttattggacatagaaaaacaagacacttgaagaatatctaggtcttatgaaaaaaaaagatctacaaccatcatacaaattcactttatttcctacatttataaataaggaactaaaacacaaaatcttcaaagataataaaggcataccggagctaccatcattaggagagcacggaagcacatttgaacaaatctctttttcacaactcagtttatatctttccttatcaacaagggaaatttcttccagtgcttttctggaaggttgcaaaatcgccataaatggatagccaagaatcccacatgcaacacatgtcaatgaaccagaatcaatgctcaaatcaaaaggcaggtcatctccgtcatcggtatcaagcttttctccctcaggagcttgtttgctatccatagacaagcctttagattgtgtcccagtcatacatgcagtaccatcagatgagctgtcatcttttgagctggattgggtagatccaattctgggaccatcttcacccttcttttcaggagcttttgagcaagacgagcaggggtgtagagcggtaagcgatggcagcaagtcaggctcccatagaacaacattatcaaccgatttttttccaagaaatgaacatataagttcattttcactaatcatatcctgcaagaattcctgtttgaccaacagttctcggtcttcttttttacgatctcttagacgagaagttcggattccagacagtagttctctagggttcctgaaaataaaatgaatccagcagactcataagtgtgtgctatgataatgatttagcatacttgttaatataaatgggcacagaaagcattagaggtaatgattaaaatatacaatcaaatgagtgcttcaatattaaacacttcgaataatcaatgaaattccaaaacacaaggcaatcatgtgagcaacaaatgaacaatagaagctttcaaaacaaaatgaacaatggataaaaaaggcaagtaatttgtgtggatgcagacagccaacattctgcttgttagcttctctttggggagtgaatattgatggcttccaacaaacatggaattgttacagtggcagaatccatagggatgtaatcatcagcacttacttccatttcttttgtttcgataaagcatatattttggaccttttggcttcttctgttgtttcaattgtttatcatttcagatttccatgtccgaagatataggctgtgttcggcactgttcccaaaagaacagtgctcacggaaaacggagcgatccattagcgcgtgattaattaagtattagcttttttttcaaaaatggattaatttgattttttttaaagcaactttcatatagaaactttttgcaaaaaacgcaccgtttagcagtttgaaaagcgtgcgcacggaaaacaagggagatgggttgggaagaaggggtgccgaacacagccatagtcagttgtaacttattctggtaacatctagaatggtcagttttaatatatatatcaaagccatcttccctcctaggcagccaccctagaccctcctaggtccaccttagggtaaattaggtgctaagcactgatctgtttcccagctagagcctgaaccttcgcaaacacttgttcacatatatgatacatctaaaaccctttatgagttcttactacattggataactatcccagagagtaaccttcaatcatggtgtcccatctactataatccagagagcactatgctacaaataacgtaaaccattgccagattcaaaatgtaaagcggcaagctagcaaataccaatttatgtaaaacataaacaacttatgcaaaatatatgtatgaaggtaaaaaaacatatacaacttatcatcaaaactgttgtgcacaaaaaatacatatggaaactatgaatgcaaatttcctattccctagggactctagaagccttagcttcccatatagagttgggcaatctagaatccaaggtgacttaagagaggagaggagagagagtacagcttaggggaggggatgagggagagggtggagaaatgggctcatggactgggtagcgggtgggtgtagcggcttgagtgggttttatgcgctacattttccatttgccgtttatatttccatctgatatacttggaatataatgtgatttagttgaagtctagcttacacctagcattgtggtgatcctgtaatgcggcgtctcccaggagcaccatgacaacttcacctttgcggttatgcgtaatccttctgtatggcagacctaacaagcatctaacccctacccactagctgtagcatttggtttgttggaggacaaaggtaatatattttgtttcatcaacctattaatgaggtgcaaaaactaaaaagacactttggacagcacaaaaccaaactccaaaaagaaaaagaaaaaaaaacctggatataaatgaaactgctagcaagtacaatagttgttgatgggagagcattggaagataattcatcacagcccttcgaactgcagcctctttagcaaacttcaaccattggggagtcgcaaaattggcagcttctccacaattgaatcctgtattatattacacgaacattagagttgccgatagcatgcatagcaacaaaataaaataaggaatctactgaacatgacatgctgctgactgcattggatattcagtttctacaacataccacaatctacaaattgtttcttttggttccacaaagtaaatgaatctcatagataggttgactctcagatataaagtgagatccttaagaggatctcaagtgttccataaaactatgaacgcaaataggttaatacgaagaagcttgaattcttcaaaaaattagtatgaagttgaaaaaaatcaaactcaccaaactagttaagacaacggtaaaaggatcaccataatcttgcttcaggaaacaagtatgaaagagtaatttgttttgccattacccattagtatcatctgaataacctagtttattatcttgaattatgattcatgacaagacaaaacagtagcaaatattggttatattataactgagtgtgtattactaccacggctccatcacatcgacaactgcacttcatgcctagatctatgcagccacatgcactgtgtattgtaaaagatttgtgttcattgacaataccataaagaaattaaattaaagcatacaaggttcagatgatttaacaactagcacatactgatgaatcaaataacaagtattgtgagttcaaaatatgtatgatttaacccaccatggctaaacccgacatggtaagcccttgggaatgtcaccacaaactcaccaggatattgcaccaatctgaaatacaatgcatgtcaacacataaattaattaagattggtgtattgattgctgacggtttcagaacttgtacctacagcagggcacaccattgtctataaggacctctggggacattagtgttgttttctcaccaagcactgctagtgacgctgcagaaaccaaccagaactcatatcattcgcaccatcgcgtgagcacaagatctggataaagaaacacaatataagacaaataccgatccgatcagtgttgcctccatagccatgtacacggataacttcctcaagctcaacagccctatcaccaggaaccgcataccacgtcttaggtgcgccagtgtggaggaagttgagactatgcagatcatgatcctccacatgccacgcaaaccagctgaacagcatgccaatgtaaaccattggagaagtcaccccaggaacatcgtcaggcataaaccgtgtgagcgaaccaggagcccgcgcaattgcttgcaggttccatgggctatttgacagcctccagcctgaactcttctcccattcgtccatcggggcagtctctcttttctgcttcttcttgcgttgcaactgcacgggtgcagcaaacccagagccagggacatcattggcgtactcaatatagataggacggtccgccgacgccttccagaagagtgattccaccgcgagcgcagtcggttcgtggagtccagcgaggtgcgtctttgagaaggcgcgggacttggactcaaactggtcgagcgtgtaccgctccccactctgccacacctgcttaagcacctgcggcgtcgggcgtccacgccgcgggttgccgagctcctggtgccgtgtcgtgaacaccgcggcggagaccggcggcggcgaggaggaggatggaggaatggacgagtcggaggcggcggcgggagagggcgcgggggcgtcgcaggaggagacgagggagcggttgaggtgggcgaagacgaagcggcgggaagggcgcgggtggggcgggatgaccttgcagatgccgtaggcggcggcctcgcgctccacgcgggagaggaaggcgatggggtcggcgaactcggactccgtcgggcggtactcgggcgcgcgggggagccccctgagccaagccgggacggcgggatccggggcactggccgacgccgacgccgccggcggaggctggggcggcatcagggggggagcgcgcggcgagagggctagggttttgggaggcggggacggggagcggaggggagcatttgggttgggggggtttgaggagaggaagggaagggaggattgggcagccgaccaaaggagattgcgaagacggtgtgcgggggaatcgcgtcgcgggtgtgggtatgaggggaatggggggggatgcgggcggtgtgtactggagtttgtgggcggtggctgtggttgcgcgcggtcgtcggcccgtgggctcgcgtctcaaggctcagggtgggggccggggggtgagttttgctttctgcgcttgtcgtggatagggactgcggttagtttttgcccgcaaaactaaccgcccttctctcgtatgcctccgcaagaccgcaaataccaccgctgtcttatacaagtaacattcaacaacagaaagaatacggtgtcaataaattagaaaagtgttatgaaacctatttttattataagccgaatta

SEQ ID NO: 6049 - DNA, 60695 bp, Oryza sativa
aagtctttaatacctttggtttgagggccccaaaaaaaaaaccaaagattgccagtttgaaagatggggacctttaaaaaaaatttcagcccttcctatagggcattaaatagcacccgtgcattgcagaaaaaagatttgcaaaaatggaattattctgagcaaaaagagcaacaaccaatgtttttttaaaaaaatatcacactgagtttaccgataggaataatttattatgattttgctagaagataggtgatcaaaaggcccaaataaattattagcttttttagagccaaaaccagaacataagtgctaagttttggcctgaatcaataacgaccacacttcaataggttcaacgagtacggttcagcgacaaacgactgacgtggtctcggacatgctccttccgtacggacgggtactgcagaagccttaagaaaaaggtgaagttcatgacactgctcgtgcgggtctgcttggcgatagtctccggcagcggcatgtgcggccacatgacatgagaggggatagagagaagaggagagtagtgagatgacatgtggggccacatagatcccaccgtttttattattctgtgtgcgaaactgacatgtgggcccataggttttattatttttccaaatcgaattgttatatacgcgccacgtcaatgccacgggacaaagacttagtcaaaggagccacgtagacgtcacgtcagccaaaaccaagggcaatattgccgaaggacctcgtttgtattggttttgtaagttgggggatgtgttgtatctggttttgcggtctagggacgaatttcgaactcggtgacaaattgagagacctaaagtgaacttattttgttttcctatgtttactctttaattagctgggcacactttggtcacagcacaagccgtagaaaaaaaggttcacagttaaggtttctcatcttatattcaagtttcaaaatcatccctaaatcaaaataccaaatataacgcgcttctaattttacaaaatcagataacctccgttcttggtgacgtgagggttgagtcagatgggtcgcacgacctccggttcctcgcgcgcgtggtgggacaacctcaagggctcgtacgtggagacgaactactcgttctatgtgcaggacatcaaggtgagcactgagcaccccgtacgtagctagattctgcatgagccaggcaggaacctcgcaattgtaggcgacggagggagggaggatcgccagagaactaactggttggcctctcggcgttccaggcgcgtgctcggatctagtcttgccgcggcgccggcgtgcctgccaattctcacagggtagtgctgctgtgtgttacggatcggagtatatgattgcatcggagcttcagattagttgctactactatacttaggctctcttttgtttaggcttaaaattattgtcttagaattttaagtcagcttattggcttatatgatttacaagccggtggatttaatgtcctaagtttaatgatggagtaatgcatctatctcatataagccaaaaaaaacttatccaacctaacttttgacttaatagtgttagagtggcttatggcttcaaaaaagccaaacaaaacagccacttgtttgtttaggcttagatttttcggccataagttaacttataagcctaaacaaagagggtcttactagtccatgtttgagtgttgcaggataaataatacggggaatgaaaacggtcggaaatggtacattattttattatttttttcgaaaacgaacggaaacggtccggaaattttcatatttatgaattcatctatttagtgtcaactttaatgccacgctgacagaaattaaaaaaactaaattttgaaaacggtaacatcggtaaaattattattattatattagttttacggaaatggtatcggtacggtcggaaaattttcataccgttttcaccccttaatacctcaatctgccgctgctagaagaagtagtagctgtccaccagtggcggagctggacagaaaatcaaaggggggccagccggcttttgacagttcaaaaaattagcaatttctcttttctttcatgcattggcaacacgtaaaagcgaatagtttgcaaaagtcgacaacaaagatcagctacagatgtcagattttaaaatttaggatttgtggatacatcaagttcatagtgacgtaattgacatctcaaattggctctctcttctaaaaaatcagcaggatagaactttaaagctagagagcacactttatcaatgttgaactgaatgaatcacttggatccaaagatgtacacaaagtgagaaactctgttgcttattcactgaatctgctatgatatatgggggtaataaaaaattttgtttttattggaaggggccatggcccctgccagcccccctcagttccgccactgctgtccacgtagcgtaaaaccccagcaccacgaacagaaaccacgcgtctacctaccatcttttttttttagaccgcacggagtcatatatatctacagtaaaatctgccatggaaaatccgtccatcacgctagcctaagcggtttaattagtcgaaattgaaagcaacaggaagcatgtgtgtaatcagtaacattgcaacaatataggtaaaccgagcaaatcatgcgtgcgtcatttaatttgtatgttcaagtaaattccagttaaaaaataaagtaaatctcacaaaactatatatatactttgatgaaactatcacaaaactacatacatatttaaggaatcgatttagcagtatatttatcataaactatatatttaagatagcctatcacaaaactacaaagtaacaaatttatcccaaaactatagatttaataccaatatatatctaataaaaaatacataaggcttctaatagtgtaatagtgatagtgatcccatgttttaatttattgcttgggcacaaaaccaaggaaggattttaatttactttttcaattatagtgcaatagtgatcccaatgttttagtttatttctcatctcctaatagctgttataccagtgaaagaacgtctttacctgttgcaacgcacaagcatttttttctagtttaatcataaaactgcatctataactttacctgttgcaatgcacaagtattttttctagtataatcataaaactgcatcatttatagctctaacataactgtagtgctagagatttgaactctaaaatttataattttgtgataatttcaatattaaatctgtagttctatgctaattttaatattaaatatgtagttttgtaatgcttagccttaactttgtagttttacggtaaaatttggtattgaatctgtaattttacgatacaacactttaaatatatagttttgtgatagtttaatcaaaatatctataattttgtgaaaattactttaaaaattacttcctaagatgtgtagcatattttgattttagaaaatcaatctttagtataccaataattagttaacataacatgtatagaacttacaacattagattcataattcgaaacattatcatataaaaactttctattgcacataataaatgctctctggtccaaagtgaacaatcagagtacctattattcttcttccactaatatttcaactataacttcataactccttcaaaataatttgccacaacattaacaataataaaattttgaagtacattagtcggggaggactatggatcggacgtcaaacgttttgcaaaacatcggatggtgttgcacaacattgttacaaagtgtcgcatatatttcatcgtttgatggaaaatgtttcaacaaaatatagagaataatgtttcattgcatggcacaaaaatgtctcagcccttgaacaaacatggttcaacatatagaaaaaatgtttcaacaatttaaacagtgaaacacaatcgaatcattcttgaagcattttgctataacacatgaaacatcgattttgagctactgaaatatccaaatactttgaaaaaaaatgaaacacaaagaaaaacaccgcaaatttttggtcttcctcctttctagtggcaggccaccgtattggcaccggattacttatactccatccatgaagacactctattgcattctctagatgatccacaccgcgtacactgtccttcctactaccgttgttgacgaagatgaggctgagctagtcccctcattgctggttcccctcccttgatctagcgccctgagcttagcatggtcagaacgccggcctactacatcctggcaatgtggtgcagagcaagatgagtcgcctcatgctcgccatcgagcattagcgatggtctcagcaactcggctccatagctgctccagttgctatggggagagaaggggaaaaataaatgaccgggagtgggggagtgggaataagattgactattggaaagaaaaggagatgtagataatgattagataaaagtgagacagatgcatttaatatttcctcgtacgccagatggagatgaagcgttttcgacattagtctccagcaaaagagcgggaaatatacctattttgtcctacttctacgagcatagaaaaattctccatcctccctctccagtctcccaacctttctctctatatccacgtaggcatccatgtcatccattacggtgacggggccagtgttccacgtggcattcgtggcccgtgtgaacgcgtccctgcaccccgcaccggtgggggcccagattcctcaccctcactgacccacgggccccacccgtcaaacgagcggcccacccgcttcccgaaagacgcgtcacgcctcggccccacggacgttttgttaccccacccggcacctactcgccgtccccaccactccacagtgccagtgacgcgtgggtcacacccgctcccttggtcggccccaaaccctcccaccgcccacctgagcgagtggggcacgagtccctatatatataggcgcctctctcctccgcccccgccgaccgccgcgtgctctctcctccgccgccgccgtcgtccgccgccgcccgccgcgtcacacacacagaggaagcaatcggctgcccccgcctcctccccccatcggctgcctctcttcgcgacggagagaagaggataggaccccgactgcacgcaaacgcgaaaccctaggctcgtcgccggcggcggcggcggcggcgaccggtggggagatggcggggcggcggccgctcttcgacctcaacgtcgcccacgaggattgggattgggagaagggggaagaggcggaggcggaggaggaggagcccgaggaggttgttgaggaggggaagaaggaggtggtagtgctcgaggaggaggaggaggaggaggagccccatgaggtgatcatggaggaggaggtggtggaggaagtggtggaggaggaggcggcggtggcggaggaggtggacggggaggtgaggaggaagaggaaggactgcgaggttttggtgggagggcttccccgggacgcggcggaggaggacgtggcgcgggcgctcgcggacgccggcgatgtggaggaggtgcggctcgtgcgggatccggcggacccgcgctccaacaagggcttcgccttcgtgcgattcgccgccgcctggcaggcgcggtgggctgccgacgacgtccgcacggccatggtattgtgtccacccccccccccccccctgcactagattcgtatctccgactcgttcgatttggatagagttgtatctaatgcgaatttgatatgttgagaataagtagtttgggaaaaagtgttagctttagtcatgcttgaagtagagctgataaagttagtggtctgggatgcttcttgttcactaatttgaggtaatctatgcccttgcaatctcgttttgttgttggcttgtgaaatttgaattagtggatgtggaattagataatgagattaagtagtttgggaaaagatgttgctttagtcatgcttgaagtagagctgataaaattagtggtctggaatgttttttgtttactaaatttaggtattatttatccttgtgatttcattttgttgttggcttgcaagatttaaattagtggatgtggtatcagggcttttgattagtgttgaggaagtagatgtatggtatgtgcccttgtttttcaaggcctaagtgaccgatcagaccacaaaattggggaaaaacagattagccaggttgaaaatggtaccttttagttgatttcatagcatgtgcctggttcacctattgaactaaagtcgtagagatatttaaaagtcttagttttgaaaaatactgttctaaattgtgatgtgacctgctgtggtgctaggtgtcaccttcccactaaggtcctatgcaccaccctgctttcccgccaagtgccttatccaaacataattttaatggtcatattacgttaagcttgtaatggcatatttgtcagtacttgatgcttcggatagttttaatgacgactcctgctggaatgccttcttaaatgcgttttgtgtttcatatatctggtaataatgaccaagacgtggcaatctaaaagaagctgaaactaaattagcaaatattttggcgctcatttttctaaatgcaatgagcaaatatttttggttgttaagccaatatggtaatagccaatgatttcattcatggtgtcattggaaaaagaggcactcagttagatttacccaatgaaaatgggaaattcctgataatttgttgtgctatttataaatattttaaatgctgttaattactccctccgtcccaaaaaaactcaacctcgtactacgatgtgacacatcctagtactagattgcctttgtttgggatggagggagtaatttgtaccacactgcctcacgctcaggacaaacactaggacaatcgttattaaagatgctacttacatgaatacttttcgatgttcccggataagttcaaactgattgaatctcagttatcttgttgtagcatcagtttgaattgaatgtaaaatgtataaacttgcatacttgataaaaatctgcaattgatccatatgtgcacacacaaacatccatttactaaaatgtgttttgccaatgtgtgcacaagtccaagttagcatacttgcatttatgttatggttttatgtttaagcactggtcactatactagttattctattgaaatggtgatgcgaataagtatctaaactagaggacaactgcacttatgaactaattattctgttgaagttgttactttagttaagagtcacaattagagccacaatgcaaatgtgccaagcttattatactccgcgatatttgccaattcattgtgaagtttgctcccacaatgaactgttagatcattagatccaagtctgttgaactccacattagttttagtttcccttctattagacgataatgatatctttattgatcagtaataatgtttttccaggtcaagggagaagcttgtatgatatgcaagaatgatgcaaacgagacccttcatctgcggaatatatgctttgattggacaaaagatgatgtatgctttcatccttatttaattaattgattgtaatttttgtcacaagcatattgttattttctacaagggttctcttctgtgcagttagcggaggaactgaaaacttacaagttggaaaaccttgaggatattaatttagtcgaggatccggaaagaaaaggaaaaaacagaggctatgcgtttcttgatttccgcacaaatgttgatggtgtggatgctttttttaaactacagaacagagatatttatcttggtacggatgttcgagcccaagtgtccttttcaaaaactctttcactggatgataagattatggaaaaggtagtcacacaaacaaggcatctatattttgtactatatgaatctgttacacgtattggaatatcttggctttgacttagctgctataactttgattatgcattgcaggtaaaatctgttttcttggatggcttaccacctcactgggatgaagacaaagtgagagaagtgtttggaaagtttggtgaaatcgatagtatacaccttgctaggaacatgtttaaagcaaaacgaaaagattttggtttcattggctttacttcaagacaatcagctttagattgcattagtacagttagtaaaggtggtattgttgaaggtagcggaaaggtaatcacttgaggtgtttttagatgtgcttttcttctggtttatttgctccagctactgttacttagtaggtcaatattttcaggttcgaatcaaggcttctttacaaaggcccagacctactttgaaaaaacattcatggcaagggattactcccatgttgggcatcaggaggggatttattggaaaaagttatggtgatagagaacactatggtgatagggaacgctatgatgatagagaacgttaccataatagagaacgttatggtgataggggatttgggttttcaggtcatgcaagacgtgattactcaagcaatcatgttcatgacaaataccatcgccacatgcatcgtatggcaattgatgttgaagaaaggcccgtttcatcacgagaacacagatctcattatagaagagattctgcagtatctggttggtttcctttaatcttctctaaataaacttctttcttttttctttctctccaaggctaatgaatgtttatttccaatacttggttgtaggccacatccacaggtatgagagggcaaggcccagggaagcatatcttgatagtcgatatactaatgaatacccaagacataggcactcaaggcatgaagaatccatccagcgagatgcatacaggagtaaatatggacactcctacctggagaggtcacacagagattcttgcccagattgtaatccaagtgatcatagttccagtgccttctataagacagtaagcacactatataaacactatctggttttattatccattgcttgatgttcattggagctggtttactttcttaggaccatgagccaacaccttcatcttcccaagtagcatcccactgtgaggaatcgttcagtcaggttgtgtttttacacttcctcctataaattcagttgcttcagagtgatgctaactatttgatcttatgtttcccagggccgtaagttgatggcatcaagttcccctgggatgtgtaattgtggcgaatgctatgttgtaagcacaaaactacagcactagtgtttggaatgaagtttctttgtaatacttgattctgattgtagaatcttcttttttgtcaggaacaagatgcagcccccgcaagctcccaagtggtgcctcttcgtcaccagttggccaaaccttttcatgagcgaaggtatatatattctgacgcttcatgtgttcctatcctttcacctactcttcgaactggttaaaaaaaccgtactctgatcttttgctgtagttctgagcctgatgaccactctgcttctgcctatgaagctgcggagtacaaagaacgcaagagcaggtatcatccatcttccagagatggccccagtaatactcaccacaggaattaccgtagacaaggaagataggtccaagtaagcaaagctaagctttcgacaagatagagaagctgctcatggcagtgcagctgctgctagagctatacttatttagtagcgtcgagttaccattggtgcattggtggtgctcccccgatgcagaatcctcccaaaaggatttctggcttttgtgggcgttgcaattttttccggccctgtggttgcgcacattttaccttgggatgccatgtcatgtgatgtgacattgtagttcgtttaccccggatacataccgatagaaatccaaagaaagagatgttaacttgcatggtggtgcgttgcgttgcagcctggtgcggttcgtatgagtttcagttttactgctggtgtcttcagagttctgatgtcgctttggccgttggttgattgagatgttgcaattgcgagtcaaaaatttcgttgacaagcactatagagcattgcgtgcgtaatctgaaagaatatagtttcttttagtgccgtactaccaaacacaaaaggtgctgaatatatatatttttgatttgtgcgacacgtgccatgtagcaccacataacttggttcgatgaacgcgcagcaaagaagggcgagttttgtgctccaaaccgtacacgatagtgcacattactttacatgatgcttttctttatctccctatgtacatcaaatttttagctgttttttactccctccgtctaaaaaaaaactagtattagatgagatgttttctagtataatgaatgtggataggagtatgtccagattcgttgtattagaaaatatcacatccagtactaggttgagtttttttggacggagggaatatgtggtactacacatcactgtgttgcacgtcttaaaacggtcactttttataatcaaagttttctttggactaccttttctcaatctttacgctttcaaacaagtaattgtgttttcttttttatggtttaccaccctaactatatagtgtggctggggtaagatagttgacgtgggtgtgccgatgtgtgcttgagaatatagggttgggtggttcaaaatgtaaaaagcaaaattacttaattcaaagtaacaagattaataaaaatctggtaataaaaaatgactcaaattacgattcgctttaaaattattttcgtcattgatgtgtgcacatctgagtgcactttggtgattaggtacgcaactctcttgtcaactgagaccgcaggagcctggagggcaatctgtacacattttatacggtagtttgtggaccatacgcacttggcagtggagtttatacaacttaggactcttttgattaaaagaaaattcatagaatttttttcctatatagctctttgaatcaatggaatggatcctataaaatcctatgaaattcctatggattgtcttttcccatgcaagttttggaaaaaatttaacatgaggtagaacctcatggaaagaatcctttgaggccccttttgattcaaaggaaattcataggaattttagaggatttcattcctataggattttttcctatatagccctttgaaaatcctatagccctttgaatcaaaggaatggatatcctatgaaattcctatggattggctaataccatgcaagttttggaggaattctaacataaggtaaaacctcttggaaactttcctttaagtctttatctctcctctaattcatgcgtttttcctgcggtccaatcaaactaccatttctctgtttttcctgtgttttgcaatcctctgttttacacttagggcccctttgaatcgtaggaatgaaaaaacagaggaataggaaaaacacaggattctgacaggaatacaattgtaaaacagaggattgcaaaacacaggaaaaacacaggaatggctgtttgattggaccacaggaaaaacgcaggaatcagatgagagagatagactcagaggaaatgttccaagaggttagacctcttgctaactttcctccaaaatgtgcataggattacccattccataggaattttaaaggattggataggattcaatcctttgtctcaaaggccttcataggattttttttccataggattgaaatcctccaaaattcctacatttttcctacaaatcaaaggggccctatgtttttcctacattcctatcaaaatcctgtgtttttcctgttcctatgttttctcattcctgcgattcaaaggggccctcagtctttatctctcctcaaattcctgtgtttttcctgcggctcaatcaaacagtcattcctatattttttctgtgttttgcaatcctgttttacacttgtattcctgtcagaatcctatgtttttcctattcctttgttttttcattcctatgattcaaagaggtatacaataccttatggttttacgcactcaaaggggtatacaatatcttatggttttacacacttatgtgatgggatgcgaataatttcttgcttggtgtgtactagataagaggatggaatggatgtacggtgattgattgagacgacaaaattggatgaaatcaccatattttacaacttgaatcaatattggttcccagattaaatagagagaacattagggcccttttgattcaaaggaaattcataggaattttagaggattttattcctataggaattttttcctatatagccctttgaatcaaaggaatggatcctatggaatcctatgaaattcctatggaatgcctcttcccatgtaagttttggaagaaatttaacatgaggtagaacctcatggaaagaatcatttgagtctttatctctcctcaaattcctgtgttttttctgcggctcaatcaaacagtcgttcctatatttttcctgtattttgcaattatctgttttacacttgtattcctatcagaatcctgtgttttttctatttctccgttttttcattcctatgattcaaaagggccagtagagcaatgattaatgacattgttttaattgagagtatcctatgtggagaagtaaagttttgctagcaatcacataagtatccaatgctcacatttaattaatcgaaatgtggctgcaccaaatcacagctaatggggatagttatataggatttgtagatacataacatagctctactgctaaaacacctaagcaagttttacatggctgctaatttaccttggccaagattgatacggagttctcattatggttctatggtacctcatttattgtttaacaagggttcgttccggtggagggatctaaataacacccctaaccgtacgaattttctcgtttttttggaatttttttcggctcctcggggaggataagcgtggttggctatttttgcaaaaaactcctcgtgtttgtagaaaatatcgcacagttccttaaaccgactgacaacccgacatgttttatccgaaaaaccccttgtatttcagcgaaatacaatgtgaagaagagaaaattccgcttctaggggtttttatgaaaaacatccatcccctacccccaatccccaaaccctcctcgttccctcacctcagcgccgccgccgccgcaagccccgccgccgccgtccgtcctcccctcgacgtcgcctttcgctctccccccgtggtcgccgtgcgccatcccccgccgccgccgtgcgtcatctggcgccggtcccccttcccccttcttcgccctcccctcgcggcggtggcgtaaccggcgccggtttccccctcccctcgtggcggcgtctgagtcggctccggtgctcccctccctcttccatcccctttcgacggcgtcggggatgacggcaacgcggtggtggtggcggtgtcaggtgcgggtagaaaggagctggtgacgggcggggacaaggcgtcccgatctgcactgactcgatctgcgcgagccaaccccgcgccggattgaatagggtatgaggggagaggacggcggcatgggaggatgaagaggacaacgccgatggagaaaggggtgaggttgcccggcgggggatgctggccttcaccgacgcgtggctccccccgccgcggccgtcgtcgaccgtcctccacccgtcgtcgccaccccccccccttctcccctatctcgggcctcttcccgacctcatgcctgcacgagcgccggccgcgtcccgtgctcctctcctggcggcggcgtcggagccggcgcccggtgccgtcctcccttctggatcgatggatttggaggtagtaccggcggtggcggtgttgggaggaatctatatgagtatttcactttcattcctcctcctctcactctcactaccgatcgggagcgcggagtggtgatggtggcgatgtcggagcgggggtgctggtcgcgtccatggctcacctcatcagggcacgcgccatccgcgccggcaccatcatccgcgtcctcgactatctcttcatcgactccgacatcaacacaaggtgaccatacaaatccttcctgctttcgatcgatctcatctcgctgctataatcatgtatcagaccagatgcctgcctggctgatcgatcttttcaaggagccgctctttgatcattttaatgtatgtgtgtgcacgttttgactgctatcggggaaattttggttaatttccttttttcattctaactgctaggtaaaattttattctgaaatgctctgccgaaattcgttttttcggagttctaaacggcgctagggaaggactgatgaataacagggcctgctctttactgatccagggcagaaattaaatctaaaaaattaaccaaagtctggtctatttttgtatagtagcagctcttgtccagtttatttacatcaggcaacattctaaagtgatgaaatgcggatgaaatcaaatggatgatctacttgttcatattgataaatttaatattacacattatcaacctaacaaatgatgtagtttaagaaagtttttagcaaatcattataagcatggagtaattaatccatgtcaatcatccgattaacaacctgtttagaatggaacattgttagctatttctttttgttacttgaaactttgaaagtttcaagtattacaacatgtgtcaacacttactgaaaattgaatccataactaacttttcctatcatatcttggtttctcagttcagggtcattatcgtccagcaacttgaattgctgcaaactgagtgtgcactgatcggtactagcaatactcatgcgagcccagtaaactttatctcacatggaaccatgcatttcctttccattgtgagctgtccccggcatgttgctactgggtacctgttctgaccgacgtggtggagtggtgatgttgcagaacgcgtacaacatgctccacagcgacatggtggcggccgtgcgtattgcgcacgcatgctgtatgttcctcgacgagctcagcaccacatacctctttcctgcccaccacaacgtcaacgtgagcacattcagatctcccaactttataaaagaaattgcatcttaattcaaagatagtttcttgcacctcttcgatgcttcatatctggagatttgggtagcggaaattgactacaacgacctatctctgattttggagtcgatactaaataatcaagagaatgggcttgttttgtttttttttttttttctagagtgggatatggaaacacctagcccaccgtctaagatgagatgttgtctaggataatagttgtaattggtagatgggatattgcagggctacgagagggtaaatgatccctctgtgtaataggggaggggagtttatttctagggtgaactaaaccatccaaacaagcaagtgcaattctgaacagaaagtaaggtaattgactgcaacatctatcaccgaatagatggtgaaatgaagatcttaggcttttttgccacttgaattgtagtttctaaatacatgtccactgatatatctgaaccatagctacttttcacggacaaactagcttcatatgtatgaaacatggcaatgaaaatgttgtttgattcctggattctgacctactggatttggatgcatcatctttcctttgaagtgttagccatcatctgcaaaagtattgcattcccaagctctttggatggcccggtgccaaaattgaagaacatcatgtactgtgttggagagtgcaaaccattcaaggcaccacaaaacatatctcctctgttctttgtagatgttgtattaggatacatgcaatcaaagattcaaacatcagattctttaccagctaaaatatcaaaaaatattaagacttggcagtgtagttatctttttactaattcttatagatatatgattagaaaaatagaatggtaaaaacatgggtattcgacactctcgcagtgtactagacaagtaaaaaaggacactagggagtataaatcagtcagcacatatttcattttggcacttgatatttggtgccacctcacctgtcatatcatggttttgttgttttccaccttactttcaggacagtgcaaatgtaccaaacaacacagatgtttgcattgatgtgtaccatacccttcagttcaaaatttcgcttacatgatacaagcagatagcagcagactccggtccttctcgtttttgtatttgagagtattctgccatagttccttttagggttgctaacttacttgccattttaccccacgttatatatgatgtattgtttggcaggagaacgtcaatcgaggtcattccagttcagaaagaaaaatacaatttctttgctatccattcatgaagaattgtacattacagagttttaaagtaaattgaaaaacgattgcaccacaaaccactttttatttaaatttgttgtacctactacatctcatattgttaaatgtcaggtcaacatactggggatatatacatgacaaaagaacagagcaaactccttttttatccaaatcattgttcactgaagtggagttgtttctcagagacctcactaatagggtgagcttacaagactgatcattgttagtcttcagctggaaaccaagcaaaagatgtcatactgttgtaaccatgtttgaagacaatttcgttgcctcttgtttgaagatggcaattgtcataatgcgtggtttgtcaaaaatatgtccactgtgacatgcgtatatgtattaataatttgtcagttatttgtacctatctgttttgcctagatgattattgtaaatgctcttatcgcaatgtaccatcctgtattattcatgttattactgatataatcttgcgcgcggcgtggcgccgcgccatggcccatctagtgctttgcaactactgatcctgatgtcttgggctttggcagtgattggtgggcactgggcatagtttaagggtgactaggcaacggtaagactgccggtgagcagaacaatggtgatagcgttggttgcatttggtgttaattgcaggcatgtgcctggccgtaggtttctgttttgctcatagttcatggtaagagtggacgaggaaccatgccaacaaaagcatataaatgtatttttgaaaaacttaatgtaccatcggatattagtctaccactttatcctgtccagccattatttttctatcagagaattaacagataaaggagaaatatggacccatcagtgctctcatatacttagtggcagttgagtttcatcaatgctctctcgtaaggtgatgagattattaggaaaatttcaaatagtcccacctgagcacatctctacattgtagagtttcacaagtaagaaatgcatctccattctgatttttatacaatattttttttaccctgcctatgaaaaactaattttttatttatagtaattaataagtcttgaattaaataagtggtaaatcttaaattgaatttgtaaaaataggatggacgttgtttcaaagggcatccagatttggacgttgttctaagaagtgtccagaggtggacgttgtaccgaagcacgtccaggctcggtttggggcgcccatgccgccatgcggagaggcgccatcgtcgactctcctctcctcgggcccaatgttggtgcagggctcaggcaaggtgctgccatccccgccgttcacctcgactctgggagactgcaacggctgccttccggcttccgcctccacaacgtcaggaatctgccgttgcagttcacctcaactcacctcgaaggctctcgaatctggagaggacgccgccgctttctgccttcacgccgggagatcgcagccgctatccacgttctggttgagtcatgctggaacaataacccactcatgccggcttgtattgcgtcgtctgtccgcccctcttggttcctaacagcaagaccaggtatcgcctcactccaggtggctggccgagcaagtatgctcagttcatagatcttggtattcaggtgtatatgttctgcaatagaaagtttacaaagaatgcaaaattatgaagggtaggacgcaaacatcctccttctatcagatcatctgtcgcccgatgacttccaatctctggcctgttgcaaaaggaaaaaaaaaagcatcgatagaagacctcgcatgcagtacatctggcggccgcttctcaagattcagtcagcaaagagctcgatgcgtagtaaacaatggaccagcacaaaaaccaaactaatcaaatatctcaaaataaaagtggtggctgttcacatatgaccccgagtagagtgtccgtcatgcggaacagcggaagcattgaaggagggccgggggatggcgaccctgtctggcagatcaggtagagagcggtgcctgctcagcaagcaagcaatcaacgagagacaatagtctgcataggagtaacgaggcagagttcgaccattgtgtgattggatccaaagtccaatcttagtccggtgaattggacggctctttggggttttcaatggacgcccttgtaagcagcgtccccatctggacgttttctacaacagcgtccacacctggacgccctatgcaatagcgtccttcctattttcgtaaaaattgactttgctttattatatatttaatttctgcattattaattattatgaataaaaaattcggtatgaaaaaaaaaggttggttgtaaaaatagttttttttaagtagtagtggccacggctcccgtcgtcgcgcaccatgcagatggcattgcctagctaaccacgatatcggcatctcgctgctctgcaggtgctcggtcaaatgaccggtaagattcaatggctggtaagcgacacttatacgccactggtttgaagaacatcactgctatttgttttgccttggaatttccttcttaatttaagtaatttatccatgttttgcaaccccaccccaccccccaaaaaaaaaaatccgtgttacatgcaattgtatctgaccgaaaaaaaaaatccgtgatacaattgcatatgctagtgtggctaaaaccagatacatacctcctatgtttgcaatgaagtaactttagttaaattttacagaaataaaatagtgtcatgtgaaactgccatagaccgacggaatgtgacctcgcatcacaatgaaaatggaacggaaatttagctaagccagtgcttgacttgacagaaatcaggacctgacctgaaacaccgcagaatgtcacggcagcagcatgtggcatacacagcctgcacccatgctcaaatgcacatgcacaagaaaaagaaattctaccatagcatagattcagatctctcattcttgatttcacaacagctagccacatgagcatgaattttcagtatatgaaaaccctcttaaaaacaaattcagtattgcaacaatccacaaacattgcaacagatagatcatgcttgattctccaagtaagattttcgaagatgatctagtcagaatccgaagtaagatccatttcagggtgaaacgggcggagtaactttgctaggtgctcccccatgtcatccacctcctccctcccgaagccccagtcacggaggaccaaagacccgatggcacctcttgcgacaccgtgcttctggaggctccccgatcgcctctctatgaaaggcaggacagtgctgcttgatcgtaatcgtgccgccatcggtatcgattcaatatcgagtgagccctttggctgggattcttctgcatggtcgctaaggatctccccgtgccggccaatgttgcctctgaagattgacgggaacggaagggggacagggagggggcaaagagatgctgagagatgggaaaattttggctttgtctctctggcttcgtagactgaacataccgagtctttcacttgtgatatggaagtcctttgcccacctgtgcaaacaaatttcaattgttaattctttgtacttctacatgtataaccaaaatttagccaccatgcctataatgttgtgaaatgttcaatattgtacaatataacagtagaaaaataagttctgttggcatgacaaaacttccccatctagttttccgcgcgcatgcttttcaaactgctaaacggttcgttttttgcaaaaagtttctatacgaaagttgcttaaaaaatcatattgattcatttttgaaaaaaaaaagctaatacttaattaatcatgcgctaatggaccactccgttttccatgcggaggagataggttcccatcctccagtaccgaacacagccttaatcagaccctacggcaaaagataagacgtgcagacctctatcaagagctccatgaaccaccagcgattcaactgaataaggatcttcgtcctcgtcgctgatttcaggggtcaaagagtgcagcttcatctctatgttccccaatagcatctctatctgcaaattagatgtgtgcaattagcaagcaagattaaatttccatccaatgttggtataacagtagggcatatgttatgttgtgtacctgtcaaagaaggggcaggcatcgctacatccagagcagtaaccatattctgccgaccttgatcagataaaatgtgcagaagttcaccaatgtcaagattaccagatgaatgtgctaagtctgaactcgggcccgttcgttgcaatctaaatggaacagtaattgaatgtattgctgcagcacaaacagcactagcatggaatggtttctcgtcttgtatataaagatacggtgacatgtaacctgatgaaacagagtgaaaggaaatttgtgagaaaatctcattcggaataagctttctgtacattcacgaaaatattttttaagggaattcatgaaagtaattttgtatggaaatcaaatgtgaatatacagcatgaacaaaaggagttgattctctcttaatggaaacgcaatcaagtgcagtatcttaaggcacaagatcagtatacatgaaagcaatcaaaggcaaaactaggccaccggaaagaagtcctataaaatcacagaataacaatagcatcgcaatttagtatcctcctgtgtatttagccaacttacgagaactcctcagacctaaaagtgttcgaatggaaagttttcaaaaaagaataaaaaaataaactaaaatcgtggagttcaggcaaagggcatacttctacttaatgaaggcggtcctatggggaccatcaggttgcaaaaggacgaaagttttgaaaatgaaacagcatcatgaagagctctcataatggactccctttgattcatcctggatgatccaagggtcattggatccctcacacagtaaagcaatacaggtgtatttgtgtaatcatcagcaatgttctccaaaaactgtgcagctacactggaaaaacttcctgaatcacccacaataaactggatgccctgtggtaaattatgaatcaataatgctaaaaataatggtctcaaaatatgcatgatatcgaaaatgatgtgcataagtgaacattagcttgttgcaaaactatagtagagtttgctgataatttactggggaaaagttggacctgaatatggtcgcattcttcaacaaagaaccttagcctctcattcatttcctctatttgcgaccagtctgaaacaacctcttgtgcgctgccatagttatcaaacttgtcaaagtctgtccatgacccatgtaactcatataaactctgaggatgatactgaacttttgaataatccgtccaaaagttgacgccattctctagacagtcgatcaggtccttatcttcaacacttttctgggagttgctggcaccattgctagtgcttggattctgcccttcttcaactaagctttgcagaaacaagttccgcccatgaggttttgagactgatcttgttacatttccagacctatataaaccaggaaaaaatcatcatggtaatatatgagcccaacacattattcaacatataggtgcccctaacaggaatacaagagttagtcctattctcgtcgatgaaattagcatatagttactgatagcatgaatgacagcagcacataacaagcaacagcaggccaaaagatgaatgcaactctacgaaaataataggcaaatgcaatgcatcacttccacagaagctggatgggtatatgcatcattactaccagtccatcgctcccttattatcagcctaagagcagctcattgctttctcaggctgcagaaatttcctagaactgtatcaatcaaacattgctagagcaaagctgctatatttgctatctgctttctttgacaatgcagacatgcttcctccatttgtcagaattatcccccagctgtagatacctaaaagcttatttaactctgtaacccatttgcacaagcaatccgatactaaactgaaacaacagtattctgctgcgtagcttgtacatggcaaattacaacgatcatttatgcatggtgggcacaataagcaaaaccaaacatggaagcatattctggagaagttagagcaccacttgccatgtagcaacattgagctgatctgcagaagcactggtctgacagagattaccggatgaactcaaagaaccaagggacccctgcaaatgataccaccgtgaacacgcagcctacactatcagtaacaaaataacagttgttacacactacaataattggatcaaattcacagtcagattacctcgagaaccaaccgataccagacgagggcagtatgtgggtacaccctggtgaaatcaagcattgtatgctagtagctatcaattacaattacaacagattttgcgaatctggatcaccaaaggcacttattacacttatttcagactaatgtcgaggaagaatcgcatggagtgacagtattttctattttcaaaccaacctgcaatgaattgctggtcccaaaacacagagaacctcgctgctcaggtaaagcttcagtccataaggctatacatctctgtcgggagttccaaagataatctgttactccctccattccaaaatataaggcataaccatccctaatccaaagaccaagaaaataattattatcatcttgtagtttggatcattataataaatacaatgcatgcatccaatagaattatagaacatgataatggaggatttaaaaaagtaataatttaatggagaaatggtcatagttaatggcctacatgcatggatgccttatattatggaacatctaaaaaagtggttgtgccttatattatggaatggagggagtatattgcaagcacagtgcaagaagttaatacatataacccaaaatggacacggtgatcaaaataacagtagaggaaagaaacggatgaaacataccacagcatgcaacagtttattgtgtagatggacacatgcagattttcctgatatgcaaggagattcctcaagtgtgctcttgttccttagatcctctgacaccggataatgcctgcagcacctccatagcacaaccatttctcgctacctttattcatgttccatctcaaccgatgcaatgctacagctttaggaggaaagacctcaaaattttcaggggattcgctacccctgctggtgcttgtgccaaaattctcttgcattgaaggagcagctaaaactatggcaccagtttcttgtccttcatcaggttcatcttgttgaccatctctgatgctcggatttatagcacaattgtattctgtatggtggttaagcaggcatgtcaggtacaagcaaaatgatacaagttgcaggcgacagagattacctgagttggcaagaagttccccttcttctataacatgcaattgagctacatctttgcaagttttagtagcccgtttggtccccagaggaacatttgacaaaggagagtttggtaatgcaataccaattttaatggttgttccctcctctgataatgaaccacaaagaaaatatggtacacggttcctcccaggttccttttcccagaatctcggagtaagctacagtaagttgaatatttctttagcaatgttatagagaatcacaatagcatgcataaatcaatagtatatgtgctgtttagtttacctcaaagcaaacagcagttccatcagccacacaataagccgcatagcctggatatcagcaaaacaaaattacaaattcatgaattatcatgaatatttgacatttttactctgctcacatgtgtggaactaaatattgatataaggctataaccgatattccgatacttgacatagatatactatggttggacatgaggtgaaatgcacctgcaatttctgaggcatggacactccagatcaaatattcagacaattgataggtagaaacaccctgagttttcattccaacaaatggccttccagtaacaggaacatcatttgcgattctcgacaagctaacgaactttaacgtgccatcttccaatgatatgacaatacctctgaacacaaagataaaaaatataacagttaacattaccattcttgtaaacaaaagggtatgtctggcatatatacacacaatatcaccatgaatgaaacaatgtggtctatttaatcacgtctactttgatccagtaacacatcaagaccatgtccagtgaaggaagcttgcatatttagaaggtacgtgggcaaatacaaacatttatattaataattacgtaaacaagtgcaaatagagcgtttgcaaaaaaaaaagtgcaaatagaattacttaaaaaaatacgctgatgctttaatggaactaattatataaacaaagacaatatccaccttagcacacactaacagagaagtacaggccctatgaacataaattacatgactaaaacaattgtcaacattctagcaaatatggtttctagtatgtgttccaacattaatgaaaacatacatctccatttataattagtgcagtgtttcaaagacaaggaaaacaacgtaaacaccgtgttagtgatgaaaaatcttctgtagtgaaaaaaaaaacaagtacatttagtgctttacaaatattaccttgcatccttcaaccattgaagacttattacggcccttcgagcagtagttaactcccaaagatggcgatatggatctctgcagcaaagatatcttatgagatgcactaaaattcccaaatattacaaaacaaaaacggtagaaaacaacagcaaatccaagggggctgtgacaggtagtgatttaaccataacaatcaatatatccatagccaaacacactgcagcttctagaacaagtttcttagtgcccattgaaaagctaaagaaaaaaaaccgtatatcgcactggattcataaagaaactcctgctgacatcattggtccatgtgataataacatattctgcatatcgtgcctatcttttgtttgttaactcggaatttttaccattaggaaacaaacagaaacaaatatgaatggttcagaaattgggaggtgccacaaattgagagaggaagggggagagactaccctcaatgttcagacctctgaggacccatacataatattagaaattcatgcaggaaaagagagtagttcgaaagatgttttaaacattgcttcagttcacaacaaggccaacacctaccttaaatcccagaatttcagaccattctctccagcagtgacaaaggcattcatgttttccttactgatagaatgacaagagtcaaaactcaaaaattatcttttggaatagaccataagtaacggtacaactggctacctcacagatggtgtccacgacacggttctgatgggagcagattcagcagttacacacataaaaggttttgaacctgtttatcaacagaacgcatgatttagttttgtttgcaaacagaacagaataagaaatgtgaagatttgggaactccagtaacttgcttttaaaccagtaaagcagttctacagtcagacatgttgtcaggcaaagtgtaaatgataactgataagagtgacgtcgttggcaaaactatctaaataccttgaaatgacaagtttgctgagaacttccataaagcaacctggaatataagaaagtcaatcacagaactttcagaacagcaacttgaaagactcaaaggtcacaggatttaagttaagaaaataattttgctgggtaaggaaaaggtaccgttccatcgtgacatcccgccaatatcatatcatgagagggtgaccaatcaactgtcaagggaatgctatttaccattataaagaggcaatggcttcaaaattaaagttcatgctgaggaattaagaaatatatccaaatcttccacctagtttgagctactactagcaaaaaaaaaaagaagtctacaggtccaatacctttgtctgttcccacactttactttggcagagctaaacacaggcttcagctttaaaaatcgagggtcagtaccctcctttgaagaagaggaatatattttctgaatcatgcttggtgatggaacttcccatctgtgcacaaaaatgaattacaagatgataagagggggtgatagatatttaaatgagataaataaggatctacaagagcatacactcacacttcaagcgagccattccccaagagtactgcaagaaaacccaaacatgatttatgttctgactgatttgctgaaggaggtttccattttatgtcccaagcaacttttccattatgagctaaacataagacaacccttggtagagaaatgtcttttgggacacgagaaagggtcttttctgcagaacaaatcatatgataatctttagttgattctttaaatcgagccacttctgtatcttttagttcatcaataacctgagcactgttttcagaaggaacagatacagcctgatttctctctgcgttttcaaagttacaagcaggagtacaacatgaagtatatgcagttgatgcagaagatccgtccatgttctgtacttcaacactaagcactactgaacttctttcatttgaaacagatttctttttatcttgaacactgccctttccgggacatgattctttcttgcaattttcaactaaggccgcattgtcgcttgacttgggaattgtctgtgttttttgttcttcacccctgcatgctttagaacaaccgcgttccgttgaaattggctgctttctaggtctgcctctacccttcttggcacttgattcttccttgcattttgcaagacatatgccctgtgctggtgttgcaacacgagatgttccaacactcaaatggacactgttctctatagcacagcttgatcgaccaatgtcatttgctaaaatgtcacaattactcttggccaagaccatgagattatttgaattggtcaaagtagaacctttctttggggtctcagtaccaggagcaaatacacaactggttgtactcggaaatggtttcttcctaggtcgtcccctccgcctcggaccagttgagttactcttgttgcttgattcaggtaaaatatacgtaggcaacatggatcctacgtcagactgtccagattgcatggaattatcaatatgaattacttccttttctggctgttctctacccctctgacctgacaatggaactggggaggctgcatcaactgcagcatgagttatattagcaccagacccagtattttcagtgggacccaaaccacaatcaattgaaccaggcaacagacagacagaatcatttcctaattcagtatcagtgcctggaagatgcttgctgttgcttggagcaggatactttcggggcctccccctttttttcttgggctccatgcaggttaaagctattggagatagagctgtagacaagtcttctgttagtttaatgccagacaaaccttttatttcaacaggttttttcctaggtcgccctctaccttttcttggagttgattccacaggattaacagttggcatgggacaagctattgcaacgtcacatgaaacaactgctgaactgacaagaggatcaataagagcaaactcttgacttgtgtcgttttgggatgaatcttccaatttggcaattggcagcggatattttcttggtctgccccttggtcttttgacacttggttccaagtgatcagaatttgtgatggtctttcttggtctaccccttcgttttggttgattggatggattatatttattgcatgcaaccaatgactgatgaggatgaccctcttcagatggtgctaggagacaccaaacttgaattatacctctcccgattaatggcatgccaattttatggtaagaagaaccaggagggtgagcagcaacagcaagatactgcaatgtataggagacgtgcaaataaggttatcagctctcaataacttttactcctagtcctatactttttttcaagaccagcaaatacttgaagatataaaccataaaaagaacataatactactttcatagacactgaacattcaatgcaatcatgcaattaatctgcatgcaaagatgtccttgggaagaactcccttcggtcattttcttatacatgctttatctcagcgcaaggttttattaagtaaaaaagaagtaaactgccattttatcatcctgcaatgcacagcacatagaactggaaatgttgaaccagattcactgctttaacaagagttggaaaagatgagaaattttactttgattcctgtgagcatctaaaatgggaaatacaaatacagaaaacaaaatatgcctaatataagtaaacgtggggagtaccgcaagagatgtctttaaattcatgtcaccataaagtatgtggctcaatgaaacatgttaattttcccattgacatatgaactaaagaacactcatcatgttcatagtcacagcaagtagtggatattggaacaaaaattatgctgatataaaacaattttgaagccacaacaagagaaaactttcagtattatcatagttataacctcacagtttatgggagaatgaggcctgtcacacaacctagggcaccagtccaatgcccaaacattgcccccggcaaatataacaaaatctgagctgcaaaagctaaaaaattattaaacataatttaatcaagatggcttcaaggagaagtgaaagaatatataacatggcaggtaaaaagtattaacaatgttttatcacactgtgaggcaggtactaaataaagtgggaagcacaaaggcacaaaaatagtattagatcagatctattttcatcaatcacaaaaaaaaaaaaacaccccccccccaacccccaaccccaaaaaggaaaaggaagaagggtttggcaaacgtgccaaacccaatgtaggggcctgttcactttgatgccatttctaaccataccattttttggcaaagttgccaagattgtgcatatgtttggtttcttaccaaactttggtaaaaacaccagaaatttggcaactgtacagtaatgaccaaaatttggtagaatatacgttggcaacaaagtgaacacattcaaaatagctatcttgccaaaatttggcaacattgccaaaatttgctaaggtttatttcttttggcatcaaagtgaacaggccctaggattattcttctggaccaaaagaatgacccactactcccaagttgatgtggctagtagttttgaagtgtgtgcagtcaatttaaaaaaaccttaataactagcatgcacaaaaatatttcaattgccacaggtgtcgattggagactctactgaagactttaaacaagtttggaaggttttcaaaataagattcaagtctcgcatctcgtgtttcatagaagacctactcaaagagatcaaaggaggtatcccctgaaacctgaaaactactaaccaatagcaggaatacaatatatgttgccaattagtcagcctattggtcatgttacagcaaattagcaactagtgaattgccaaaggagctaaaataatacataagcagacatcttgggttattcctaatatcaactgagaaacttaacataacctatctccactaacagtatgacctttattgacaaatatgggggaaaaacagacaacaagataagtagattgacaagattctaaagtagtacagaaagaactccataaacaataactgtctgttttagccttcccatcgtctaggtgtgtgatctgcagtgtgatccgaacttaattatgagaatatggtccaaaaggaacaaaagatgatataagaaatctcattcagctgaacacaacaaaaaatagactcaagaacttagcacaaggcaccaacagcaactaagttacctggggaacagatgcagacgagaactgtggtaagtttatcttgtgtgtgtcaactctggatggagctgatctggcgtcacaagtgaaactaacattttttggctcataagagaggtgcctccattctctgcaaagatatgaaacaactagcagattaggtactaaataatattattttttttaaaaaaaaagaaggcagtcagattagacaaatgaaaaagcagcttgtgaattccatttaattgatgctcagaatgactgctagaactttccacaatctgttactcttgatgctgaaaggagtcgtcctcatgtgcataagcgagctgaacatggcaaaccttaaatctgacccaactatagactatatactatgtcaaggaaagtggcctaacactatccatggagaaattcaatcattgcagatagtctgtctggacaaaatgctaatggttataataaatgcagataatttatctaatgttaactgctaatagttgacacttgacacatttggataaaaaccaatcattgcacttagggagcaagtatatgtgacaatgtagaaattttagtcagtaaaatttaaaaggtgcatgtagaaggagaaccaacaatgcagcacgttgaaaatatgcagttccaattgatgcaaatcagtatacagtgagatggatgatagaaagctaacgttctgagcagcctttgtatggctgtaccagctgatcaatctcagttgagtttaacagccttatattggtgggtgctaaaacacagtgagtggtgcttttttaaaaaaaaaaaaatctttctggtgaacactgggccccttaagtttttcttctactttaattggtgattaaatcaaagagtactaactagttatagcatgctactataggttgctaataactaaagctgttactgaaactgccaatcctgaatacaaagtaacagctaacaagtagtcttcacaaataaaggtggggctcactgacttagtggcttctagataaaggggatcaagtttcgctactcctctgtaccttaaaccataacatcaaatggtaagctagaaagtcacaatgtgcataaatgatcatcgatcagagtcatcaaacaacagatgagtacagattaaggaaatacatctaccagaacaaaagtgacttaaacttaatgaattagtaataaaacaagtaacagtgcaactgcattttgttcatgacatgaaaaaaaaaaccttgtatcgttctaatcaatagaaaaacagaattgtgcattgagctaatattgttacctaaggacactggaagtaagaatatagccaattgcagtggcaaaagccaaatgaattctaatagccacaacaggaataatgaaacggcaccaaagcattcctgtgacaactgcttttttcctgtttgtgtggcagcgatgtcttgggatctaaattaacaaattccaataaaatttgccaccgcgtgtggcacataaggcaatgaataaattaaagagagcttatatgccacataagttttcccattaaaagctccgtgaaattgcatcaatgactaacaaattaatgctttgctgataaacgctactattaaacacaaattcgtccactccacccagctaaataggccaacaacagaaagttaccaattttgccgcggtgattaggtaccggattagacagagcaagggagtttctcacctgaggaaagttattgaagaggcgagccgctctacttcggcgtcagggaagttcggctcgggctccccggctgtgagctccgagatggcgtgcaccgctctggagaagacctccggtgactcgtcaaatacgcagacctcgacgccatccttaacctcctctccttcagtctggggcagcgcccccgtcgcctccggcagcgccgccatcaccggcgaatcgagcgaagagagcggttgagccgtggaaaacgagaatggggggaatcggccctcgcaggtggggttgttcaatcgagccggcggcccgccatccccgaatattctgccggtttccaattgagatctctacgggcctgtagttatgggctgaaagcgtaacaatgcattaggcccatatagcttctgactttctgcaaggcaatgaacaaccaatcggctggtaagcttcctttatcttctttactagttgacggcaatgaaaccaaaaaaaaaaaaaaactaccatacggatgagtcgatgagactaattaacatgtgaatatgcagatttagagacctaggaggaagaggatggggagtacaccaaccttgggaatagttgtcgcggactcggggaggaggcgggacgcgacgggcggcggtcgagggcggtgcgggtctagggtttcggcagtggtacgagtagaggaaggcgcgatgagggaggagtcggcggcgtcgggtgacggggtgagtgcgagcgagaggagggcggcggtgtccaacggtcgacggtgacgatgtgggggccggcgtggctatgtgggggagtccggaggatggattgggggggggcgacgagatgcgacgacgggcgggatgggacgacggcaggggggcggtgggttgggacgacgggagcggcagtcgagggcggcgctggtctagggttttgtcggcggcggcgggtgactctccggattggggggcgtcgaggcgtcaggtttttgttttcgttctggaggaggcggaggagcgtgcgccgtttttccgtcgctctcaacgtgtcgagagtcttttaccctattatctggggggcttttaggctgtgttcagatcctaagtttggatccaaacttcagttcttttctatcacatcaatctgtcatacacacataactttttagtcatatcatctctaatttcaaccaaaatccaaactttggattcaactaaacacagcctagcaaataactatttgccacttttagatttagcaaataactatttgccacccctatctcaaaaactatgtgtcacaaaaacttttttgagttagctgtatgccatgagcccaacttttgttgacccgtgtgccattttggatggatggagacataacagaggtgttaggggctgtgtaaagacagttttgccctagtgtacaataatgggtttaaacataataaagatatgcattgaaacattatgtaaattatgtttgatgataatttaatatgtttgtatttgaaaagctaagtatattggatatcataaaacataataaagatatacattgaaacgattatattggatgataatttagcatgtttgtatttgaaaagctcttaaattataaaaactataaagatatagcatgtttgcatgatgtttaaatgcgatagttgttagtggatgatgaatgtggcatattgttaattagtggatgatgatgtggcatcttgttagtggatgatgatgtggtatctttgcatgttaagcttaagcagttagtgggggataactttatagtaagataggattatgctttcagcccataacttcaggcccgtagagatctcaattggaaactggcagaatatccgaggatggagggccaccggctcaattgaacaaccccacctgcgaggtctgggaatacagatgccggttgcctcctcttctgcaactctggtgacagaatcgctcccccgaagcgaactatttctccgtttctttcctaaactctagctatgcatctcgccgtcgtctcccgctccgcacgcaagcagcgggcggctgctgctccgcgcctccgtcgtgtggggctcgcgagagcctggaccatggcggaggcctccgccgacgttgctcgccaccggatttggcgtggtctacttcttcggttattggttggctacttggcttcacgtctcttccaccccaaacaagagcttaattgggccgatctcaagccctagaaggaacttgcacttctcgaccaaaaaacccaaacaaggcctaattgggtcaattccccctatattctcgtttcgcacggctcaaccgctcatcaagccctagatagtgctctctctctctcttcgctcgattcgccggtgatggcggtgccgccggaggcgacgagggcgccgccccagactgaaggacggcgtcgaggtctgcgtatttgacgaatcaccagaggtcttctccagagcggtgcacgccatctcggagctcacagccggggagcccgagccgaacttccctaacgccgaagtcgagcggctcgcctcttcattaactttcctcgggtgagaaactccctccttgctctgtctaatccggtacctaatcaccgcggcaaaattggtaactttctgttgttggcctatttagctgggtggagtggacgaatttgtgtttaatagtatcgtttatcagcaaagcattaatttgttagtcattgatgcaatttcagggagcttttaatgggaaaacttatgtggcatataagctctctttaatttattcattgccttatgtgccacacgcggtggcaaattttattggaatttgttaatttagatcccaagacatcgctgctacacaaacaggaaaaaagcagttgtcacatgaatgctttggtgccgtttcattattcctgttgtggctattagaattcatttggcttttgccactgcaattgaccatattcttacttccagtatccttaggtaacaatattagctcaatgcacaattttgtttttctattaattagaacgatacatggtttttttttcatgtcgtaaacaaaatgcaactgcatttttagttgttttactactaattcactaagtttaagtcacttttgttctggtagttatatttccttaatctgtactcatctgttgtttgatgactctgatcgatgatcatttttgcacattgtgactttctagcttaccatttgatgttatggtttacggtacagaggagtagcgaaacttgatctcctttatatagaagccactaagtcagtgagccccacctttatttgtgaagactacttgttagctgttactactctgtattcaggattgacagattcagtaacaactttagttattagcaacctatagtagcatgctataactagtattattaaccttgctagcttttatagagcaattacacatactgttgtctctagaaatacagtgttattcttggatgatttatggaatggatgattcagaagtcagaagctaaaaaaataccctcatttatgcaatcatgcattcaacataaataaatcagtaaaggctatgtgcgcaaaacctctagaagattctttcaagtacgcctttataacagctgaagcatacagtgaatttcagttgttacaaatggaaatctagttagttctgcatatgccaatggggaattggggattctaggagctacatttggggagcataaagatacacagctcaaaagttctgtaaggctaattttgttagttctcctcaagaccatttaaattgttatggaaaacaaactaaccaagtgtgtcatgaaaatcaaagttttcatatggctactcttttatgatagattgaacaccaaagatatgcttgacaaaaagaattgtgcttcaaaagatgctaacatctcttatgttctgcgctcaactagtataagggagaccttgatacatcttttttcatgtgcccttttagttgaagggacaagaactggattcagatggaatattaatttaaatttgtttcaaatgattgttctaccaagaatcggcttgaaaagaaaaggtttcctaaagattatgtgcattgcatgttggcacatttggaagcagaggaatgaatttaccataatatcaacccatcggtggatcaatggtttcaaaacttcaaagcatatgtgtaggatgaatgagcctttaagatctatagtctttgattagttacataacttgttaaaattccgttttgtaattgtaactagactctatatctatttcttatactagcaaaagggcacgtgcattgcaacaggaaactataattacaataaaagttagataattcatgttaatctttgtgattcgatccctttaagagaaatattgttattatggatcttaacttgtaaaatagtaacgagaaattgtaacataacctttagatcatttaggaaaaaaactcccgcactattgaaatgaataacatggcataacttctattgtccctatgtttttactcgctccatgttgttattgtgcatttgattcgtctaatgtgaccttgccttgtcatgtgatcaagaagttaagaaagtgagagtggttggctgacggccaagtgtggtgatggcagcaaggatagagggggcgaggcagtggcacgcctaactctaaccaacgagagcaagagaagagcagagccaaaattagacactaacatggttagcaaactggatcatgtgtgtcgtgtgttgtaatttggttttggaaacaaaaaagattgtaattagaccataatatagacattgtgaaggaacacgatcttgatggaacactcgaacccaatcaacttaaatatataataaaaattattgtagcctacctatctcaaatgttgacaagtataaggctgtagccaatcaatgtatgcaccaaagttgaaaggaaagagccattgccaaactatataaattactatgaaatttacactcactatattacagtctccagctaatcagaatcaatcaattgggaatactgtcaggccaacgccaagcagttataatttatataggaatatagagtgcaatccattcttttgtacattgaatgtaatcaaattacattcaaattttaattttactgtgcataaattcacatgttaatgctgtatttctggttaatgctctaaattccttagagcacccgcaatggtaaagtaaggtgctctctataaaacatgtacatctcagcaatagattagattaatagtaaatcacctcaatagtatgtctacatggatatctatagctctctcatccattgcctcgtttttctctatagactatctctaagttagtagatagttttactctctctcttcatttaatctcttccaagtaggaaaatatgatgacatggatctcttgtagagagcatatagataaccattacgggtgctcttagtatgtagagcccccacgacctgttggcagcttgcgaatagactcactaaaaatgccaattttttttttaattctatgcagacactgatgagttagatccaacgtcccagacatctcccggccgcaccccccccccccccaccacgcatcgcctccaccacccccatcacgccgctgtcgccgtcgccatcccgctgctcgtctccgttgccgtccccgcccctccgcccccgatctacgcctgggcacccgcctccgcgcccctagatcaccgtcggcctgagtcgccgggctcgtcgtcgccaagccgatcccctccgcagggaggtgcagaaaccctcctcccctactggtcttttccttttccagtttgattcttgcaagttctagagactgatacaatcatgtaatttggaattcaaagttatgtgcacttagaaataataattttgctcatactcaccaaatccctttgattcactggacactcaagtgcaatattgaatccatcaacataacggaatcaaatactggagaggattggaacagattacccccatcaagttggtgaaataaaggagcaattaggacgaccactaaatccgctaatggaacacataatgaacagaaattccttagagcttggagtaatattagcactacagtcactatctttgaaaacgatcaggggagcattcattaccttggcccatgctaacatcagttactcctccactttgactggaacacctcaacacatgtgtcatcattagtttgaacctgtgaacgatgagtttgctattcacttcagggaagtaagctttagtggaaaccttggagcttatgatatcaatctaaaagaccattgagctaaatatatgcaaatctggagttgatttggcaaccacaaaaccaactgatataaatccttgagtccatgtatgaagaaaccacacttcatttttggtgaagccacaaataaaccctaaaaatgatcaaagacatacaatactgtggtattagtacaatgccaatttacaaaaattgaacgaatcatgcatcacaagcactgtttacagaattttggctctgttcatagagaacagatcttcaaagcaaaattcatcctctatttccaattattatttttttgggctttgattcactcatagtagagaaataagagacgcaatagcactgcctgggcattatttgagaagaatgagaaacctatatgtaaattgtccatcctttttctgtacttatagtagcaaatcaatagctcaactaataatgtcattgaccaatggcaaaaaaaaaagatcctataagactgatgtttgaataacccaattaatcaatttttcacctataattttgtaattccatcatagcacaaatgagagagctatgaggtctaacaagaaagaaacataaaccacatcgtttcctttctttttagagcagcacaaatgagaaagagctatgaggtctaacatgagccttctattcaagtattccttgttggaatatgttggtctgaattaaactccatgcactacatttattctacaggaattagtatgctgatagtttacatcaatctcgctgcatgtgcactacaagagaattatgctattgccacaaaaatattgcaacaaacttttattcgtggccagtgcattattctattgccatgtccggtcgccttgtggcaagtagtaaattatattacaacaatttagtattgttgttatactttagttttttttcatggcaattagtgtattttctctagccacaatatattactgttccagtaattttggactctttacaacataccaaaattgttgccacgacttggttaaattgttggaatagtactttttagtaaaacaaatattttttaagtgatgtaaaattttgacgtaactgatatggtctcaattattgtaccccttggagggactgaaatttttttatggcgcctaagcacaggacggtgggagttgtttcagataaatcaacgatcattaatctaactagaatgcctcgtttggtcaatttatttgtttcctttagtgtgtgcatggatttagaaataaaattcaaatgccagtgacaatagttagtctgagcgggagcaatgacctcgccaggccgcatgcacgcaccaccacttgctggaatccttgcctcggagccgtcgtctcgccgtggtgctaggtacatggctgacgctcgctctcgccgaccctgtgtgtgtgtgtgtgtgtgtgtgtgtggatgagtgtgtgtgtgtggagatcagtgggagaccacgcagatagcccagaatttgctctcaggttggggcaattggtattccatagttttcttcagattgtggatctcttcccctcttctgctcacccgatcccctcgtgccgcatgcgcacgaagcctttgcgtgattggcgacgcctctcctccctccttccatcctggatttttcccgtctgtctcctcaggcctttcaaccttcaaatgtgccaccgcatggattaggccataagcaattttcttagaaatgcacatgtcctgtaagaaaatggaatgcttttagttagaatggtgaccctttgtcaattttaagtcttcatgttccacttcaattagttggaatgaaaattccttgtcattcgaaggcttcaagtcccaatttcaatttatggttgtaaacttggagtattagtttatggtgtatcagcattcaacaaagttatgtgcagtttgaaaagagggcaatcggtccataatttgtcttgcatattatcttctcatttgctagttcaagatagcctactaaccactttgtaggaaggtcatcctttcactaattccattttcccttttacatgtgtcgaatttttattaggcttctctgcagctaatacaggaaaattactttagtttctactcagcattcttgtgtgataatggcgttagcagcaatctacagccttttcatcattaacaaatctggcggccttatatactacaaggtattgtttactgtactcctgtttctctttgttctttcaaagctggagtctgaacaccttgcacctctcatttatccaggactatggctcagcagggaggacggacaccaatgacagtctacgcttggcaagtctttggcattccatgcatgctatctcccagcagctgtcccctacacctggctgtgaaggcattgaccttctacaagcccacaactttgatctccattgcttccagtccctcacaggtcttttatcatcctcctctgttgtaaatttgcgtgaaaatctgacctggatgcttataactgcaaagtttttagtattattgggttggaagtcaattattacagtttgtcgttttttctataagtatgcatcctatctctaatctttcactaagttactctttagttgttctgttttctgaatgttgtggagatagtcgcatgaattataagcacataatcatgggcttctatcttgcggttgcaagcatagtctgagtgtgatttacaggctttgcatttgctgaaataatgtttttgtacttgtggcttggcagttgggtacttggggcctgttccttgaagtgggcagcattctcagttgtatgcgttgtgagcatgatcactctcactcgtagcttgcttgatggacaaaatatattaaactaacaaactaacaatagcacactcctataaatggaagtttggacgagttacattgatatatgtgttcaagccatgccaagacttcagttcacgggaagtataaataatgatgaaacaagtttggccaaactaattaaatttagtgcttgattctattgggtattgtgttttctagtttctagtcatttttcagcagcaagatcctagagttctgtccttccaaaattctcgaaaactttgatacaagggagttaatgtgtgagacaatagtattaatctgatacttcaataataagtgtggcttatggagccggattgcaatgtttattgaacttaagtgtgaatgtctgacagaagtgagatatttcttaatctatactaggtgcagatatatacagcaaaaaagacaatgaaagcattgggatatgctgtcctgctcagtatatctttttctatgcaaaacaatttaattggaatgttagagaacatactttcttgactatattgtgccttttgatctttaagtaggccctggtacatctctagagttagttatccagttatactttatttggtgactgaaaggaatgttgctaaattggttcaattgtaaacatagtgacccacttctgtttcatggggcaggtgtttttccgaattgttgattgttagaccaaaaaaaaattcactgtccttttgtggtttgcacttgcctgccgctgatctgtatgattttgcttctgtttcatcagggacaaagttttttgctgtatgcgaaactggtgctcaaaatatcgagactctactgaaagtcatatacgagctctacacggattttgttctgaaaaatccattctacgagatggagatgccaattcgttgtgagctttttgatctcaacctggctcaggtcattcagaaggaccgcgtcacacttctgggtcgatgaatcatttagaaaacatgacgcaccatgtctttgtatgtggcttatatgacatgtatggtgtcagtagggtacttggaattcaggcaagtcattacactgcatcacaaagtccatatacagtgtgcagtcgattccttctagttctgaaaattactttattcctgaagtatcatttgtgccattttggactttatatgtttccagtcgcaccaaccaattcaggaaggtgcatcacacccgtatttgcatttgcatctggcaatgaattcttattgaagagaacatatgaacaatgggcaatttgttttgcaccaatctctatactcaatataacatcctgaatactaccgaaactaattctttaactttaaaatcgcttgtgtgctgcaatattttttgtatgtgcgattaagggtcgtatggaaaataatgatcaatgacattacaaaagctaagaaaattaaaatgtaatattggagcactgtcttcctctaatattgggtatagaggtttaggcccctttgattcaaagaaaattcataagaattttagaggatttcattcctataggattttttcctatatagtcctttgaatcaaaggaatagatcttatagaatcctataaaattcctatggattggctaatgccatgcatgttttggaggaattctaacatgaggtaaaacctcttggaaactttcctttgagtctttatctctcctctaattcctgtgttttttctgcggtccaatcaaacgaccaatcctgttttttctgtattttgcaatcctctgttttacactttgaatcgtaggaatgagaaaacataggcattcctgcgattcggggccctaacaccattgaattagactccaaagagtgtaaacgacattcaaggggtggaactgttcttgggacatcacgtggaggccatgataccatgaagattgttgacagcatccaggatcgtggtataaatcaggtaaaggaaatgaatgcaattttattacttttcggacactgttttaagaatcaatttacggatagtatgaagattcttctacctaatcgaaacatcttacaatcagcgttgattacaagtttgtgcgttgtccaggtttatgtaattggtggtgatggcactcaaaaggggcgcaggagtgatttttgaagtaagcacgattatatatcatcttgatgtgttcaacctgatcaaattatagtttttactcccaagggttggtagtgtatttcattataaataaaatggactgaaagggtcaattaggtctagagttttttttagggggagggtcgaataggctaattaaaaaacttaagtaaacatggaagcagggattttcggaattttcgtaaatggttttcggaatttctgaaaataacagagcaggcgtgaatcaaagtagattctagatctaacagcctaccacaggaaaatgctagcacaaacaacaactagatttatagtggcacaatcaagcaaagctagaggagagggagaaagtgatatcaccaaagatgttacacacgaagttattcctggagttcgaattcttgagagaattctactctctgttgaggggctcacaaagagccggccttagctaaccctttcttcaagaggttgcacaaaacacttctctttcggaggtgagatctaacctgcacaagcttctcccagccaaccacatgtaaaatggtggctcaagagcgacacctagccgtttaggagtccttaacctctaagagtaaaaaatgatgcaacaaattcccggagatgatgtaagtgctcacaaatcttcacaaagacaacaagaaacacccacacaaactcgaatccacacctcacacacacacacaatctgaatcaaacccgagtggaaaggggaaacaagaaaacaaggctcaaatgaatctcaagtgaagcaaagccaagggcatgaaaatatccaatcagtccagcagccctctcaagaggagagagtgggctatttatagccatagctccagatctgcccgttagagtacaataattgcatttttcggaaaattaattttggaactttcaaaaatttccaaaacagcaaaacaggaagcgaacgatgattttcggaaattccgaaattttttttggacaaatccgaaaatatctagaaccaaaaacaccttcagtagacttttggaacttttgaaaattgctttcggataagtccgaaaatttccagaagcatgtttgacttgcagacattttcgaaaattccgaaaatgagtttcggatgaataggtgatttatttgatcatccatatataaaatcctcttcttcttcttttttttttccagaaatttacatttctcaagtaaatgaattagtgtgctcattgcaatctaggacttatcttctcctgccaacaaacactggttgcatgaagaaaacaaatggatgtacaggcgctgaagcatactgttaatgccaaattttggtaagcaccgaagtcgtcatcgatatagagttagtatcggcctctggaattggccgatggaaattatcggtcaccaacagtaggatttttagtggattcgattaaggaaattaatcaattagaagaagcttactcagaagaggtcgagttcaagaaggatgcgacataacaattcaagacagagtaagtttctttttttacttttaggaaaacttgtttagagtctgatcatgacttatatattttactttatctttaggaaagtatgtgtcatgtccaataaggactagtatctacccatgggtataaatatttatacgcaggttcattgtaatctatctctcgatcaatacaaatttcagcgcatcgccaccctctttcctaaggttttatcaccggcagaacttggcacctcgacgcggttctacattgctttgatctccggcaaaggggcaagccctaacttccgctggctctggcaattgtatctgctatattggcattgttcaaggctgcatcgtttcgatatcttggattgctcttgttcagttggtatatttgtctacctgatatttcaattctatctttaattgtattgtgtttagaaacacatcggtttagttgagattgtctcggttaggtccaatcttttatcttagtcgatatatctctacaatcacaatgctattttaaatggattagttatatccatcacgctgagcatagatctatcggcttacctacacccatgaaatcaatcaaagcctgccattttgcagtgggcatggctagcaaaggcctgaggctagcaaaaaacaaaatttattttttttgtgggttatactcatcggtgacgggctttaccttaaagtccgtttgagttatagtcatccgtgaagggcataagtttaggcccgattgagattagagtcatccgtgacgggcgatagtttaggcccgattgagattagagtcatccgtgacgggttatagtctacggccgattgaggttagagtcattcatgacattctttagtctaggcccgattgaaattagtagtcatcggtgatgggcgctagttggggcccaattgagataggtcatccgtgacgggctctagtttgactagtcgtctgggtcaaagctatcggtgacgggctttacttggggcccgattgagataacttcattcgtaatgctcgtatgcccgattgagataacttctcacatcagtgacttctatgctgtgacggatgccatacctgtcacagatggggttgctgcctgattgagatgtgggtgactgttgtagtgtatctaagtgtcaaaatctatatctaatatatagccgaattttcaaaacctattgacatcggctagcatcgctacattagcttgttggccgattagctctttgatcattagtttatctatcttgtttcatttgcaggatcaaactgactgccacgtctgaacctgataatttaggacctgcactggacctgcactcgtcgtaactggtagagaggaggcccaacaacgagtttttgacagggatgcagaggcggagataggggcaatggtggctgacgatgccggtgaaaatgtgggcaatggtgttggcggacgatggtggtgtggaggcctgaagccggtggcgcgtgtggccaacctctgcgatctcccgccacatttcatcgttcctcatcgtatgcatcagtaaggtcctgatatggagctcctgaaattttaagggtaaaggttagggttgagggttcacactatttccttcagtgaataaaatcaacactataccattgttagaatcttaatggctggctcccttctatgtgcattgtatgcctctccacaagaaaagtaagacgagaacaggaaagactgagctactgctaccgctgtcactatatcttgccgccatcgttgccgtcaagcaatcactcttccccctggtcctacaccctctgttggcaactttttgtgacaagtcgacaagcacgatcgcaacacctaaacgccttacggtgatatagagtcgccaaccacctcgatctagccaaagggccaaatcaagatgggttttgtagaaaaacagctaaaccggctagcagagccgatttagagatcaaaatcagcctctaggccgatttagatcgatatgaggataactacccatctcgtgggcaaaacggaaggttttcaggacaaacctacaaagaggtgtcgcactctcgcagcggcggcggacggtttatggcgcaaaccgacaaagatggactaaaactagggtaaaatagaaaacgtagtaaaataacgattcaaagtaaattgtattggggggttttacaatgaactggccttgtcccttaaataggggttggtcttgccctctacaggcccttctccacgccaaactcgggatagaaaccaaaggaaacacgaaacatgccttcccgagcaaggagacccgagacccgacgaaaacagactcggactcggaccctgccggtctgaccgcccacataccggcggtcagaccggccctactagctggtcagaccgcccacacacctgtggtctgaccggccatgtgaaggaaacccgtcactttccaaacattggcaattttctcctatttcgtccttaggtgccaaatttgggtgtaaacacatgcccccctgcctttttggtgaacatacgtgaacctaaaagcatagaacattttatctcagggcgataatccaattaccggccataggacttcctaagcatcttgccaaatgctcgaagtatttcttcaagtatttaccattaattgctctccgaaaacactgtcttgaagtgtcttcatctccttcaaagtcttcaaacgtttgtcgatgacgtcttcaaaattacttcccatcaaggtcttgtaatcttcaaccgacaagtcgtcttgtttgaaataccgaagagagccaagatttacctcaactggcaaaacggcaatttcaacaatgttttattactcgacttggcttatccattagcctgagcgtagtaaagagaggaactcaacaacttaatatcataagattcggcaaaacttatcacttctttggacataaaagaagctcctttaacgtttgaggaataccgaatctatgaacaatatgctttaaaataaagtcaattatctccgtacaagtaatattctcgagcggcacggcttcggcccacttagtgaagtaatccactgcaactagcatgaaccaatgcccttttgatgacgaagaataaatttgaccaatgaaatccaaagcccaacctcggaacggccatagtttaatgataggattcaacacagcggtaggcgctaattgaacattgccgatccgttaacaagcttcactccctctgtaacatttgaaacaatcatcaattattttcggccaatgaaaccccactctcctaagcaaccaatttatcttacgggctgattgatgaatttcacaaatcccttcatgtactactctcctagcaactttagattgatcattatctaagtaatactccatctatttttcggcgatataatatttgagcgcttgccgccgaatctttcgatcaaccttaagtgtaggatctttcaaatatctaatcaaaggaattctccaagctatttctaactcatgggcacaaatgtccgaattcacaattaattcagccttttaatcaattgtaacgtgccccctggctctctccccgagatcgatcagaccggcgacgcaatgcctacccggtcagaccgctggtaccaccggtcagaccggtcgtgcaatgccggttagaccgcccctggtctatgacttcgccaatttcgtccaaacttttgaaatcaagcatcggccttaagtatatatgttttcttcacataatagccagatgcttggtgtatcaaattatcggaccaaaattcctcctctctagacatattaaaaattataatatccaacaaatatgtctagatgaatactaattcaagtggcttttgaaacaataatcatcatgtcatcaaaacacttagccaattgaagtatgaacaataatgaatcaccaaaatcatatgtgtcacatgcatagattccaataaactacaaatataagtaatcggcttgagcatgtatgtaaaatattaacaatgccaatgttcctaaagaaaaccactctagagcaaatcatcacattgaccattgacattagccgaattactagtaagcaaaactttcatgttgcaataaatatgaaatctatatcttatatggtgatccataaaaacacatatgatttggctttaaataaatatcaaagagtcatgagccaaatcatacttcaaacaaattatatgccaacctaccaattcctctacttagaactggcatttgcaacatgtatgtataatatcaatttgataagcaaaaacacacatgtgctagatagcaagcaatgttctaacatggcataggcatataacggtaaacacaataaactcataccttgccttagcatccaacaaacgacagctcaaagatgtgatgtcgtatccatcgccgttcatctctcttgatttcctcataagcatattgatgtcttgccccccaagcaaaatcggctttcttggttgcgcgatttcgaaggcaagatgaataccgcactaacacccatagcatcatgtgaaggagacttatctctaatgaccgatgattcttctctcatcaaattgaatccatcactactccgtgaaatcaccgatcttttaacttctacttcttaaggtctccacactcgcttaggtgtcgttcgaggctctaaattctcacatgttttgttctccatatcttcggtctctttttctttttgacctatggcccgaagacgctgtagcctcctcttttgagagcgagataagccagaaggtatccacttcggctgtggttgttttccaagagctaagcaatgactcttgatatttttggtcgaagtagaagctcccgtattgctctcaattttcccattcttctccaatgcccctcggtcagaccggccacaagccgtcggtcagaccagccaatagggtcggtcagaccggccacaggttggcgatcagaccggctagatgcctcgatcaaacctccacttttgacaatcacggtgtcggcttcgatctcctttgcttgtatggtttccaccgcatctccagtaggtacttgagcatcttgagactcctctttgacatcaacgacctctggagctttggcttctttcctcacccacaccttcttcacctttttcactttttccacctttgatccaccggaccgattcttttgtgggaaacggtcttgtcttggattagatgaatgacttggtactgacttaggtgattccttccatccttgataatacggcataggtggttgaggcatccatggcatataatacataaaaggataaccatatagtgacattgaatatggataccatggcatcacaactggaggtttgtatggagttggtatagttgatggctccgattggtttgatgtttgaccaaatctcttcctacgagataatcttggtctttttgaatcactagtttgattatcaaatcgttgaccggctaatcctttcttgtacttagccataaacatctcaaaagtgagcttcggctttttggtcatttggaaactagatgactcatcctttgcaactttatgatcttcggccttcgcatttttgatcctattcttgggccgaggatccccaataataacacttttccctttctttttgtcaacatcaataggactaatagggagaggattactaaaaatttcggtctatggcatagatgtaaccgaaattgtttcacaagtgaccgatgaagtatcaaccggtctttgctccatcaagcttgcatctttgaaataaccatgaaactcatgttccatttgtgaccatgtagaaattgaattaggagcaagcgaactaaaccatgtagatgaaaagtttgacaaagaaagaggaagcaattttaacttaagcaaatcatcattaccggccttaccacattgatcgatgaattggccgatatgctcctttgttgttctagtatcctcacttgtgaattttgtgaaattgggcacttcaaatccttgcgggtatgggaccgaatctacgtgttcaggatacggcctttgatatgtatgcattgctactttggattctatttcactactatcccgcaagacattatcatcatcttttccaacatccacatgaccgatttgtgattcggttttaggtgacaacactatttcactttcgcttgtgatacaatccgaaccgtcacttagttcagctatattttcaatgatgctattctctaagctagcaacacaatccgaatcatcacttgtttcggctattccatatttgtctaaactagtaacacaatccgaaccatcgcttggtttggctataatggttgttgcattattatccaagctagcaagacaatttgaaccaacatttggttcggctataattgttatggcatcattgcacaaattattaacacaatccgaaccattgcttggttcggctatacatgatattgcactttcatctatactagcacgtaagctattgtcatccactcggctttcctgagccagagcttcatgcaacacatgatcaacatcaagaaatatctggccattcaatttctctttaatagaatcaagcaatccatcatatgcaatgtcggccaaatctttgtcagttattttcaaactaaaacatcggtttttaacatccctaaatctcttgatataatcagcaacagattcattgtatttatgcctaaccgatgttaaatcagacaacctaagctcagtttcattagtgtgaaaataatcatgaattttttgttctaattgagcccaagtagaaatagaatttaccggtaaagaagtaaaccatgtaaaagcagtaccggacaaagataaagaaaacaagcgcaatttacatgtatcccaattagcctcaccacattgcgctaaaaattgatctacatgctcccatgtggtcctactatcctcaccactaaacttggtaaattcaggaattttataaccacgaggatatgggataatgtcataataatcaggatacgccttttggtactccctagcaagattccttagctttgcgaaattctccctgatagtatttctaaaccaatcctccacagttttaggccttggtggatctggtggtggacttggtggcctagaaggtggttgttgcggcacaatattgttatattggccatacctagtatcgggaggatatcccctattaatatcattgtaggcattagggatatgtggaatagcatgactagcagtattaacaggtgatgaataataattaaaatcagtactgctagtcgtggtatgaaaacctagagaaattcccagggaaccggtctgaccggctatagatagcccggtctgaccggtagtcagtggtgcggtcagaccggccacaggaggcgcgatctggccaggatagagcacggtctgaccggctatggtaggcacggtctgaccggcgtagcacacggtctgaccggccatggtgggcacggtctgaccggcataggatgcggttagaccggtgccatgaccagtcataccgttagctagattttgcatatagccgattcctgtgtaattggccatataaacacccattgacccccatagcattataagcatattgtatagaagcaaaactagaagtagcatatgcatctacacaacgatcattaaccttttgaatagcaaagtatgggttgggcgaatcggaggttaccttttggtgaaactacaacttgaggtagcggggcgtttcctctcacgacgccgtggtcggtcctaatgtattgtgtaatagtattgttgaacccgttcccgcttatcatagttgatgaagaaaatccttgattaatttcggccatatagctcatagccaaaatatttgaccgaataaattaatatacggtcttaaaattttccttgtatgctactgtactcggcaaaagtatttgatttatttggtgtactcggcaaaagtatttgatttatttggtaatcaaccgagtagacttagcaaaatttggaaactaatctaaagcttcacagtgtaaccgatacaaattgaatcggtttttgtctttctttttttaatgtgaatagtaatagatcggcttgaatagcctgatcttttctaacccgtgtacagtaagctttggtcaatcaaatctttctgttgccgtgtggaacaaaaaggaaacaatgttgctaatccggctgctgctccctgtgtgaacacagtttaacgtctagccgtgatcgaacagaacaattaagcttaagcttgaagacaaaaccaatgtcggcgacaataataattacagtgtaggttaattccggctgtttagccgaaactaattcgatgattcgacgaaacagtaattattagattaaacgaaatttggccgtagtatggccgattagatcgttccccagcgaagtcaccaaaaatcgtgttggcaactttttgtgacaagtcgacaagcatgatcacaacacctaaacgtcttgcggtgatatagagtcgccaaccacctcgatctagccaaagggccaaatcaagatgggttttgtagaaaaatagctaaaccggctagcagagccaatttagagatcaaaatcagcctctagttcgatttagatcgatatgaggataactacccgtctcgtgggcaaaacggaaggttttcaggacaaacctataaagaggtgtcgcactctcgcagcggcggcggacggtttacggcgcaaaccgacaaatatggactaaaactagggtaaaatagaaaatgtagtaaaagaacgattcaagtaaattgtattcgggggttttacaatgaaccggccttgtcccttaaataggggttggtcttgccctctacaggcccttctccacgcccaacttgggatagaaaccaaaggaaacacgaaacatgccttctcgagcaaggaaacccgagacctgacgaaacaaactcggactcggaccctgccggtctgactgcccacatacctgcggtcagaccggccctactaaccggtcagaccgcccacacagctgtggtctgaccggccctataaaaaaaacccgtcactttccaaactttggcaattttcccctatttcgtccataggtgccaaatttgggtgtaaacaccctcctcttaacaaatccgacggcccctgagccagatccggtatcgaggtggagagggagaggaaaagagcggagaatgagagagggccgctggtggggtggagagggagagaagacgataatggcggagatacccgtgcgtcgccctctagggaccggatccaccaacgaggacacccatggtcgaaggtggttctgggtgaccggatgcaccggtgaggagaccgactccgaccgcccccgagctagatctagcataatggagtggagatggcgagaagggagaagggggcggcaacggcttgcaaccgtcccatttccctaggtggccggattcgttggcaaggagggcgacacacggtggtgtgacaaaacagggacgcggcggcggcgaggagggggggagggtagtcaacgacggcggtggctaggggaggacggtcgatgatggcaataggggagggcagatggcggtggcagcagccttaggacggcggcggcgcggggcacagtcaggtggggtagatgtggttttgttttggaaaagcccctttatttttttatatttacaatgctacccctagaattcttcgtgttgtatttctctgaaatacgaggtatattcatgatattgtgatattccgtgtaaacacgataggttttttgcaaaacagccaaccacgtgttaatctctccgaggaggaaaaaaaaaagggaaaacagagaaccggtatgggtgggactattatgaactaagtatgccttcctattccagtactccttcggtagcagtccagcaaaggcttaagggcaaagggagtaatgaaagcgggaatgttgtttcgcatataggacaaaccagatttcgagttacttgtccacaccaactgatcaggcattggaaaattgtccaatatttgtttgagcgaatcatcaagattgacagttccctcacaacacctattcctcgtcttgaagatactcgtaaggcccagtctgaaaaagattgatccaagaaaatgccatacaagttttttttttcaggaaacatattttttaaagtttgtagcaaataatgtgacaataataatccgatgaagtagctaaaaagaaaataaaaagagccaaaattctggtttctatgctacgtgccctcggttatctttctcaaactcaaagtaggcagaccaaggtgacagaaaaacaagacagggcttgggtatcagagtatgccacagtggacaccataaggcatgctgcaagggagacaccagtatgagtcatcagatggccataggttgtttgaatttgatgtcgcttagcttgacttcgaaaccagggtagtaaaataaatgttcccagcatatcagatggctgatgcaaaagaaaaagggtgttcagacttcagagtgcaactattcagataacaagtactggcagttaaaacatagctataacaaaattgcgcagaccttcttcctcatatgaccacatatgctgctaaaattacatattaagattacaacaggtactcttccaccatggtttcctggcacaggagtataacttttaagttgcatgtgttaagaaccgtctcccgtgatgatgcttgtcgtcatttcttcaatgggaactcaggaatattctgacgaggtgatcttgattcacgacgagatctacaaggaaacaggaactgaatcatggactgggctaaagaaggacgtcagcccacgataggagtgccatctcagttttgctggtgacctggaaaagagattagaagaacgagagagcaagagtgacctagctcctcgcgcgctacaagatgcaacattaattttcactggcatgcagccaatacagcaggaggatgagtgaatggtgcagttatggtctgattaaaaaattgaattcgtgaatatagacaagctaaagcccaactattgtataaaccatcttaaagccaaatattttcctgacatggtcatttttggagctaatagcttactacactattagacttgctctaagctgagcatttttcctggagcatatttatatcacacgacagatatgcagtgatggcaaatactgatggtaggcaacaccaccagactaagcgagtcataaaataagctcatggcagcaataacttgactaggtaagccggggactacctaattgtgatttctaatgaatacctttccatgtttctaacaaaatatgtcaatgggaagaaaaggtatttacagtaattaaacataattctgctcgctggactgctacccaatctacagagagaaataattacttccagaggttcacagaaattagacattcactattgtctctagagcagttactatcgaatttcagtaccacagtcaaaacttcattaaggaaatgaaaattaagatagctcaaacccaccttaataactctaggcagggccaataaggttttttatttctgcaaggcagtcatcgagagctttatactcaggggtatgtaagaagtctgaagcctagacaagaaaagttccaacaatgagcaatctggaggaattgaacattaaaaacaaacagacttaaatggtttagaaatggtatattttttctttttataatgttgtttccgagccatttgttgcaggtaatcttagcatcccacaataaccccttgttctagtcaatgatcctaaagtcatgtccaacctactaatttcataccagggaagaggaacagtgcaaaaaaaaaaagatacctgttttaaggagcttttaaggtgcatctcagctgaaaataactctctttggcttccagtcgaagaagaaatttccatatagatcttgcaaagctgcagggaagcttgagcatacttagtgaacttcgtctggtcatgccatagtccagaaccctgcgagtacaataataaattaataatatgacaggacaaggtaccacaagattaaatatacatcaaatataaaacagccagcattaaatgatttcctgagatgaaaatgaagcagaaatctgcattctacatccgcagacttgctgctaggggtcaacatggtaaaattggatagtgatcctctgcattagagtataaaattgtgtgttacacatttttttttctacaaggaatgttcacctcaattcaatttatatgtggccatccatttagatttgtttgttttttaatattaagaagttcaagggataatttgcaatggaagtaggtggggtggcagattcagggccaccaccgctaccttataaaggagtatagaaaatggagaaatgctacagtaaattgcattaagagaaatctgcaccatccactcacaatcctatgccaatggtcaacatccacagctcgaatgtgatagtactagctgactgataaatactgatgctacagtacctaactgatctgagccgtttgtttttaatgctcaagtgctaatgcaaaacactgtagcaccttgcattagcagttcaaaatgcagaggatccggatccggtaaaattaccatcctgacttttgcaaaaagaaagtagcaaaagaaagccagtgtccattcaagcatgtcatgcatgaactcaacagaccgcaagatcactgcgacaatacaacactagcatgctatgctcaagcagattttctagtagagcaacagttaagccacctgccataactatcatccaagcaaggtatgtcagggactcggggccatgaggaggtgaaacacagaaataggagaaatcagtgaaacttttaatggtaggcagacaaacaatatgctatgctcaagcagtagcatgtgatggtcgtggctgttggctccttgctcaagtaccttttgataagccagcaagagatagccaatgccaaagtgcatgaagattttaaaaagatgataacacgtgggcatacaattttcttaatttgtttgttcattcatcatatcttttgctcaatgcttgcatataaaaaaatgtacgatagatagtgatcccggtcaatcagaaggagcatggtttggtcaaggggtccattagagtattgggtgtacgatggatagttccgatcagacaactacaaaaatttaaggggtccaaatggacctttctttttttctttttctggcaaatggtttctacccaaaactccaagcatcataaaacttatgctctctactagatacactggaatccaattttcccagtggacaggtccaaattctacttccaatcgagatctggaatgttgtctcaataactcaggacagatttgtgaaaatttgatacgcgatctccattacacacaaaaaaaaaaactctgtccaacaaagaatgcaatcctagcatttgaaggacaaattagtaggaaagtgaaatggcctaaatgtccctaattaaataaagggtgcttaggagtgggactgtgggagggagattaggggtaagatggggagaaatttgaatgagagatgattgatgggacatgtagtactctagaattgtactttttgtgggacaaaatttgaaagatatgattgcattttttgttggacggaggtagtagcagatagggcaccccgtcttacaatgagccaacacactgttttgttggtacttggtactagaaggctccccaatataggcaagaggaaaaggcattatcactgtcagcataagcatagcatacgcacctggagagaccgaacttgcttcaacatagcttcagagcatgcgataaggttacccttcgtcttatgccacctcgcatataaaccccatatctccgaattgctacccccacttcgtacaatctacaaacaataccaatcagacttataatatcaaagagatgttggaattaagatgaaatgcaactcatagagcttacaaacctgctgaaggatatcaccaattatatctaacaactggttgtacttcctggtctcttgatttgcatcatctgaggtgcttctggaagattcagcttcttgagtatcagagagatgtgtaggttgttcttcaagcatggccatcaccttttccaacaaatcaatgttgaaacgtttgttcgaggataggtttagtaccattttgacagcctctagtgtctgcacagggtacctcatattatctcaataatcatgataaacaaattaaaaaaatcatactagctcgcatataggtctgagatattcaaatgagataaaaatcctcatcgagctaaatgctcaggaaaaacacatgtaactaaacttgtttgaagggtttatagtacgatccaaattacacgtggctgcatctcacaacatcttaggcatcatattacttgccaacatggcatcacaatgttttggcctcttttctctatccttatggctttcccgtgcctcggatctggacaagacaaggcgagaaagtggtgttctgcagtagagacctaaattaggttggttgactgttgtggattccttgtccttttggtttatgatttatgttggccatttcggcatccaaagtaaattgctctccactgggtggtgaccaccttggaggaccaagggcaggtgtcagatcgcttgtaggatagaaccatatgtagtttggacttagaaagtgcaattgtagagctttggcgcctacatgatttcttgcaacaaattgaacaaccaatgggttttttttcttcatggtatggtaaagtatggaaaactatctttaaaaagatgattatcaacatttcgtaatgaatgagaccaaaaaaaagacaaatgaagaaatagaccattgttaacaaggagattgcgtgaaagcaataaaagtgggtataaaattaggagatgagctctcgaatatataagaaacttatgcatgtgatgagtctcaaataaacatcacctaaaaatttaaatgcaagcttcaagaaagaaatataaactgagtctttgacatcaatacacagctcacctgttgaatacttcctgtgtccaaaagaaccttactgtaattatcccaaacctcccaactattcctcctaaaaacaattgacttatttttaatcagaaactttacagaattaaagtaataaattttgtacaatatgatgttatacgcacttgaactttacagcttctttgaatgcttggactgctgcttggctccttcctctaatcatgtgcctggatagtaaactacattagagatatattccaagagtgaacctataacac

SEQ ID NO: 6050 - DNA, 1296 bp, Oryza sativa
ttcaaacggtcagactggcagatcaatctcggtcagaccgatctccgtcgaatttgagggtaacttttatttccgctaaaagttttcggtttttgggtataccgaccattcaccccccccctcaggttggcttagttcttgtgtttcaatcctacaatatcattgtgatgaaccctgagttcctcttgacactcaaggctgttgttggcccaatctttcagtgagttgtgataactacgatttgggagaaacgttgacgatccgactacaaccatacgagacgttgtgttgcgccttagcgatcaatacacctctccgtgggttgttgatcttgccggtgcagatcaaccctattcctgcaagcaaatcgaagaaacaagcaagaataagataaaagcaatctgatattgcaaataggaatttaatacaaatgataagttggggttccgaagaacaagcagacgggcgatctagccaacacgcgcgctgcaagcaagtagcaatggctaaactttaatctatcaaaacccgactaaccctggaggggttactagctatttaagggatggaggaggtcagaagggcgtcctccctctgtttggggcgcagccccccttgggccccacttgggccagagtctcagacgaagttacaggcccataggcccattacagacaatgcagccccttgtttcttcaattgcggttactgagatggaatatcacaatgaggatggattcgttggaaagaggactccgagagctttccatcaagtactcacgggccgaaaacagagctcggatggagatttggcagccgtttgaagtcagcagtgtagctggtggccgaatcggattccagcacctggaggacttgatcttgatatcttcttgttcatccatgatgtgaacaatggttgtatccgtagtagccatggtcacatcacatcgtcatgacatagagtaattgcatatgcaaacattatacctgcaccaaagcttctcacaaataagctagccggatattcagtataacatgaacataatgtaaagtaggtaatcatatactcggaaagtatttcaataccataaatgtatttagaagagtattctaataaaagtacaaagcttacaaaagagaagagaaatgctactagagccatacccgaactcttccgaaggcttctggactcctgatttctactatattcctattccaccagctagatactactaaactaaacttgagagaaatgagagagctattgcttgaggtgtgtgagtgaagtgagaagag

SEQ ID NO: 6051 - DNA, 1321 bp, Oryza sativa
  unsure (1)..(1321): unsure at all n locations
tccttactcgtctcataggttttttctatgtggacgagatttatatttaccgctcgtgtcgcgtgttntnttgttgttatttttataattctttnnnantaaccnnnccnnnccnccccaggggttttgattgcagatccnatgctcgccgcctgcaggncgactctagaggatccccgccgtcaagccgaagggtgccgccgcttcttcctcatcgctgtcgccgtccgttgatcttccgccgccgctttggtcaccggtgagtttgccgtgccgtccgctacccgtaggtgctctccgttcgcgctgtcgtgccgtcgttcgccggcgagcatgcacgcccgagccgccgccggtggtgacgtcaccgctgacgtcatcgtcatcgtctcccgtgggccggccgtggaccggtcgatctcggccattcgttttggatggaaagatctcggtcgttcgttttcgtgagccgccgccgtgcacccggttcaccgcgaaccctaaccgctgacgcaataattaccttttccttttcaaaaataattcattattgcgtcataattcaattaaaatctaaataaatgatttaatcccatttaatctttgaaaattcataactaattcatcttagctcggatttagttggttcaagtctctaaatttttctaaaattgagatctacatgttaaaaatatccacatgtactgttcatgcttttttatgtgctgttttggtgattttgcacctttctgtttagattccgacgtttccggagagtccgtttttacaggagaagaatttgaagagttccaaggccagcaaggcaagtcacacagatcccaaacaaccctttgagcatgttgatcctgtttaaagctattgtttctattcaactattgcatttattttcgaatgtcattgggtggaattaacctattgtttgttatagcccttttgttcttgattactttattccttgataccttgggttattataacttgactagttggactatatatattggttcagctagatattagatatgattgcttagccatgcttagaaacattagcacattattgggataacttatgactcactattatttaatgttggcttaatgatagttcacgatggtcaatcgtgattggttaattaattacttgccaactaaaacttgataatggtgggttgtgagcacatggttttgagagtcgtgctcatgaaaattaaggaccggttcacgagtttcggttgtgaaacattaaccgtgccaaccacaatccagcgtgggcaacggctttaccttttgtatagca

SEQ ID NO: 6052 - DNA, 3061 bp, Oryza sativa
caggttttaattatcaaataattatcataacacgattaaccatcgtgagctaccattaaatctaaccataagtaataatgtaatatgattcatcccattaatgagctaatgtttctaagcatggctaagcaattatgtatatagcatttagctgaaccaaaccaatatataaggttcaagctaatcaatttattacccataggaaaataaagtcatcttcagccattaattaattaggaaaggctcaccacccaatgacattcaaaattaatgcataagttgaaataaaacattagctttaaaaaggttcaacatgctcaaaaggttgtttgggatctatgtgacttgccttgagcttcttcaaacgcttctgaaccttcctcaacgtaaacgctctcctccggaacgtcggaaactatagcaaatgaacaaaatcaacaaaatagtacaaaaacaagcataaacagtacatgtggatatttttaacatgtagatctcgatttaagatgaatttagcaacttgaaccacttgaatccaagttacgatgatttagttatgaatttccgaagtttaatcacattttcatccaatacagaaaattagtacgatttatataaaagatttatgatgtcatcacgacatcatcgccggccatggcactggaccacaaggttaccagcgctacagagctcggttgggctttccgaagacaccaacacgaagaggacgacgacgcgaactcaccgaagcaaagaactacgacaaacgacgactgacgacgaggtccgacggcggctcggctcgggtcaacgtcggcgacggcgctccggcgagatgcagcaacggcgaaggggcggacgggatgctcctccacctggcgaactcgacggtggtgacggaaggcggcggcgacgaccacagcagcggcgcggcgcggctgaagcagcgacggcgacggcgacgctagggctcacgtggtggcggcgctacaggcgacggctgcggcttggacttgaggcaaacggaagaggacatctaggggatgctatttataggctccgaataaagagatcaaactcggaacgaatggaatcgaaaccggaaaatgcgatggttagtttggagagataaactcgaaacgagttagattcggttgaaatacgaggaattaaactccgttttttgaaggaaacgaaagaggacaatgaggagataaattcccctcatccaatcggactcgcgagcaactgatggaggcggattcaaaggggaggcggcagaagaacagtgccgagggaggcattttagactttcagagaaaaggaaaagaaaggaatggagcagcaggctggcatggctggcagcccaagagaggctttgtgggccaaaatgaccaacggcctagagaaaggttttaaaacttttccttctttgaataattcgtgaaatgctatttcgttgattaaaaatacttcccttactcaaataattcctagaaaaatctagaaaatagataatcaaacaaagtatttaatgaaattttatctaactcagttttatgttgcgatttttcctagattattagagtttaacttgtaagcttttaaaataatttctaaaaatgcattaaagaatgaattattaaattaggcgattttccgggcgtgacaaacctacccccttaaaatgaatctcgtcctcgagattgagaggaactagcaaaaagttgagtatgagctgacttcaattcatcttctcgctcccaagtggcttcttcttctgaatgattgctccactgaaccttgcagaaccgtatgacgtgattcctggtgtttctctcattcacctccaaaattctgactggcttctcaacataagttaaatcttcttgaagctctatacgctcaggatctgtttcctccgtaggtacacgcaaatatttcttcaactgcgacacatggaacacgtcatgtattcctgccattgacggagacgactctagttgataagctacttcacctctccgactcacaatcttaaaaggtcccacaaatcacgatgctaatttccgtttggtctgaaaacgatgaactccccacagcggtgtaacccgtaggtatacataatccccttcttcgaaattcaaatccctacaacgattgtctacatagctcttctgacgcgactgggcagtacgcaacctttcttggataatcttcactttttcctctgcctctcgcaatatatctgtcccaaaaacttgacgctcactggtttgatcccaaaggagcggtgtacgacacttccgaccatacaatgcttcatatgaagccatttgaagactagcttgataaccattgttataagagaattcagcgtacggcagattcttatcctaacttccactgaaatatagaacacaggctctcaacatgtcttctaaaatttgattcactctttctgtctgaccatcagtttgagggtgataagcagtactgaaattcaaacgagtacccatctcttcttgtagtttctgccaaaactttgaagtaaactgactacctctgtctgacactattttccttggaacaccatgtaaacatacaactcttgccatatataactctgcaagcttatttcccgagtaggttgttttgacaggtatgaaatgagcaactttagtaagtctgtcaactactacccaaatagaatgatgtcctgccgacgttctgggtagaccagtgataaaatccattcctatttcctcccatttcaactgtggaatcttcaacggttgcagcagaccagctggcttctcatgctccgccttaactcgttgacacacatcacatagagccacatattccgctatttctcgtcgcatgctggcccaccagaattgttgctttaggtcttgatacatcttagtgctccctggatgaatggaatacaatgtttcatgagcttctttcatgatagtatcctcatctccttattgttgggcacgcaaattctatctcctagccacccagttccttgctcatcttctatataatcgat

SEQ ID NO: 6053 - DNA, 6504 bp, Oryza sativa
aggtctctaatcgtgacggttctgccgggcttgaatgatccgggttaagtaatgtcgtgtgggtaaaagtgaccctcctctgcagaggttattaaactgttcgaacagccgtgcccacggtcatgggcggatgtgaggtgattcctagcgtagttttgtttgactactgctttgtgaaatttgctgaggtggtttgggattgatgtttggaaaatctgcggctgatgggatcagcaaggcccgggtggccgtttaaaagccgttgcccgggtgccaaccttgatcaattcaaaagactgataccttgcacatactccgaccggacgagatgcactgtctcatccgtatcgtttgagaagcactcacttagttgtttcagaaaagagtttaaataaaatcaattgcaaaaacaacagcctttccttgaagcctgcattaaacacttatttcccatggtttgctgagtactcccgtactcacccttgctctatataaataatcctccccagttgctgaagaagatgaagcggatcccgctgacgaggagttcttccaggagcaagccggctacgatgagttttacggttttcggcctagttcccaagtcgcgcctgtgatgtttggtccaagtcttggcttccgcttcccttttgtaatgcagttgtgagctcgggatctgtccgcagcccaacatgactgtagtcctactctataataaagagacctctgttgctttgatattctgtcttcctgtgaaaccagcactgtttcctgagactggtatcgataaacaggttaatttggagcgtcacgggctagttccgctcgagactagttcggggcgtcacagaacgccccaatccgagcacgtatgcgacctgggcacccattttagtgcagactggtactggactccgaattgcacccgaggtcgaattggtttgggcctccaccttgacttcgacatcctcgatgatcctctatggctctaagtccctctccaagtgtctcctcgtcccctctattgttcctaatccacaatataatcattaggtaacaatccattctcgaattcatacaaaaaatgaacataggagcgagctcgcctctaattttaattgccgcgcacgagctcttgttatcggtccttgaatgaccgttgaagcattgttgtgtgtatccgaggtagtgatgtccgcatcagattggatgaggggaatttatctcctcgttgtcctctttcgtttccctcaaaaaacggtgtttaattcctcgtatttcaaccgaatcaaactcgtttcgagtttatctctccaaactaaccataggattttccggtttcgattcctttcgttccgagtttgatctctttaatccgagcctataaacagcatccccaagttgtcctcttccatttgcctcaagtccaagccgtagccgtcgcccatagcgctgccgccacgtgagccctagcgtcgccgttgccgtcgctgcttcagctgcgctgcgccgctgctgtggtcgtcgccgccgccttctgtcaccaccgtcgggttcgctaggtggatgagcatcccgtccaccccttcgccgttagtgtatctcgccggagcgccgtcaccgacgttgacccgagccgagacaccgtcggacctcgtcgtcggtcgtcgtttgtcgtagttctttgcttcggtgagttcgcgtcgtcgtcctcttcgtgttggtgtcttcggaaagaccaaccgagctctgtagcgctggtaatctcgtggtccagtgccatggccggcgatgatgtcgtgatgacatcataactcttttatttaaatcgtaataattttctgtattagatgaaaatctgattaaacttcggaaattcataactaaatcatagtaactcggattcaagtggttcatgttgctaaattcatcttaaatcgagatctacatgtgaaaaatatccacatgtactgtttttgcttgtttttgtactattttgttgattttgttcatttgctttagtttccgacgttccggaggagagcgtttacattgaggaaggtttagaagcgtttgaagaagctcaaagcaagtcacacagatcccaaacaaccttttgagcatgttgaacctatttaaagctactgttttatttcaacttatgcattaaatttgaatgtcatcgggtggtgagcctttcccaattaattaatggccgaagatgactttattttccaatgggtaataaattgattagcttgaaccttatatattggtttggttcagctaaatgctatatacataattgcttagccatgcttagaaacattagctcattaatgggatgaatcataatacattattacttatggttagatttaatggtagctcacgatggttaatcgtgttatgataattaattgataattaaaacctgattaaaggtgggttgtgagcacatggttttgatgatcgtgctcatgacaattaaggactggttcgctagttactgttgtgaaacattaaccgtgccaaccacaagccagcgtgggcaacggccttaccttttgtatagcatggttcattacggggtgccagactgagaagcggcgagaagtccatgggggtcattggggagtccatgcctctggttgtagaggggggggattctgatccaggtatggtgcactgtggtgagttgtgttttgcaaggggtactgttacagttcctttccaaggtaccgtggtggcattgaggcgcatggagacatgttttggagctgtgtcttgtgggtacagtggtacatctctggccagagtataactattcgaatagccatgcccgcggttatgggcgggtctaacaatgtttttcatgattagtctcacattactcattattggtgataacctgtgataattaaattgactcctggtttggaacggtatattcctggtatggaggtttggtttgtacaaccggggttggttgttcagatgaggttgggcctatgcaacacgggtgtgttgtatagtgtttatttaatatttcttaaatacttaattgttttactattctctcaaatgcttattaaatgttgtttatacaaatgagctttgttatgccatctttgctatcctgtgcacttgtatatttgctgtgtagcttgttgagtatgtcatatgctcattcttgcaatattcattcatcagaggaggagtacttcagtgaaggtgatgatcaggtggattaggctttgttcgggtcaagttgcttgtggagtggagtcgccattaatttttccgctgcgtagaattttattcttttgagaggaactatccacctctataataatttattattttgtgaatattaattagtagtttgatagtactcttttatcaatttattattgtgtgcctcggctgattcctggacgaggatttaacgcacatataaacgtttggaattttggatagaaattccgggcgtgacaagttggtatcagagccatgttgaccttaggacaagccaaatggtaaaccttaagtagccttcaaaatattttgaaaaattaattaagttggcagcacatgcaagggtatgtacaaaattttctaaatcctactttaccaaaacagaaagctgttcttttcttttttaaaaaaaactttactgttcagtgtattaaatagtttgattttatgaatttcattggttagtcagcactgtacatctattatggtattgatgcaatcaagatagcaccagtactactcatccctgttaatggtgacactgtaccgtgcttatgatagatcctaagtattttagttttattttattcatttgtctaaagcaatttgtctctgtccaaagttgatttcattttccaaacaaaaactttgtttagttctgttcccacgagtactgtacaggaagaaaatatatttgcttctttttgtttacttttgaagtctatgcccctgtataaattaaaattttcgaaaaaaaatttctgaaaaaaaaacgaattggtttctgaaaatttatgtttcggtcagaaaagaaaaaatcgaaatttaattaaacaagaaaaaaattagttatgtttgctccttttcttttatttttctttttgggtcaaattaattaagtctagtttgtgcagctaacttaaatatatgcattaattcctcctttctgtgctgctttagatgtcgccccatccgccggaaagattgatcgatgtggtaggattcgtcagggggctgagaatgatggcatttgaagtaggctacgacgttgcccctgagtatcgtcagattccccatgaccccaacgaggagcaatgtcgtgttcgcgtgacgttgactagtgatcgtgaagaccttccgtcaataaagtttgaagctgggggaaaaaagtatagtcatgcttgtcaggaggcagccttggtggccattggagagctacgtcatcgctttgatgaggagttagagtcatcagctttttagtatcatccacacaagccacatggtcaagactatggagttcacaactaccctgaagatgaagatagcaccactctgaagcatgcggtgtatatgcttagcgccatggatgcaataggcgtggagcgggagaaagcagctcatgataaggaaaactagaaccatggcaagatttacaagctggagagcaaggtgtaccgtctgcagaaggaactggccgagcttaagggagaagcacaaccgccagcacccaagcttcgcctcaccgcaaggaagagaacccgtcctccacgtcatatccagttggcttcgaagactcgtgtggtgggagatgctgtgcctgatcatgctgaacctgtcatccatgtcttaagtgatgatgaagaggaggaagacctagaagaaagagagctagctactccagaggaagaagatccatctcttcgttccgacgcaaggcgggattagttgcctagttagaccgttgccatagttcgatgtgttagtttgcttgcttaagttcgctcatgcgtgtgtgggtttagcgtgtttcttacatcattggtgggatgtaactacaggagtttagttcttttgcttatcagagagtaagttagctggtgagatagtgttaaatcaacttaaatgtaacatactcagttaagagcaatatataatttaaattaattaaaggtctttgttctaatggtatctctctgtcgttctttccttttgcccgtgcttttcttttgatggtgaacacccgcactgaaagtgaagtggtcacaatgaagaagatcccacccttgcccaagttttggctcagcaaactcagtttgattaatctactagtgcagcaagcgcagaaccagcaggcaaataacaacaatcaaccaccacctccacagaacaagttggcagattttctacgtgtcagagcacctaccttctcaagcaccactaacccagtagaggcaggtgattggctgcatgctgttgaaaagaagttaaatttgattcagtgcaccgagcagaagaaggtttcttttgcttcgcatcagttgcatggtcctactgctgaatggtggaatcactttcgtcaaaatagagctgcgggaaagcctatcacttggcgggagtttactgctgctttcaagaagacacatataccatcaggtgttgtggcacttaagaagagagagttcagcgcactcaatcagggatcccgttctgtcatagagtacctccatgactttaatcgcctagctcgttatgccccagaggatgttcgcactgatagagaacgtcaggagaagtttttagagggactgaatgatgagttgtcttatgcattactggctatggaataacgggatttccagcagttggtggacaaggcgattcgccaagaaaacatgtacgataggatggaacagaagaagcgtagggctgctcatttcaaggctcaacagggtagtagccagaggccgcgcattctatgggacctcaagctgcaccatacccacagggaagatcctcttcagttgctcgccctcaatgccagttctacaacaacaacactggtaatcgcagcaacaacaatcgtaatgtggtcactcgtccagtagcaactccaactcagaatcagcctgtcaggaaggaacagggaagcaagctaggggtgtgcttcaattgtggtgatccaggacattatgctaataagtgtccaaagcctcggcgtgtgaagactgctcctgtccagaacaactccaatgctccagcaccgaaggctcgtgttaatcacgttacagctgcagaagcccagaatgcacctgatgtggttttgggtacgtttcctgttaacactatacccacaactgtgctttttgattccggtgctacacattcctttttgtctaaaagttttgcgagcaatcatgggatggaagttattagtcttgggaggcctttactagttaatacctcagg

SEQ ID NO: 6054 - DNA, 39999 bp, Oryza sativa
  unsure (1)..(39999): unsure at all n locations
attccggggtgccagattgagaagcgccaaaaagtctgtgaaggtcattggggagtccatgctctgggttgtaaagagggtgattttgatccaggtatggtgcactgtggtaagttgtgttttgcaaggggtactgtcacagttcctttccgaggtaccatgaaggtattaaggcgcccggtgacgtgttgtgaagttgtgtcttttgggtacagtagtacatctctggccagagtataactattcgaatagtcgtgcccgcggttatgggcgggtctaacaatgttttttcgtgattagtctcacattactcattattggtgataacctgtgataattaaattgactcctggtttggaatggtatattcctggtacggaggtttggtttgtacaaccggggttggttgttcagatgaggttgcacctatgcaacacgggtgtgttgtatagtgtttatttaatattgcttaattacttaactgttttactattctctcaaatgtttattaaatgttgtttatgcaaatgagctttattatgccatcgtttgctatcctgtgcacttgcgtatttgctgtgtggcttgttgagtatgtcatatactcattcttgcaatattcattcatcagaggaggagtacttcagtgaaggtgatgatcaggaggattaggctttgttcgggtcaagttgcttgtggagtggagtcgccatagctatttagtcttttgtttatttttccactacgtagaattttattcttttgagaggaactatccacccctgtaataatttaatattttgcgaatattaatcagtagtttgatagtactcttttatcaatttgttattgtgtgcctcggctgattcctggatgaggatttaacgcacatgtaagcgtttggaattgtggatagaaattcctagcgtgacagtgataaagtcgaagcagaatccgagatggagatcggctgcgaccaggatcggcggagtctgagttggacaaggttagccgattgagccgaatccgacaatatgacatagcatacgttgtcaggttgagttaatgtgcttcatgaggattgccacgcacggatagagtcctaagaaggcaattgtatctattaattaggatatttcatgtaattttcttagagatatgtttgggcaagagtctgctgtagagacttatggtatcttagagtttgttagagataaaagtcgtgtccgacatggacatattttctaaatctcgggtataaatagaccccgagcctcatgtaatcaatctaacatacgttcaatacaatcttggcgcatcgccacccttttactttcgttttgttttgacgagttcttgctttcgggttgagctgcatcggttttgatcttcaactagaggtaaaacttgttatggcggcttgcgttctcgggattagtgcttccatctttatgatactctaatcttgattatgtaattcatcgagttatcatatattctgtataatctacgacaatatcgttatctaaccttcaatcggctaagatctatcattagaaggcagccgattaggttaaatatctatgttggcttagattgtataggatatccaccactctatgaaacatccaacggcttgattgtctagattttgttcttcttttcatacttatacttatagctgcatcagttgagtttgaccttataggtcgtgattagaatttcaatctccagcctgcttttggttgtcgattagggtagtatcggggttttagccgatcttacctgatttagccttattatctcatgcgcttaattgacatgctagatctgccctttatattaagatcttattacaacaaattatattaggcttctgtttgatatattttacttgctttaatatcttaatatagagtggtatcggagtattagccgatacgtgctagatctatctgatcggcaatgctatgaacatctataatcttgttgttaatatatacttcgatctaagtgatttatgctgtctcggcatggcatccgatctatcccaatcacttgatttaagtatatattgtcacgcccggaatttctatccaaaattccaaatgcttacatgtgtgtgaaccctcgtccaggaatcatccgaggcacacaataacaagttgataatagagtacaattattactctaataaataagcgaataaaatgtcattacagaggtagatagttcctctcaatcaataaagatctaagcagcggaaaaaaataagataaacggcgcagacgactccactccacaggcagcttgaccagggctacacctaatactccacaccatcagcatcactgtagaactcttcctctgatgaatgattgcaaggtgagtatataacatactcagcaagccacgcagcaaatatgcaagtgcacaaggataccaaagaatggcataatatagggctcatttgcaaaagcagcatttagcaaacatttgagaattataaaacagtagagtaattaatcatcaattttaatcaacactaaacagcacacccatgctgctcaggcccaaccatctcgaacaaccatacccggctgtacagatctatctccaaaccaggaatataccattccaaaccagtagctaatcaaattattaccagttatatcatcttttattatgatgagaagtgtgaaactaatcacgaaagacattgttagacctgcccataaccgcgggcacggctattcgaatagttttactctggccagaggtataccactgtacccacaagacacagccccacaacatgtcaccatgtgcctcaataccaccacggtacctcggaaaggagctgtgacagtacccctcgcacaacacaatccatcacagcgcacctttcctggataataatcacccccttataaacaaggcatggactccccagcaacccccgtgggcttatctccgccacttctcagtctggtgctccgcaatgaaccatgctatacaaaaggtaaagccgttgcccacgctggattgtggttggcacggttaatgtttcacaaccgaaactcgtgaaccggtccttaattttcatgagcacgactctcaaaaccatgtgctcacaacccaccattatcaagttttagttggcaagtaattaattaaccaatcacgattgaccatcgtgaactatcattaagccaacattaaataatagtgagtcataagttatcccaataatgtgctaatgtttctaagcatggctaagcaatcatatctaatatctagctgaaccaatatatatagtccaactagtcaagttataataacccaaggtatcaaggaataaagtaatcaagaacaaaagggctataacaaacaataggttaattccacccaatgacattcgaaaataaatgcaatagttgaatagaaacaatagctttaaacaggatcaacatgctcaaagggttgtttgggatctgtgtgacttgccttgctggccttggaactcttcaaattcttctcctgtaaaaacggactctccggaaacgtcggaatctaaacagaaaggtgcaaaatcaccaaaacagcacataaaaaagcatgaacagtacatgtggatatttttaacatgtagatctcaattttagaaaaatttagagacttgaaccaactaaatccgagctaagatgaattagttatgaattttcaaagattaaatgggattaaatcatttatttagattttaattgaattatgacgcaataatgaattatttttgaaaaggaaaagggaattattgtgtcagcggctagggttcgcggtgaaccgggtgcacggcggcggctcacgaaaactaacgaccgagatctttccattcaaaacgaatggccgagatcgaccggtccacggccggaccacgggagacgacgacgatgacgtcagcggtgacgtcaccaccggcggcggctcgggcgtgcatgctcgacagcgcgaacggagagcacctacgggtagcggacggcacggcgaactcaccggtgaccaaagcggcggcggaagatcaacggacggcgacagcgatgaggaagaagcggcggcaaccttcagcttgacgacgacggcggtgctccggcggtctacagcagcgatggaggggcggacgaggacggcgacgcgacggcgaccacgacggtgactttcccgagcgacgacaaacaatttatatatttaggatttttagggtgtgacaaacctaccccccttaaacagaatctcgtcctcgagatttggaagaactggcgaacagatgcggatgagctgacttcaattcatcttctcgttcccaagttgattcttcttccgagtgattactccattgaactttacaaaaacggataactcaatttctggttcttctctcatctatttccaagatacggattggtttctcaacataggtcagatcctcttggacttctatctgttcaagattagcttcttcggtaggtacccttaaacactttttcaattgcgacacatggaacacattatggactcctgccaaagattgaggtaactccaactgataagcaacctctcctcttctactgacaatcttataaggtcccacaaaacgtggtgccaattttcctttggtgtgaaaacgatgaactcctcgaagaggcgtgccacgaaagtacacataatctccttcgtcaaaacttagatctctacgacgattgtcggcataactcttatgacgagactgggccacgcacaatctttcttgaatgattttcaccttttcttctgcttcccttaggatatccgtcccgaaaacctgacgttctcccgtttgatcccacaaaagcagagtgcggcacttccgaccatacagtgcttcgtaaggagccatctgaagactagcttgataactgttgttgtacgagaattcggcgtaaggcaaattcttatcccaacttccaccgaagtctaaagcacaagctctcaacatgtcttccaaaatctggtttaccctttcggtttgtccgtctgtctgcggatgataagcagtactaaagttcagcttagaacccatctcttcctgaagcttcttccaaaactttgaagtaaactgactgcctcgatcagacactattttcttagggacgcggtgcaaacacacaatccttgccatatacaattccgccaaccgacttccggaataggttgtctttactgggatgaaatgagccactttggtaagtctgtcgtctatcacccaaatagagtcatggcctaatgacgttctaggtagaccagtgattaaatccataccgatttcctcccacttccattcaggaatcttcaaaggctgcaacaaacctgcgggtttctgatgttctgccttgactcgctgacaaacatcacatactgctatgtattctgcgatttcacgcttcatacttgcccaccaaaatctttccttgagatcctggtacatcttggtactaccagggtgaatggagtataaagtatcatgagcttctttcagaattgcatcttttaaatctttgttgtcggggacgcagattctcttgcccaaccatacagttccttgctcatcttccaagaaaccgatagcttttcctcttctcatattcttcttgatttcatgaatatcaggatcattaatttgggcttctctaacttgatcaattagagtgggctttgcttctaaggctacaacgaaacctctactgacaattcccaaatttaatctttcaaattccttgcataactccaatggcagctgtcgtccttccgtagcattgcaatagcctttcctgctaagagcatctgctacaacattagcctttcccgggtgataatgaattcccacgtcataatccttaattaattccaaccatctccgttgtctcatgttcagatctggctgagtaaagatgtactttaaactcttgtgatcagtgtatacctttgtacgagtaccgaaaagataatgacgccaaatcttcaacgcatgaaccactgcagctaactcaagatcatgagtagggtagttcttctcatgcggacgtaactgacgagatgcataggcaaccaccttcccatcttgcatcagaacacaacctaacccaagcttggatgcatcacaatacacttgaaaacccttctttggataaggcaaaatcaaaataggagctgatattaagcgattcttcaactcttgaaaactctgctcacattcttctgaccacttgtactttacatccttttgaagtaatcgtgtcatgggcttagcaatcttggaaaaattctctataaacctccgataatatcctgcgaggcctaggaaactgtgaacctctgaaactgtctttggttgtttccagttgattacggattccacattactaggatcaacggcaactcctccggctgagatgacatgaccaaggaacttcacttcagacaaccaaaattcacatttgctaaacttggcatacagttgatgttctcgtagcttctctagtgcaaggtgaagatgttcttcatgctcttcttttgttcgagagtagataagaatgtcatcaataaagaccaccacgaacttgtctagatattccataaacaccttattcatcaagttcatgaagaaagcggggtaattggtaagtccaaaagacataacagtacattcaaacaacccatacctagtggtaaaagctgtcttaggtatatcttcctctttgattcttaactggtgataccctgatcgaagatctatcttggagaaaacagtggcacctttaagctgatcaaacaaatcatcaattctgggcagcgggtacttattcttgatagtcacatcatttagtgcacgatagtccacacacatcctctgggtatgatctttcttttccacaaaaataaccggagctccccatggagatgaactcggtctgatgtatcctttctgaagcaaatcatctacttgtctcttgactactgctaattcattggccgccattatataaggtctcttatggatcggagttgttcctggtaccaaatctattctgaactctatatcccttttaggcggcataccaggtaaattgtctgggaacacatcgggatactcccggactataggaatctcttccaaagtcatttggttcagtcttgaccttaaagactcagaagacaatgcatgaacagttacaactcgaccatcattgctggtgagagttacttttctgttggcacagtctatcacacctttatatctggctaaccagtccatccctaggatgacatcaaggtctttggattctaacaggataagattggctagaaatggtacttcttgaatttctattctgacagaggggctacgttgcaaagagagtgcttgattacttggggtactaaccatcaaaggacgtctaagatcttctacttccatcccatgatttcccgcaaaactcatagataaaaatgaatgtgtagcaccagaatcgaaaagcactgttgcaggaactgagttgacaaggaacgtacccaaaatcacatctggagcaccttgagcttctgcagcagcaacatgattgacacgggcctttgatgctggtgtggtagagttgctctgggcagggacaaccttcacgcgtcggggcttcggacacttgtcagagtaatgtcctgggtctccacagttgaagcacaccccgggcttgctaccttgctccctcttggcaggctgttgctgtgttggagctgcaacagggcgtggagcttgattgcggatgttgttgccagcattgttgttgaagaactgacgctgcggacgaacaacagacgaagaacctccctgtggcatggactggggtcctaaagtaagacgcggcctctgactattcccctgttgtgccttgaagtgagcaatccggcgtttcttctactccatgcggttgtacttgtcctcctggcgaatagccttatccactaacttctggaaatcatgataatccctagtcatgagtgggtaagaaagctcatcattaagtccttccaagaacctctcctggcgctcttcatcagtgcgcacatctttcggagcataacaagccagacggttgaactcgtgcagatactcggtgaccgtgcaagatccctaggtgagcgacctgaattcctactttttgagagacaccactcccgatggtatatgcgtcttccggaaagcagcggtgaattcaagccaagtgataggttcagcagaagttctgttaaggcggaagtgatcccaccactcagaggcagggccatgcagctgatgtgatgcaaatgagaccttctcctgatcagtgcactgaagcaaatccaacttcttctctatggcatgcagccaatcgctagcttcaacaggattagtggttctagagaaagtgggcggcctcacacgaagaaattctgctaacttgttctggggaggtgcatggttatttccctggttctgttggttctggagttgctgcatcatcatgttcataagctgtgcctgttgagccaggacttgggcaagtgtgggattctctccattgttgttgttgttattgttgttgttggggccattcccgttgctgcgagtgtgcaccatctggcatgggcaggatcacaagaagagaaaccggggaaaactacttaggacagagaattaatttttctactaacttaacttttactgatcttaactgagtttcattattacaaaactgaagactctcacaccactaaactcaccaacttcctaacactcaaaagcaaacaaacgcatgcacttacatcccaccactgatgtaaatcacatgtgagacacacacaaccaaacttaaacgaacaaactaacacaacgatctaatacaacggcttaacaaggcactctaggtcttccgggcatcgaagttgattgaaggctcgttcggctcgtctccatcatcttgagtagctccccactcgacctttgaatgggtgtgcttcgattcttctccttcatcatcacttacattgacgaccggaggatccgctagggctggggtaacttctttctccaccacacggacctttggcgccaattggtagcgagggacaaatagagctctcttccttgcggtaagacgaatcctggccttctgcggtggttcttctcccttcaacgcggctagttccttctccaaacgatccaccttgtcctctagcctgcaaatcttaccacgattccagtcttcacgatcttgagctgctagcacaacctccgcacgggtttcatccatagcccacagcatctcaaccaaatgccttgtggtagcatcattctcaatcccctcagtctcaaggtagctgccatggttacttccctggggttggcgaggatggtagcgatactcagtgtcggccaactgatcactgtagcgatcgcggagctctcctatggcgatccttgccacctcctgacatgcatggatgtagtttccttctccagcttcgaacatcactgatgggatatcttcactattactgttcaaggtgactttgactcggcacttctcttcgtgacgatcatgaggaatctgggcatacaaaggggcagtcccaaatcctatggcaaaggacatcgtacgcaactcctggacaaatccctcaacaccaaacaagtatttaggcttgtagcgcggcatctaaagacaagtgaaaggagggagttaagacatttatccaattaatagcacaagtttttggattaatttgaataaagttagaaaatcaaagtaaaaggtaagcaaataaagtaaaccaagcttgcaagataagttgaaacagttggaaacaaggtcacaaattttgtacttttgaacaacaggttccaaaagaaataaaagaaagttataaaatcaacatgctaaatttatttcattgcagcaaaataaaacaatgttgtaaaacatttgctggtaaatgagccattagtacagtattagatgtacagtactaacaacactggaataaattttgaatgagaaccactaaaagagattatgaagtgcatgtgctattagtttggtttaattaaaagagaaagggaggagaacagttctacttttccaatatttttagagggcttctatgggtaaccatttggcataacctagggtcaaggaggctctgataccaacttgtcacgcccggaatttctatccaaaattccaaacgcttacatgtgtgtgaaccctcgtccaggaatcagccgaggcacacaataacaaattgataatagagtacaattattactctaattaataagcgaataaaatgtcattacagaggtagatagttcctctcaatcaataaagatctaagcagcggaaaaaaataagataaatggcgcagacgactccactccataggcagcttgaccagggctacacctaatcctccacaccatcagcatcactgtagaactcttcctctgatgaatgattgcaaggtgagtatatgacatactcagcaagccacgcagcaaatatgcaagtgcacaaggatatcaaagaatggcataatatagggctcatttgcaaaagcagcatttagcaaacatttgaggattataaaacattagagtaattaatcatcaattttaatcaacactaaacagcacacccatgctgctcaggcccaaccatcccgaacaaccatacccggctgtacggatctatctccaaaccaggaatataccattccaaaccaggagctaatcaaattattaccagttataacatcttttattatgatgagaagtgtgaaactaatcacgaaagacattgttagacccgcccataaccacgggcatggctattcgaatagttttactctggccagaggtgtaccactgtacccacaagacacagccccacaacatgtcgacatgtgcctcaataccaccacggtacctcggaaaggagctgtgacagtacccctcgcacaacacaatccaccacagcgcacctttcctggatcataatcacccccttataaacaaggcatggactccccagtgacccccgtgggcttatctccgccacttctcagtctggtgctccgtaatgaaccatgctatacaaaaggtaaagccgttgcccacgctggcttgtggttggcacggttaatgtttcacaaccgaaactcgtgaaccggtccttaattgtcatgagcacgactctcaaaaccatgtgctcacaacccaccattatcaagttttagttggcaagtaattaattaaccaatcacgatggaccatcgtgaactatcattaagccaacattaaataatagtaagtcataagttatcccaataatgtgctaatgtttctaagcatggctaagcaatcatatctaatatctagctgaaccaatataaatagcccaactagtcaagttataataacccaaggtatcaaggaataaagtaatcaagaacaaaagggctataacaaacaataggttaattcgacccaatgacattcgaaaataaatgcaatagttgaatagaaacaatagctttaaatgggatcaatatgctcaaagggttgtttgggatctgtgtgacttgccttgctggccttggaactcttcaaattcttctcctgtaaaaacggactctccggaaacgtcggaatctaaatagaaaggagcaaaatcaccaaaacagcacataaacaagcatgaacagtacatgtggatatttttaacatgtagatctcaattttagaaaaatttagagacttgaaccaactaaatctgagctaagatgaattagttatgaattttcaaagattaaatcggattaaatcatttatttagattttaattgaattatgacgcaataatgaattatttttgaaaaggaaaaggtaattattgcgtcagcggctagggttcgcggtgaaccgggtgcacggcggcggctcacgaaaacgaacgaccgagatctttccatccaaaacgaacggccgagatcgaccggtccacggccggaccacgggagacgatgacgatgacgtcagcggtgacgtcaccaccggcgggggctcgggcgtgcatgctcgccggcgaacgacggcacgacagcgcgaacggagagcacctacgggtagcggacggcacggcaaactcaccggtgaccaaagcggcggcgaaagatcaccggacggcgacagcgatgaggaaagaagcggcggcaaccttcggcttgacgacgacggcggtgctccgatggtctacagcagcgatggaggggcgtacgaggacggcgacgcgacggcgaccacgacggtgactttcccgagcgacgacgacaacgggatcgccgccggcgcatggctggacgaacggcgacgacggcggcgctaggctacacggggctagggcgctacgggcggcgagaggcgaaggcgggggtgtcggcaggtaccggcgggcttgggggtccttttataggggcaaggaggcggcggcgaaggcccccggcgacctgcgacgcgaaggaatgtttagggttcggaggagagagatcgatccgaatcgaactcgaatccacggatttccaaacgatttagccgacgattccaaaagagaaaaggtagaggagatctcgggaaacatttcccctcaattgattacaccggagaaggaaaggcgcgagcgaatttggaaggagacggcggcgcggctcggctagggttccggccgggcgacggcgcgaggaggacgacgagtccgacaggtgggacccacctgtcagcggccgagggcgctcgcacgggcagctgcgggctgactgggccgactgggccgacggagagagagagagaaggttttgggccgactttcggcccaaagccaaaagaggattttaaaaacctttttcaatttaaattattcaggaaatgcaattccatttattaaaaatacttccttagctcaaataaatcccagaaaaatctaggaattatagaattaagcaaagtatttaatgaaattttatctggccccattttatattggaatttattatttaaaattagatcttcttttctagacttttaaaataaattctaataattccaattaaacaacaatttatatatttaggatttttagggtgtgacatatatcgacatagagattatatattatcaatatctacagccgattgagtagatttagtcccttcttacttatttatatatgccaatcgattcaaacatgacatcggctaaaagataaatgatatgtcatcggcaactagccgatcggctatcatttatggatttaacaatggtttcgttgtctttatttcttgttgattgcaggatcaaatcaactggcactcttacgaacctaaaggcaagcttttggacctgcactggagctaagcagatctcccagccctcgtgtttttacatcaacactcttttggcatgcccagtgggaccgagttgcaacaacgttctctcacggaggtccctcccaagactaatagcccaaagcctagtgggtttgaagttcatgagggaaacattgttcccgtcactacagacaaattaacaccggaacaaaagaaggagctcgatctgatgatgcagcaaacacaacaccagttcttgaattctttcatggagacccgtaagggaacagttgttcagaagtataaggtaaaattagttgctgatgttcctggaacaggttcttctaaggatcgatggagaattacaacaagttccggctgctacagctgaatcaggtagtaaaggcattctagagggctcgggagataaaggtgacagttttcagggggtacaagttgaagatcttggaccagatggcaatgtagtacaaccacagtttaacaacttccaagatcggattgactacgccgtgcaacatactttgattaatcaatctggagtgctagtcaataccttgtcaaacatggtgaattcattgtgtagtagtagtactaataataataataataataattattattattattattattattattattattattttgtgaacttaaaagtgtgagaaagatagagatagaaagagagtggggagggttgtatattttaatgatcaaaggggataggataaacatgtaccagtggataggatcgtagggaccagttaaaaaaaatgagcagataaatgtctaggagatgaaagctatccatcactctcctatctgggtaggtgtctccttagacttgaaggaagctgctgctataaaagcctcccaaagcctaggaatactacttgcaccatagaagccagcgtgagcacagggctgcacagagcaagcaggtaagtgtatggttacattttaatagttttcagacctagcaagaagtaagctagctatattagcaaaattttcttgtggtactagtaggctgctacacttaccatatttttagggtgcttttcatgatcctgtgtactaaacaggggcagaaccacccattaggcggggttgggcgaccggcccagtaatggcccacgtcgccccacccccccttgggcctccagatacccaaaaaccgatcaggcgcaggtgcaccgaagaaatcaaccaatcacggaaatagcgatgcatcgtattccaatcggcgacctgttcatcttcattctttctttgctagttcatgccgcatcgccacaaagtcgtcatcgtcccgtgcgtgccgccgccgccctgtttgccttagcccaccagccgcgcttcccatccggccaggccagcccattgtggcggcgtgcctccagccagcctggagccggagggaaccggctggcgggcagcatggagcctctgctagccaccacgctgcacgctgcaaccaccaacaaaggaggaggaagaactgttccccgcttgctgttgctgctacgttgcttggcgtcttggccgctaatgcacgtctgtttctgatctgtagcaaggaagacaagaggagaatagaagacaactgtcaggacattttttatcggttccaaagaagagtagggaagaaaaggtggaaattcgtctcgaattgatgttccttgttgcaagggtaattcaaaagtagtccctaattaaattgttctcaaaaacacaaaagttgtagataattttctgtagatatataatatattcttttatttctatttttattcaatgttttaaatattatagttgcaactgtgaggacagtttttatctagcttacaaaatatcaagatttggaattctggaataaatattgagcaactagcattggtacccatatctagccacacggttgtttgtaattagattttgagggttatcttactcttaggtctagagggttatgggcaccactaatgtgacactagtttaacgacgatgctaaaacaaccacatgacaaactcgcttaattgatgcgtggtcactactcatgtcatttatgccttacttgttaattgtagaattatattattttttttacaattgcatcataatatagtatgtgttgcgttcatatgtctttatcgtgttagtatttttcgccccatctgtattttagtcctggttccgccagtactactaaatggagcaggaggtagatatattagtgtgaaaggttaatacttgttgtggctagtacagagactagaagttactagcaagcagctgtactatatgctatatgcgtgcatgcatgcagtactgcccactcgaatagatgcatgcaagcacctacacactactccatgttggttttctttctctagtatagtcacatcaaccagctatctatggtgctagtagctgatgtcagtagctaatgtcctgcatgacaaatatagatataaattaataccgaagacctgtatatttgattaggtgggacgcagaggaagaacaacagaagacaaggcaagactacgcccgtcaactattttacttaatcacctctaactgaatttgtttacctacattatattgagatggtgtactaataatctaacaataaacattattaacactcgaataatggattgatgattttatcagtgagaataataacgtgattatgatacttagcctgagacggccgatacctgaaatccgatacctgaaataacgatatcgggtcagctgatatcagtgtgagatgatgaatgcctcacacaagtagggaatccggcggcgtgattctcagatgagggtatcactaattggggaaaaaatggattgaaggaacgagattatgacgattattttaatacctctccagtgtattcttaactcatttactatgtttaatgtcctttattatttattggctgttaatatctatgggtagtagtatttttcttctgtctttaaaaacatatatatattgctatatgtactaatcttgctgagtatgtataacatactcatatattattattactatttgatgtgcgcagaaactagtcaagatgagatgtcagaggggaatgatgacatgcagaactagtggggagtgtggtctacttagtctttagagatatccagaggacatacttgcatgctaggtatagggtttcgtcctggtgacaataagttggtcagtgaaccaaccgatgtaatatgcagtaaagctggtggaaaaaaagtaataataataaacggaaccactgttgtagatgtccaagcttcagttgtgatggttagacattgcatcttgccttgcatccttatggacatatataaatattagtatatatgcgtataaggatatgacagactgtcacggaatatatatatatatatatatatatatatatatatatatatatttatttatttatttggggtcgtgacacattggttgatggttcaatggctgagtatcaggttacaggaccagtatatttaccaaggggtgttttcccaaattatcggcccctgatcacaaataatcagccgaatgtttccagtgtaccaccagcttagccgacagcaccagtatcagctcctgcacctgctgcaccatcatcggcatcaaggcaactgaccaatcctcgcttgttgactagagagcaaccacaacatgctggacaaaatgtcaatgatgactcaggaacaggttgctatgatgatgatgatgactccgaagtagcagcagccgaatgggttaggagcaaaaaggttgtgccatgcccatgggtgaagagttctggaaaaaaagaaaggtttgattttgatatcaccaaagctgacaagatcttcgatttgttacttcgggagaagcaaattcaacttcctgctggtcatattataccatcggctgaggaactaggcaaaaggaggtattgcaaatggcataactctggttctcattctactaatgactgcaaagtttttagacagcaaatccaggtggccattgaaggtggaaagattaaatttgatgactcaaagaagccgatgaaggtcgatggtaaccctttcctggtcaatatggtacatacagcaggtagaacagccgatggaagcaggactaaaagtttttagatgaattcggctagaattattaacaagtattagaggaaatatgacaagcagcaacaagggaggtattatgaagaagatgatggaggttttgatcctcattaggactgtgagtttttcagattttgctggaaagaaggtatgaggctgccatctatcgaagattgtcctgaatgcagtgacattgcagaatgttcaagccgatctcacaatagaagcaatcggttgaggcagacaagagttcctattcatcaaagattggacccagtaaatcaagatcatgatcaagatgttgaggagggcagaaaaactcaatggtgtccttctggtatttttacaaagaatcagaagagaatggttcaaagattgaggaacagagaacgttttcgtgaagtggagcaagagattaatcatcggctgaagaagacaaagccgaggcaagagtggcgtgtcaattaccaagctgctatagccgatgatgccaaagccgatgaagcaaaaaatgttggctaaggggaagagtgttgtgaccgcattggttaacatggttttcatgttgcctgcggaattcagagctaaacaagctgatgttgatgaagttgaggaagcttcggctaggttggttttgtcaccagagcaagcggtttttgagaagctagaagggacagagaatcggcatcttaagccattgtacattaacggctatgtcaatgggaagccgatgtccaagatgatggttgatggtggggctgccgtgaatttgatgccatatgctatattcagaaagctgggtagaaatactgaagatctcatcaagacaaacatggttctcaaagattttggtggcaattcatcggaaacaaaaggagttttaaatgtggagctgacagtcggtagtaaaaccgtccctacaacattctttctcatcggtggaaagggttcctatagcttgttgcttggaagagattgatttcatgccaactgttgtattccgctgaccatgcatcaatgcttgattcaatggcaaggcgacaagattgaaattgtgccagccgacaggtcagataacgttgccagtgccgatttagctctttgggagatggacagtattgattgcttgtctggaaaagtttgggatggagattttctaaaagtgttcgattatgatatacagccgattgaagatggagagccaaattattattttgagggcgtcgtggagggttcaaacatttacaccaacaacacagtagatgatctcgatgacaagcagggacaggggttcatgtcggccgatgatttggaggaagttgatataggtccgagtgatagaccaaggccgacatttatcagtaagaatttatctccagaatttagaaccaagttgatagagcttttaaaagaatatagagattgctttccttgggagtattatgagatgccaggactcagccgatcgattgttgaacatcggctacctatcaaaccgggggttagaccataccagcagccgccgagaagatgcaaagccgatatgatcgaacccgttaaggctgaggttaaacatttgtatgatgctggttttattcgtccttgccgatatgctgagtgggtttccaacatagttccaattatcaagaaaaatggcaaagttagggtgtgcattgattttcgagacttaaacaaggctacaccaaaggatgagtacccaatgccagttgccgatcaattggttgatgctgcttcagggcataagatattgagttttgtggatggtaatgctggttctaatcagatctttatgacagaagaagacattcataagaccgcttttagatgtcttggtgcaatcagcttgtttgagtgggttgtgatgactttcagcttgaaaagcgctggagctacatatcaacgggctatgaactacatatatcatgatctaatcggctggctggttgaagtctatattgatgatgtagttgttaagtcaaaggaaatagaggaccacatagccaatttgaggaaggtttttgagagaactaggaagtatggcctgaagatgaatccgacaaagtgtgcttttggcgtatcggctagccaatttttaggatttcttgttcatgaaagggggattgagataactcagaggagtgttaatgcgatcagaaagattcaacctccggaggacaagacagaattgcaggagatgatcggcaagataaattttgttagagggtttatctctaatttgtctggaggattagaacctttttcaccgctgttgagattgaaagccgatcagaaatttacttggggggcagaatagcagaaggccttggataatattaaagaatatcttagctctcctccagttttgattcctccacaaaaagggataccttttaggttatatctattggccggtgagaagtcaatcggcttggtcttgattcagaagctcgagggaaaagaaagagttgtgttctatttgagtcgtcggcttttggatgcagagacaaggtattctcctgaggaaaagttgtgtttgtgcttttatttttcttgtacaaggttaaggcattatctattatccaatgaatgcactgtaatatgcaaagccgatgtggtcaagtacatgttatcagctccgattttgaaaggaaagaatggaaagtggatatttactttgacagaatttgatcttcggtatgagtcaccgaaggcgattaaggggcaagctatagccgattttattgttgatcatcgtgatgactcaatcggctcgtttgagattgtgccctggactttgttttttgatgggtcagtatgcactcatggttgtggtatcggcctggttataatttctcctcgggggacaagttttgagtttgcatatactatcaagccctatgcaactaataatcaggctgagtatgaagcggttctcaaagggttgcaattacttaaggaagttgaagccgatgttgttgggattatgggtgattcattgccggtgattagtcaattggcaggggaatatgagtgcaagaatgatacattgatggtttataattagaagtgccgggagttgatgaaaagattttggttggtaacttttaagcatgtatctcgagagcaaaatattgatgctaatgacttggctcaaggggcatcgggttacaagccgctgatgaaggatgtcacaatagaaattgccacgataacagtcgatgattggaggtgcgatgtgcatcattatttgcagaatccaactcaattggcttctcggaagttgcgctataaggctttgaagtataccttgttggatgatgagctatattatcggaaaattgatggggtgttgcttaaatgtttaagtgttgatcaagctaaggttgcaataggcgaggtacatgaaggaatttgtggaactcaccaatcggctcataagatgaagtggttgcttcggcgggcaggatatttttggccgacaatgttggaagattgtttcaaatattacaaaggatgtcaatattgtcaaaagtttggagcaattcaaagagcacccgcatcggctatgaatcctatcatcaagtcgaggtcatttagaggttggggaattgatatgatcggtatgattaatccaccatcgacaaaaggacataagtttatattggtgacaaccgattattttaccaagtgggtagaagcgattcctttgaagaaagttgattctgtgcatgctattcgatttgttcaagagcatattatttatcgctttggtattcctcaaaccattacaaccgatcaaggctcgatctttgtgttcgatgagtttgttcagtttgccgatagcatgggtatcaaattgttgaattcttcaccatattatgcacaagctaatgggcaagccgaggcgtctaacaagagtttgatcaaatttattaagagaaagatttctgattatcctcggcaatggcatactagattggtcgaagcattgtggtcctatcagatggcttgtcatggttcgattcaagttcctccttataaacttgtttatggacatgaggcagttttaccatgggaagttcaaattggctcaaggaggatagagttacaaaatgagttaacagccgatgaatattacaatctcatggtcgatgagagggaagacttggttcaatcgagattgagagcccttgcaaaagtcaccaaagataaggagagaattactcggcattacaacgaaaaggtggtaccaaagtccttttcggaaggtgaccttgtgtggaaattgattttgccgacagggactcaagataacaaattttgcaagtggtcgccgaattgggaaggaccgtttcaaatctataagtttgtatccaaaggggcttatatgttgcaaggacttgatggtgaagtttatggacgagcactcaatggcaaatacttgaagaaatattacccaagtgtttggattaatagatgatcagctggtgttgccgatacatgatagccgatatgtttacatcgccttgagatggccgatatggttatatcgcccttagttgtttttttattataatcggttgcgttttgccgatatacaatggccaatatggttatatcacccttagttgtttttatattgtaatcggttgtgttttgccgatatacaatggccgatatggttatatcgcccttagttcaatttataattttattaatgccttcgtcattgtaaaattaggggggcacatatatgtaaaagttgcaaagcaaaagttgcaaatttttttagcaaaaacgagaggttatattaatcggcacatcagttcagcaacaaaagcaacaaatgaagtaccataatttcttagccgaatacaaatttttttctaaatcctattacatagtcactgagataagtatcgctggatagccgatacagcctgttgtctgatttgttctatttcttcaattgcttgggcatcttgtgcatcggttccaggggcgacttttaaggacttagtcatatcggcaacattcctaatggccgatttcagcctagacttttgttcttcaatagcacttggaagatcgggtagcttctgcttttcaagatccaattcggcattgcattctttgagttgagctatgagatcaattttgcgggcttcaagccgatctatgttcgactgaatcggcccaatagagagttgatcgagcttggctttctcttcatgcacgagttgccgattggcttggatggtagcttcaatgactttccgctcccgccgatcggctatccgttgctgagccttctctagcttgaattgatgttgctcgaggtatatagctggagtaatgatgttcgctagatcttccgggattaaggcttggatttcagcaaatcgtgcccagattgaaccacaatccgccactaagctgtctaatgatgaccctagccgaaggtatatgtcttcaagtgttttcttaacagtttcatccaggggggctagggccgtgcttgtggtttcttcttctgcttccttatcaaagtaatccttgatgtcaaaagagaacaaatcagctaaggcttgtaagaagaaatttgaagacaattgattatcaagatgagttattcagccgatttgagatttttatagacaagacttactgggatggcaggagcggctggttgttcctcttcctcgatattatggcttcctgcagccgatggagttcggtcacttgacatttgctgcacaggagatgaaggaggaggaggatgctgaaaattcaaatgttagtccgcatgggttatgattaaaaatcctgttataaaagaaatattaccggtggagctggtttagatgctgctgctgccaatttcttcttcacgacagttttctttttctgcaaagtacaagatttataaatgatcggctatgagtaaaataattgcaaaagagaatcaaggagagatgtttacgcttgagaagtggtgcagaaggagttggaggagttcgtttgggtgaagccgatggagtttttcttgtatcacttgcttcggctgcggcctggtcaacatcctcttcagtctcttcttcatccaaagcttgctcgatggatggatctaaggcaggcaagtcatcggctggcttaggcttattcttcttggtcttcttcttgggagccagagctgatggatcgagtgctagttccttggtctttctcttcctgccaacatcggccggttctctcatctgcccttgaagcagacttgaggtcttgagggcatggtagccgatgataggaggagttaatccgccaccgtttggcaaaaggcccggagcatattctatgtctttgccactgttgctcttgtatggaggagaggattatgttgtctgcaaggtaaagagaaaagttagtcacgattcaaatcggctaactgaattgataagagtgaagatgtacctgaggaatgacatctgggaataagtctgtcatatacatagaagccgattgatggaatatatgttgcttccattctccccaccatcggtcaatgtttctgctcctgaattttgccaactctatgttttcgatactgcgcaaaggaggtcatgggatgctgagtagccgatccatcatcagggttaatgaaacctctcctcggcattggattttatcggcaaagaacaagccgattggtagttgtcccattccaaattgcctggctgagctcatcggatcgtagaattcataggacacttgtatatttcttccttggtggatgccactaggaaggatgcatgggctaatggccgctgagaagacttctcttgatttttgatacttttcagagttgaggtcttcaaatctaaagtctcctgggagatcgaagtttattgagtcctcgtatgggaacagactcgagcatctctttggaaaccctcatagaaacggcagaaccagtctttgagtagttcggccgataactttgctccagcatcggctagtgtagaggcatactccccataggacatacatctgcgatgggtgcgctcttctccatcatcatctgtgatcggctctaatctcggaaattcagcttctgttacggctggccgattgacagctttcatggctaccaagtttagccaagtttgcagcaaccaccatggcctgcctgcgctaacgactaagccgacagcaatcttagtcgatgcgttgtttaacatttggtacaaatagtcgagaaggattttgcccaaagggaattgcctctttgtctcaagggctttggctaagaactgccagttggtggtagggccacaacttgatccacaaaaaaggaatttctcaagccacattagcaggaaggccacatgttctcgggaagtgacaggtcctttgcccatatatgctgccacataaccagaccagccacctatgctcttagttctgaagtcaaactggtttttggtgttcaaactcatggggttagctgaagaggtcacatccaaaccggtgatcatggtaatgtcaagcaaggtgggggtcatcggcctttggttgaataggaaggcattgatggtgttggaccagaaataggtggcagctgccatcaagggttcatctttagccgaatttgctatggtgaggtcgagcgcctggctaattccgagttcatcgcagtgaacttgcttgctagccgatacacgcttataccacacggcccagcttttctcaggggtggttttctcaagagatggccaagacgtgaaggtgtttttccagtggcttagattagggttggctaatctaaagtggattctattggtttcgacgatgatgaattcagtaggatcaagattgccgattggaccaagaaaatagtgattctcaggcgacaaacttggaattgctaccagattggacaagtgttacagatataaacaagaacagagaagaagaaaacaagatgaggcaagagaaaaccaatatgctgcgaaagaagaggatctagccgatgggtacttacctctgcgtattcggccgatggcacgacgaatggcctagcggagggcgacatctctgcgggcagaagatttggccggaggggaagtcgccctgaaatcgccttgcaccgaggggatcgccggagagagagagagagaggacagagttggcttaagcggtgaaaacggaactaacagtgtgaaatttctcggggatgacagttagtatttaaagcgtggcggtaatggtcggaaaaatggcaagtgtgatattctctcggagacatagataaagcaaattcgaaacattatcaaatattctggacttggggggcatgtgttaacaaccaaatttggtaatctgagtatcggagatggtgataaagtcgaagcggaatccgagatggagatcgttccgcaaacagagcaagaatcggctaaagtccgactagtctacgaccaggatcggcggagtctgagtttgacaaggttagccgattgagccgaatccgacaatatgacatagcatatgttgtcgggttgagttaatgtgcttcatgaggattgccatgcacgaatagagtcctgagaaggcaattgtatctattaattaggatatttcatgtaatttccttagagatatgtttgggcaagagtctgccgcaaagacttgtggtatcttagagtttgttagagataagagtcatgtccaacacggacatattttgttaatttcgggtataaatagaccccgagcctcatgtaatcaatctaacacacgttcaatacaatcttggagcatcgccatccttttactttcgttttgtttcgatgagttcttgcattcgggttgagctgcatcggtttcgatcttcaactagaggtaaaacttgttatggcggcttgcgttcttgggattagtgcttccatctttatgatactctaatcttgtttatgtaattcgtagagttatcatatattctgtataatcttcgacaatgtcgttatctaaccttcaatcggctaacatctatcattggaaggcagccgattaggttaaatatctatgttggcttagattgtataggatatccaccactctatgaaacatccaacggcttgattgtctagattttgttcttcttttcatacttatagctgcatcagttgagtttgaccttataagtcgtgattagaatttcaatctctagcctgcttttggttgtcgattagggtagtatcggggtttcagccgatcttacctaatttagccctattatctcatgcgcttaattgacatgctagatctaccctttatattaagatcttattacaacaaagtatattaggcttctgtttgatatattttacttgctttaatatcttaatatagagtggtatcggagtattagtcgatacgtgctagatctatctgataggcaatgctataaacatctataatcttgttgtgaatatatacttcgatctaagtgatttatattgtctcggcatggcgtccgatctatcccaatcacttgacttaagtatataccgacatagagataatatattgtcaatatctatagccgatcgagtagatttagtctcttcttacttgtttatatctaccgatcgattcaaacatgacatcggctcagagataaatgatgtcatcggtaactagccgatcggctatcctttatggatttaaccacggtttctttgtctttatttcttggtgattgcaggatcaaatcaactggcatgctcacgaacctaaaggaaagcatttggacctgcactggagttaagcaaatctctcaggcctcgggtttttacatcaacaaccacccataccgaccaagaaactagagcagccagctcagaagaagccgtggagggagaaaccaaagaggcccgctccatcacctccggagacgggtagaaaatccgcaaattgaactggatggaggtacaatcttgcacgtcggactttaaatgacgcgaccttcggcaacagaaaaattggtatgtatccgcatatttgctttcaacaatttgaatttttgcatcatcacatgtttgaatttcaaagttgcatttaggatttttgaattttgaggaaattcttcaattgaatttttttagagcaaaccaaaataaaaatttcaacgaaaattcgctatgccacgaccacattgactgttggaacccaacggccgaaagtggggccgactgggcccaccatgggtttggccgaaccggccaggcaatggttccctgccacttttggcagggtaacggctagtgcgtcccacatgtcatttctgaccattgtgggtaccctataaaagacagccggccgagagagggaattccaccccatttcaacacattttcattccctctccaaagtttgctctcaagttcattcaagctttgatagtttccctgaaattcaaaacacttagttgcatatatacaagttgctttggtgaaactaaccggcgggttaaattcttgtcattgctaactcctgccgagttagtccgatcttgctccattgtgcagaatgaggaggcgactgtctcgtctgttcaaggggtccggctcttcatcaagtcatcatgacgagtctagtactcattcatcagcagatgtcttgatggaagacgccgaagctccgcgacgacttctgaacgacaccgaactcaaccttgtcagtgatcgggagagacaagcctactacatgctgagcgaccgggagtatgctcacacgcgagaatactctccggagaatgctcacacgtgacaagtacacttcttggttttcacgattcctgtaaaatcgatctctagaaaggaatttctgggttcgagaaaaataggttttgggaagacatttttggtgctccaatttgcaagaaacctataacgaatgatatccataatcctacacttaggctcatgcacaaatgaattgctatgactatgtttcctagaggtgatctgaggcccattaggggagatgaattgattatgaattttgccatggttagaaagtataagttctctgctcctattgagtgcacttctctgattactcggatagcaaaagggctaggggtcgttagcgaccaaattgcttttatctcagccgctcgtccgtgtattgatgaggcttatctagtgcaagggcatattctgaaacatggagtagacagatctttgatttactttttccccggttgtacaaatgaaatcctattgccaaatgcggggtatcatttgtacaactgtcgtgaactaaccattcccctgcagaccatagaagaatctcgtacaggtggagcatacagggaaacgcgcaacatgacaagaaatgaacgagaaagttcatcatcctcaacacccgtgcagctgtatgaggcaggttgggagccaactggggacgcacccggatggacccaagctccacaccacaacatcgtagtctcaacccgggcgagtgccagtgaggatcggtggcgtgcgcctcatgacatccaatggggggacaaccaaccttccagatcaagtggtgtgcctccatctccaagtgaatggcgctcaagttcctctcattgggacttgggtgaaatcactaggagaatggacacccctgatattcagacgggagagatccagtacaacctcacggaacacatatttaaacgcaagaatggcaacaatctgctgatgcgcagttcaccaacctcaacaacatgatgcagcaatagcacgatgaccttcaagcgtacttccgttttcaggggttcaatccttatcaaggaccctgagcgaaagcctagcttgggggagagatgagatatctctccccccccccattgagataacttgtatcacattgcatatttcccttttcaattgcatatttgctttctaattgcatcttataaaaatgaagacaacataaaaatttgcaaaatagaaaataccaaaaagataggataggtttgagtcatgctaggtaagacaagctagttctctttgttgaaatgatgaatctctgttttatatctctgatatatgggtttttggtaagtgctctctcaaaggtcaaatataagtagccaacaattatctgtgaacctgaggtaaatgagctgcacctgctgatctaagtctaagttgttgcgagatatgtgatagtaaatatgagttgctatgatcctaatactagtttgacttgaattccggatgttttgtttttcaaaatgataaattgagagttcctcatttgaaataaattcctactagagctaaaaatgtgctatcatgattaaaccatataaactttggttacttgccattccattgaactctgtcaaactcatattttttgcaccatataccacacacattttttcgcacgatcttgatctggagtatgtttagttatctgctttagtctaagtttttgacttagtaataaatgtaaatgcaagtatgccatgtttgatccctatcgagctccacatatcaaaccttggagtaggaatcaaaaaggcaaattggtgaggaattcattttgatgcacttagagagactgagtgaatcatttgagaaacttggctttcttttacaaaatcatttgaaaacttctggaataagagttgaataaagattgggtgattggtgctctaattattgttctgtctttcaactgctcaaggcaaggaaaagcagtgtctcgtgggaatcaggggtaagggtaagccaccgtgccaaagattatttaagctaagagagagtacatataccttgcacctgtatctttgagatatgcagcatagtagcaactcctaatcaacaaccaagtccttgtttcctttcgtccttcagtcggggcgagcaaaggttcaagcttggggggttttgttgacggtcattatcgatcagtttcgaccgtcaatattaccaaaataaaagagaactagtgatgcttgcaatgcataaatatgttagaataataatattccactagtattaggtctactaaccttttgcagagaataacaataaagtggaggagaatcgacatcaactcagacgataaatcaatcggacgatgtcgagaaccagacttatgtatgaatgagccaagaactcagaattggcacgacaaactaggccaaaatttacaagtctgcggagaagaacaacagaggaggccgccagccataccatgggctggttgggccggctgttggtatttcttagcaacactactggaaatataattcccgacagtagcactagaaatattcctggtatattatggttacatatgtgatcctcaagcgcacggatataccattgtagcatttcactcgggagtattccaaggtatcggatttattttatcccaagggaagatatgataagagagtactatgctaatagtttatatattagttatatacatcaaagtctatgcaggggttaattcagttcaaagggtagggtgacacacagaagaaagaactaagaactactctttctaaaatatagtctaagctaagtggagaaagaataagaaaagtatcattcctgtacttctagtatacatacatctttagtctatacttgctagtatacagtcatgcaaccaataccccgtacccaatgtcctagtgtttcgagaagccacccctaactgccgagttccttacgacagcctgtcatgaccatacaattgttgctaaatatggaggaataccctccctagggaattaacttaggattatataccggcgcggaggaatacctgtactgagctgtcaccatcagcggcccacctctcatccgcaatatataaccccaattattggtatctaataatctaagcaccacgcttacattactaaatactactctacatccttgcaaccaacatagagcaaccgaataatcggacactaaacccacaccaatacacctatctggaaagctagttatgcgactatattgattcaagtataaagtaaagtcggtactcaagtaatatgaatggaataaaataccgaacttgtataaagaagaatattctattaattcattaagtcttacaaaagaagaaagcaaagctattaaagccatacccggaatctcctgaagactcgaggactatgaagactattctatttcctactccactagcactagaactactaaacaaaacttgtgtgtgggaatgaatgagaggaggggtatttatagccatgaggtgccttgggagtgtggagatgctccaagcatcctaggagcatctttgctctcctcttgacatgtggcatgatgaagcatcgaaagagcatatttcacctccttgtgccatgtgtccatgcttatgacggtttctaccggtagaattgctcccaaccgtcattgcatacctatagataactgccggtggaaaataggttggattgggccaactggtggttcggccgaaccctggccaggcccaatgagcccacaattcggcaggtggattcctcgtttgccccttaacttaggacaggaaattttgggcttatttgatcatgtcatatctgagttctcagcccatctatcgacaagtctgattctcgacagtgtcggtttgattgatcaattgttgtactgtcgattctcctccatttttatagcttatcctgcatggttagttttccaagcatatagtggaatagaatattttatttatgaaataatgcattgcaagcatagttagtcttcattaattgggtaatattgacggtcgaaactggtcaataacgactgtcaacaccggtcccaggttcggcagaatgtcatgcccggaaattcactagtaatttccggacttatttgtgcataaaaccctcgtccaggaatcagccgaggtacacaaactgacaatttaatatacaaatccgttataataataacgttacatacttgcaaaagaaaagaaaacagcagcggaattaacggtctagcgatggcttcagctccactcccacaggcagctcaactggggtataagccaaacgtcttatccttctagatcctttttcttcaactgaggttgattgattattgcaaagtgagtacatggaatactccgcaagccacacagcaaatatgcaagtgcacaaggataccaaaggatggcataatataggcttatttgcaaaagcagcatttagcaaacattaaatagtagtaaaacagtaaagtaattaatcatcaacactgcacagcacacccatgttgcacaggcccaaccatcctgaacaaccatacccggctgtacagatctaactccaaccaggatctaggcaaattattaccagttatagcattaataattattgtgagaggtgtgagactaatcacgaaaaacattgctcaacccgcccatgaccgcgggcacggctattcgaatagttttactctagccagaggtgtaccgttgtacccacaagacacagcctcaacatcatgtctaccatgcgtcacgatactggaaagtacccgaatagaggctgtgacaataccctctgcacaacacaactcaccacagtgcaccattcctggatcataatcaccccctctataaatataaccagaggcatggactccccagcgacccccacagacttctcgccgcttctcagtatggcaccccgtaatgaaccatgctatacaaaaggtaaagccgttgcccacgttggcttgtggttggcacggttaatgtctcacaacagtagctcgcgaaccagtccttaattgtcatgagcacgaccttcaaaaccatgtgctcacaacccaccattgacaagttttaattggcaaataattaattaaccaatcacgattggccatcgtcagctaccattaaatataatcataagtgatagtgtaacattagttatcgcaatcatgtgctattgtttctaagcatggctaagaagttatatatataaagcatttagctaaaccaaaccaatatataaagttcaagctaatcaattgattacccaaggtatcaaggaataaggtaatcaatgcaaattggccataacaaaggaataggttcacaccacccggtgacattcgaatataaatgcacagttgaaataaatagagaatttaaatataggatcaacatgctcaaaggattgtgtttgggatctgtgtgacttgccctgcaataatcagtcttcaattattcttctgaatcacttccaacgcagtcacgaaccttcgcaacaatggaaactacaagctaacacgcaaaacgaaaaaaaaagactaataaaaaccaaataaatagtacataaaagtaaacaaacatgtagatcatgattttagatgaattatgagacttgaacggcctcattctgatttcatatgaattagttatgaattttacaagattaattccaattaaacctattaaagaaaagactattccaaattaattaaacaatttacaaataatttatatctgagatataagactaaagcatccgccgaaattattggaatgaatttagtatacgacatatagtaaaaagaactaatataccattgaaaaggaataacaggatttatattgattttggacggctgagatcaactttgacctagttgaccaaaattggatggctcggattgatctgatctaaggttttagatggctgccatgtgggatctgagagacggcgtgacacttagatggcagggacgacagctgacaaggcaatgacatggcaaccacgcgggatcaacgccggcggctctgaatggctctaaactaaaggacaactcaacacggacgaacgaatgaagcacgggggacacctcgttcgaacgaacgagcgaacgactcaacaacgggtgcggctaaaccggtgagctcgacacgattcatagtaaagccccggtacggcaaacaataggccggtaggaacctaggattacacgaatccgacacggcacagcaacgacggcaaatggtggctgcggtagtgggacgacaatgacttggcactcacgagcagcagcagcacggctgtagcatggagcggcacaacgacggctaggcggctagcgcagcagtgatgctagggcagcagctaagcatggcacggcggcggctactcaatgacacaaacgagagattaaaacctaaaccgagggaacatagatagaagcctcaccgaaccaaagcgattgaagagggagagacgacgacaccgatacggcagcaacacacggagacgacgacgatgctagacaaacaacggattaggttagattggattaagaccctagggaaaaacctacaccggtgaatggcaggacgacagcagaaaccgatagcacgggaaggaagaggaggacgcgatgatccttaccaacacttacgcagtgatgaacaacaaaggagatggccggcgacgagatcgggagtggcgacggggtactgatcaacgacggcgacggctttccggcgatctttggtgaagaagaggtggtggacggtgttctccttacagctgcgaatccaatgaaggctacggcgaccgaaggcgatgacggacgacgacgaacggcacggctagagatcaaaccaaggcaacaaccaacgggttcacggtgacggcaaccttccggcgggatttggcgcaaaagaactggcggccatggtagagatcaaccttgcggagcggagggaggtggcgtcactgatcgagaacggccggcgtgacgggaaaaggcggctgaagatggcggccggagttggagagagaaaacggcgccggatcgggaagaacaggggctctggacggctggctggaggttgaagatgccactgtagcgagagggagaataacaaacttccggctgggcttcttcttccaaggcctgattgaaagagggacaaatagcagacttcgacaaagagagggagaggggctgcaggcccagagagagattgggcagagaaagagagaggacttttcctgtttcggcccgaaatgaaaaagaggatttaattacttttccaattaaattaatcactgaaatgatccttgaattgttaacaatacttctattgctcaaataatatcaagaaaaatcctgaaagtacttgaacactataaatatttaacaaaattataagtagaccatttattgattaatttaatatgtgaataattactgaaatgttgtttgtattattaaaattacaaattgagctccgaaaaatcaaagaaaattccagagggtataattaactatggcgaatttaataaaaattaaatccagccatactttatatttaggaaatttgatttcccacatttaacttcacttgtaaattaataaatatttaatataaattctaaaaataatttattaaatcctaaagcgaaaatcaggatgtgacaccgagcctccctcgcctccgttggatccatgtcttggctggatggttgagatgaagccccaatgacggttggagggtattaccgaccattccaacggtcacaaccatcatagttcagctataaaaggagttcctcttctcacttcactcacacacctcaagcaatagctctctcatttctctcaagtttagtttagtagtatctagctgatggaataggaataaagtagaaatcaggaatccggaagccttcggaagagatcgggtatgtctctggtagcttttctcttctcttttgtaagccttgtacttttattagaatactcttctaaatacatttatgtattgaaatactttccgattataggagtacatactttacattatattcatgttatactgaatatacggctagcttatctggaagatgctttggtgtgggtatagtgtttgcttatgcaattactctatgtcatgatgatgatattagagtagtatctggtagtttagacgtggtgtctagattacgggaaatcattatttggggttatatattgtggatgagaggtgggccgcttatagtgacagctcagtaagggtattcctccgcgccggtatataatcctaagttaatcccctagggagggtattcctccatatatagccccggttgtacggtcatgatgggttgtcataaggaactcgacagtcaggggtggcttcttgaagtaccaggagggcatcggatagagggtattatctagtatatcggttaactagaatgtatgtatactatgtatattagaagtataggaatagattatctttctcatttctatccacttagcttagataatatattatgagaataagtagttaatgcatgtgtgtcactctacccttagattatcttaacccctgctcagaatatgattatcacaagcaatatataaattattagtcaagttctctctacatgatcttcccacgggacaaaataaatacgatacccttggaatactctcgggtgaaatgctacaatggtatatccgtgggcttgtggattaactctgtaaccataatataccagaagtatttatgcgccattgttgggaattatatttctagtaacgtcgttaattaagaccaatagcaggaaccctagattttgagtacctccaaaaccacttgacaaaaacttctgcaaaactggacgggatgcaatgttcaagtaatgtcgatgattagattcgatttttcatggtcccgacaacaaccgacgagatgcaaaactggatccaaaactgacgtacaactcacagacttgagtgatgaaccctagacctaagggcctgttcactttgatgccaaaaaaaaccttaccaaaatttggcattgccaaaattttggcatagttggcaacttaccaaaattttggcaggatttcttatatagttaaaaaatttggcagcaaactaaatgtagccacttttttggcaactgtaccaaaatttggtaaggttgaaaatgacaccaaagtgaacaggccctaagtgacgaacagatgcaatactcaaaactaaaaaactaaatctaaaactaaaccagcactcgacatgacgatgcaatctagaattcaacaatgcaaaatctaatagaacaatgcaactgctcaaattgtctaggtaaagaataaatatttttgtatggcaattttcttgttatgggaagataaattacctaacgagcaactgcgctctgatacaaaccgatgagggatgttaggggatacaaactgatgagggatgttagggtcccgaccttccgataggtattgataaacagtcgatttgggcggagtcacaacacaactcgatccggcttctgaacaaacacgctactgagccccgcaatcgcagcaccatgtctcctctggttaccaaccgtgccgaaacccggttgacctcgccgagaaggctaatccctgcatgcgaatcaaagaacacaagcaagaacaagatagattgcaacacaattgcatatgaatgattaagcacttaaatttggggttttgtgtgttttcgtttgcagaggtacctgcttgggtgaaataaaagagactgagcgaaaggaatgcatggatgattaaagaagttgattggggaccaaaccaagaccttctccaagtccacttccatatcaccacgtcacttttggtccatagaagacaagagataaagttctacacgttttggattcggattcaggcctcctgacttcaaacggaccttgccgctgatctagaagcaatttcagggcccatgagtacttgttggaaagattattgagtctactttcagatggttttggtccgacattaaaattcctaccgagctgccggaattttcaaaacaagtcccgtatctcatcatgtccgaatctgatttgggttttgcgccttgtaattgaatcgtgggcttagcccaagggggtgtgcgtcctagggcaaccataggacgtccctaatcatacttaatcagtagccgtcatcatttagagtcgagttttgcttagattattttgttaagaacaatttcgccgctagatcggtttgtagaaccccatattcgagtgcttaatcattcatatgcaattgtgttttaatctatcttattcttgcttgtgttcttcgattcgtatgcatggattagccttctaggtgaggtcaactgggtttcggcacggttgataaacagagaggatgtggtgctgcgattgcggggctaagtagtgtgttcgttcagaagccggattgagttgtgtcgcgaatccgcccaaatcgactgtttatcaatacctatcagaggatcgggacctaacttctattgatgatcgttatcgaccagttttgaccgtcaatattacccaattaataaagactaactatgcttgcaatgcattattccataaataaaatattctattccactatatgcttggaaaactaaccatgtaggagaagctatcaaaatggaggagaatcgatagtaaaacaatcgatcaatcaaacagacattgtcaagtatcagacttgtggatagatgggctgagaactcaaatatgacatgatcaaataagcccaaaattccctgttctgacttaaggggcaaacgaggaattcacctaccgaattgtgggctgattgggtatggccagggttcggncnaannnncnnnnnnnnncccacccacccaaaccctaaacccaacccaaaanccacccttcaccatcaacccaaatcctatcactctttataacaatttttctcttacaaacctttctaatcattctcacatcgctacataccttcaaagaaactattttgatactcaaatttctacctttcctaaagagaactaaattgctcctttgattcanaataacatccagtcaatttgttttatagtccatcactgtttacgagattccggcaatgttttaatagcatcttttttttttttgtaagccttctgggttaatagtataacctaatttaaacaaacgccgggtatatatgccattaatattactcgagtgccaactttactttaagattggaataaaaataacgtttgtacacaggcaaaaaatttctctattcatcaaggcgtagacttttaatttcattacagattaacttgagggggccatttttcttttaaaattggaacaactattgtcggtgacactagcatttaaccaac

SEQ ID NO: 6055 - DNA, 1888 bp, Oryza sativa
tgcatcagccttctcctcattcgcgagtgatggaagtgacatctcaaacatatcgttcttctcattttggggactgttctgaacttcctgcaaaatatcagtgataggaggcacaagcatagcttgttgctccattgggttttccaaaattttgcgctcaacattgcaagcaagcatgaacaattggcctatatgattatatgtcacattaacaagcccagcctgaatattggaattaagccctctgaaaaatctagtcattgtgttctcattagattcttgtaaaccactataagtgatacaaattttaaaatcatgaaagtactccctaacagttttgtcaccttgttttagatgttcaaatttttcaaagagagcacgtctatagtatgaaaatacaaatctttttctcatcagtattttgtattcatcccaagtgtcaagcttatttcccacagtatgccacaaaaaagatgcagaaccggtacacttattactagcagccttaatcatttgagcattagaaaaatcatactcatcaaattgtttgtctactgctagctcccaattaacgtaagcggcagaatcatacttaccatcaaaaactggcaaattagattctacccttgcaagatcattatcatgtaccttatatgcgccatgtggatcacctgccatttgttgtcgaagatgaacaagtcgatgatctgttattcccttgcgcaatcctgtcatggttagtagcaaacaagaaatacacaagaatatgcacgctcctatcaactactaggtagtggtagctgaaatatcacacacactcaagcttttcaccaagctcttacaagttcttactaaagcaagcggaatggtgacgtacaccgactcaaccaagcaccccaatggaggttggatgtatcgatgccttggcaaacacttgctgtacagctgcaatcaaatctgtggagctctaggtaggcttaaatatgtagcaaaggaatagcaaatgctcaatgcagagaatgcaaagttgaatgatcgttcaaagtcatgtaccgtgctggtcctaggctagaacgtactagagacgcgagcctagacacaaacgataccacaagatataaacactaaagcacaactctgatatatgaaagcaaactcaaagatacaactgatttttctcttttccttctttcttctttcttttttttctttgttttcgttttcttttcttttttttggtgcggcttttcttttctttgtttctatgcacctttctgcctttttctctttcttttttttgattttttttacaaaaacagacttaaggacctcaacgtaaggttagagggactcaaatgcaaaagagaaaacccataaataaaattaaaactatacaaaaatagagtgctctcgtcccataggctccatttttgcaaacagatttccaatccgatactccaacaattttcacatagctatgtgagaagtcacggtgtagatcaaaaccgagagaaaaaaagagggagggagtcagactcgggagagggggagggaagccacacgcaggggggtgggaatcagctaaaaatctgcaaatcacgcatggaaggaaacaaagtccaaaaaccgatctgctatcatttctttctccttaaccgcgcgcaacagatcttcgtcctcacatgaacagaacaagcacggccgaatgcagacggcaaaccccatatgcaacttcagcaactacaagaccgaccgacaaaaacttctgaaaactagaaaaatgaaaccctgacaacaagacgattccgttttcctaggtcccggcgacaacaaacacacggcggtggcggcgacagtggtacgaaacctgaccagaacttgaaactct

SEQ ID NO: 6056 - DNA, 10913 bp, Oryza sativa
ataaaaggccttaaaacctcattcattaagcgcatgaaagtactaggtgcattagtcaaaccaaaaggcattactaaccactcatacaaaccaaatttagttttgaaagctgttttccattcatctccaagtttcattctaatttggtggtagccactacgcaagtcaatctttgtgaaaattatagaaccacacaactcatcaagcatgtcgtctaacctaggaataggatgacaatatcggatagtaatattattaatggctctacaatcaacacacattcgccaagaaccatctttcttaggaaccaaaattacaggaactacacaaggactaaggctttgacgtacatacccgctgtccaaaagatcttgaacttgccgctgaatttccttagtctcctctaggttagttcgataagcagcacggtttggcaatgatgctcctggaatcaaatcaatttgatgctctatccctctcataggtggcaatcccggggatatctcagctggaaagacatcctcatactcctgcaaaaggttagtaacaacaggaggtatcgaacgagcaatatcatctagagaaaccaaggcttatttgcatatcaagaaatagcacatatcattatctgaaattacagcaatgtcacatttcgtagcaagcataacaccacccttcaacttaattccctcaaccttagaactaggtgaaagcttatcctttttgggtggaaaaacagatttagccacttgctgattttcagactcatcaagtttcaaactagcagctcgctctttatcagcttctacaatttcagcaggggtaaaaggtagcaaagtaattttcttttcattatgcacaaaagtgtatttattactcctatcatggtgtgtagcatcattatcatgttcccaaggacgacccagcaaaagtaaacaagcttgcataggaaccacatcacaatcaacagaatctgcatatgagccaatggaaaatgaaaccctacaaacctgtgttacctttgctcttccggaatcgtttaaccactgaatatggtaaggatgtggatgtgtacgtgttgtcaagccaagcttagtgaccaaatcagaactcaccaaattattgcagctacctgcatcaatgatcacacgtgcacgatggttgttgatgacaaagaaaatctgaaacaaattatggcgttgcaacctctcaggctactgtacctgcgtgctgagcacccgctgcacaatgatggtcctgtaatccgatgtgtcatcatgaccaaagacttcgccatcctcatcctcaacttcttcttcctcctcttcctctttcacgtcggaggtggtgatgtagccatcttctgtagcaacataggcccgttgactagggcaatctttttctgcacatgcccaaacccttggcaatggtggcactgaatgcgtcccgtcgaggcgatagatgaggaactcttggcaggtatctgcgaagaacctttacctgactctgcttggtggagatggttttggtgccgtagaagctccagatgcagctggtcgcttgctcgctggctgggaatgcacccgaaaagagacagccttgggcagtcccgcagatggcgtcgtgcgcggagtgtatgtacttgccttgttcttgccctgatggtcacgcccctgcaattccttctctgcaagcatagcaaaccgaaacaactggttgacagagttaaattctttataatcaacaatattctgaatttcctccctcaaacaagagtaaaaacaacaaatagcatcctcgaccccctccactatgccacagcgtctcacacccttttgtagctcaccatagtaatcctgtacagatttatccccttgttccaaacgcatcagtttcttgcgcaaatctctatgataagatggaggaacaaacctatcgcgcatagctaccttaagttcttcccaagtagtaggtagtaccccctcatcagacaacccagcccaccacatgatagcaaaatccttgaactcactactggcttgtctaactctatgttgctcaggtataagttgggcattaaactttgttctactgccatctcccaatcaaggtatttctcagcatcataatatcccgaaaaagatggtattttaaacataaccatagcataaggataatcgggcacacgattattattaccttgttggtggcgagtgccacccatacctgtgcggtttgtgcgtaggtgacgtcgtagctgtgcttgccttgtagctggtgtgtcaatatagccactggaatcatacaccgtatcttccggatgagcatcgtcgtcaccactcaccacttcctcattggaaggtgtctccaacgcggcaacccgatcagttagcgtggatatccgtttgtccaacctctccatgtggttcaggaagctgagtttagtgaaggcatcttgcacagactttccaacggcctccgtgatgtcctttttcttggagagttcatagttgctcttagctgacatagtcagcaaaatcctggggactcttctcaccttcgttacctgccattgaaacaccaaaacagaaacaaacggtgaaggttatccctaataatctactacgcaggtgtagtggtgcctctcaacgattctcagcaatatggagtacctaaccaagctcttataaggttcttagtagcaaagcaaaggatacctggaaggcgtagtcagcgatgcagggatcaagaacctgtgctgtccagaagtaaatatgtggagctaggaaggccaaatatatgtatatgagtggtacacaatccaatgacagatagtaatgctgaataaaaatcccaagtcacttgcccttagttgctggtctactcgtgtattagacagtagtggtaacaataatggttcaaggaaaatgacactagtaaatagcaaagaaggacttgcaggcaagcttcggcgagttttagcaaaaacaacaaaaccgaactggcagataagctcaacggagcacgtcgtgagcttaatgcagtagtggaaatcaacttttctttttttttcttttatttttttgatatttttttctttttccagaacacgaaaataggcacacctctaagttacagctcaatcggagttgatatgtggcctatggaattttctgaaaccactataaacaaggtgcaggaacttgtgggctcgaacagacaattttgcaagccaaattttagaatttttttctcttatctgaaaagttaaaatttgcctgattccgagtccgtatgcaaaagttatggctgtttgaagttttggcttctggctaagttttccaaaggggatataacctagcctattttgcggtggaattgggatatggtggcagcggagtttgtaggatgttgtggtgatgcgtggtgatctggaattgggtgtttatgatggcggaaatggctctcaaaggatagggttataaaggaaaaaacacacgactagactaaaacacgcactagaccagcaataggaacttaaactaggactcaaactcaacactacggactctgaaaaagaatcatgcaaaggctaaacacggtctaggttaaggttactaacgactaaattttttttggcttttctgtagactctaggataattacgaaaaacaaaaactaatctagggcaaagaaactgagcgaacctgacggtgaacctagagctctgataccacttgatgtgcactagggttcccgatcttccgaaatgttttgataaacaacgatttgggcggagtcgcgacacaaatcgatctgtcttcttgaacgcgcacgctcttgagccccgcaatcgcagcaccacgtctcctctggttatcacccgtgtcgaaacgcggatgacctcgccgagaaggctaatccctgtttgccaatcgaagaacacaaagaagaacgagatagaaaacaaccaaaattgcagatgaatgattaagctcacgagttgtggtcttacaaaccgatctagcggggaaactgttctcgacagattaatctaagcaaaacccaaagacctaaagatggcggcggtacttatatatagagtttagggtcttgcaacccgctctcgacgcaacgctaatgagttccaacgcgatacacggcccaaaagtccaaatacggtgacgcaacaccgggacagattctggacatcaacttgttcggtcgattcctattgactcggaaagaatttggatgtgggaccagaaccattggaaaggttatctttttagctttccatccatataaagaacgtgtagcgcccgttccgtcgtggcgcctagcgggaaaactatctcttaaaaaccctaattgcgaaatctgtttccttgcttgttgtctatccccgatctatcgtcaaagttcaatcccgaatctaaatccttcccaaatcaaatccctccgcagaagtctattttgcctccctcaggttcgatgggccgaattcctctcggcccatctcccccctccccatctccccctctctctctctctctctttctcccgctctgcccatgagccgcgccgagccctccctctccgctctcgctgccgttcccaccgatgccacccaaatcgccgcgccggccgcgcgcgcgcgcgccgtggtggccgaccggccactcgccgctgccgtccgcgcctgccgcgcctgccgcgcctcccgtgcctgccacccgtgtcgtcgctccactccaaaccgcccccgccgtcatcgccgtcgtcatcgacccggcctccgccactccgcgcgctagcctccaagggacggaggcagagctcctcctccctctgccgcgtcgcccccgttccctccttcttttcccaaagtggcaatgggcaagccccctttcttccttccttttccctttttctcttccttcgctggcgtcattcccctcctccctgtggacgatttggccactagccggagcgcccgatcactggcttgaccgtccaatgtcggttcccctctcccaaaccgactttgtcgcccatataaacccaagctcccccctttcctttcctctaccattcgccctcgctccaccgcgccattgccgtcccctctgtcccgcccccgccgtcaccgccgccgtcacgtgtgccgaagcagccggtgtgcgttaggacgcggaaggggacttcgggcgcgccctcttcttcctctacctcggcccgaggccggagtgatcactcccgtgccgtcagcctctcgtcacagcgccccacctcgtctcagtagtgcctccctccgttctccatcctcgttccatctcctccccttagactcgggtagtagcacgagtagcctcctcgtagctagctagcgccgccccgaccattgcagccgctcgctgtgtgctcgccaccgtcgccgcccgtgctccgtagcgcccgctcgtcgctggcctcgctcggcgtagctccgcccaatccgacgctagcaacggattcccggagtcgcgtagatgctctagctcgcccgaatcggtctcccgtcacaccttcgccgtttcccccttctcccaccgccggttgcccccgccgcaatccgccgccgtcgagcatcctccggcgaatccgagccgttggctcgtctcccctcgtcccgagcaacttcccggtgtgctcgctttcgactgtatcgccgtggttcgctacgccgcctgccaccgtcgtccgccgtccgttccggccgacgtcgtcatctacctcccgccggcccgcgtggcagccacgtaagcgccacgtcggcgccacctcggccgcgtccgagtcaagctgaccccggtccgccgctttccctccgccccactcgcgcgcgcggtccaccacgagccgtgaggctgcgcgtgggcccgccgcaccgcgtcctccgtgaaccgcgcgcatgcgccgcgcctccctccccaaaccctagcacaccctgcgtgcacctcgctcacggtgagccaagtcgccgacaagcgagtcccacccgggaccacgcgggatggacccggcccaccggctctctctctctcctccccgcccgcgcgcatgttttgggccgccttctcgggccggccggcccgttaagttcggccgagccgcccctttctctcgggccgcgccctagccgcctaaggaaagtctaatttccctccctccttcttttcttttcttttctttttcaaaaaggatttaaataaatccttttcctttagaccaaaaatccaataatcttagaaattcaatatcttcccaaccgtaagtccgtttgactctgttcaacttccaaaattcctcaaatctcgagatctatataatggcacgcttagaggtcaataatagggctttatttttgccgtttgctgagttgtcccgtttcgcgtgtagtttcggagcccgaagacccgcagtgcgaggatttcgaggatcaagctcaagatctcgagcaaggcaagccacctttgaacatcttgagcctatatttgaacttaattatgttgcttgaaaaatattatgcattaataggattgcacttaatctgcttgtcccgtctgcaaggcagattggcggacctacctaacttgttgcatttgacccttccatcgaaattcttataccatgttcccttgtaaccacctagttacgcctcggcaatcgtgcactctgcacgagtaacgacggtcgccttcaaacttaaaatctgagaaacatcttgggtaaaacatgggttttataaaagacttggaaaacctgacaccagggtcggtgcttgcgaacctaaatgaatttccaaaatcgcggaccggggaacgtaccgggtgtacggtttcccgctcttgcacttaaggaccgtttccttggaatttcatccgaacataagacaagtacgaccacatgggtggaatgggacacccctggctaagtaactagctaatcgggggagccatgatgccaagagacatgtggattcaacggggtggtgtcggggaggacccccgggtttcttggcacagtatggtctgggacctcatctagtgttggtctgggacccctctcgttggcatatggtgaacctgtgtcggctttccaaatgccttgtcatgaaagccttaaggtctctagtcgtggccgttctgcacgggctggatgatctgggttagtaatgtcgtgtgggtaaagtgtaccccctctgcagaggttattaaactgttcgaacagccgtgcccacggtcatgggcggatgtgaggtgattcctagcgtagttttgtttgactactgctttgtgaaatttgctgatgtggtttgggattgatgtttggaaaatctgcggctgatgggatcatccaggcccaggtggccgtttaaaagccgttggccgggtgccaaccttgatcaattcaaaagactgataccttgcacatacttcgaccagacgagacgcactgtctcatctgtatcgtttgagaagcactcacttagttgtttcagaaaagagtttaaataaaatcaattgcaaaaacaacagcctttccttgaagcctgcattaaacacttatttcccatggcttgctgagtactcccgtactcacccttgctgtatataaataatcccccccagttgttgaagaagatgaagcggatcccgctgacgaggagttcttccaggagcaagccggctacgatgagttttagggttttcggcctagttcccaagtcgcgcctgtgatgtttggtccaagtcttggcttccgctttccttttgtaatgcagttgtgagctcgggatctgtccgcagcccaacatgactgggctcctactctataataaagagacctctgttgctgtgatattctgtcttcctgtgatactagcactgtttcctgggactggtatcgattaacaggttaatttggagcgtcacgggctagttctgctcgggactagtccggggcgtggcaagagatggtatcagagcacaggcttggccctagggcgaaacccgacgtttaggacgaccctaaggatgctaagttcaaaactacttgcgaaaagctaaggctccttttggtttctttattttcaatagtttgttgctaaaatggttattgatcttttctccctctttcaaaattgtagatggcagtgaacgccagcttcagttcccacggttttggcgagggtcaccacgtcgctcagcttcgtgacctcgcccgcttccttggcttctcgtgtcccgagtacacggggtactccgtggaccgtgttccccctcgctgtgagctctgtgtacctttaccctcgtggaggtatacacggagctggcctttgcccacaccacttcactgtggccaggcccactctccagatcgcgtaccaggacctctcctggactgcgcttcgacgcttggcccatgactacagccaccgtctcgggggctctgccttctggcagctcccacgccttccttctggccacgcagacgccaggtacccttgtccgtacagcgagtctcagccagtgctgactcgcatggtggagctttcggaggcttaggccactcagcacgacctactcctcgaggcttaccgctcccttgcccgccgctacgccgctctggaggcccgtctggccgaggagggtgtcacctcagttgacactgtctcttgggactcaggccgcctctgccacgccagccacctgtcctcccacagctctcgcggctcttcctgcactcccagtggcccgcgctcccccagctcgcgtgcgccgtactcaccagtgtactccccctacccacacccagttagcccctcctacacccccggacacaccccagttgcttcctcccgccgtggcccacgctttatccgcactgtgcggaagcatgttgttggttcttccaccgtgttccgcttcgactacccagctcccccaccgccagcggcccgtactgctgccggccctcgacaggttccgccggtcccttcgcgctagccgatcgacgtttcttcgactgaggagccgactacaagaggcagccaggcagacgaggagtagaggaggcagtcttcagcagctgtccgtgtgttaggcccttttgttccgccgccaactcttttggagtcatggcgagatagtgcgtgcgtgtgtttgatgtgggtgttgtttggtagtctggttctcgtaggtggtgtgcgtacagtcaagctcggcgtagctctgtgacttgtccacacccgttgtatcaggtgtttttatgatttgaaaaatccagtttatgcctagtgcgtgctatctgagttgttatttactttgctccttgccctcctaagtgcttatctgattcttacctcgccctcttcggtttagatggctagccgcccccgccgtgctgctcatgcatcagcctgcttcggttttgaggaaggtagagttgagccagaagcaaatcatgagtcagctaatgagcaatctcaccacagcaaccgttcgcaccgtactgcttcccgcaatgcagaagttgagcaaccccgccgcagcaaccgctcgcatcacacagcttcccgtatagcagagatggaacagtctcaccaatctcaccgcgctgctagtcacaattctggagaagaacgcatcccttccccacctcatgtggaaaacaacatgcaacacctgatggcagttcagacacagatcttgcaaggattagccgcggctatagccggctttcagcataatgcgcatggaaatggccaccctcacatgagcaacaatagatccaaactgaccgacttcctgaggtctcggccgccagagttctctcagaccgtcgagcccgttgaggctgacgattggctgaaggatgttgatagaaaactcaacttagtgcagtgtactcctgttgagaagacgctctacgcctctcaccagctaagaggacctgctgcagattggtgggagaattactgcaatgcacaccctgaactcactaacattgcttgggatgagtttgctatggctttccgtgcagctcatgtgcccgaaagcaccattgatatgaagaaagaggaatttaacaggcttaagcaaggcaacaacagtatcaatgagtacctaagtcagttcaacaagttggctcggtatgcccctaaggaagtggacacagacaataagaagatcaggaagttcttgaagggaatcgcagttggaatgagactccagttgcttgctcatgacttccccacttttcaacatatgatcaacaaggcacttctacttgaggatgccagaaaagagtctgccgaagaatataagaaacgcaagtctaaccatcaggggaattcttcccgaggcgcacctcgccctcgctatggtcaacccatgcaataccactagtcggtcactcaagctaaccgccagccaggctacgcccctcgtcctcagatgaaccgctcggcacctcagccacagcagcatgccccaagtggcaatactgcgcccaacagggttacctctttcaagtcaccgctaggactgtcagcagttcagtgtttccggtgtaaccagatgggtcactatgctagatagtgccatcagaatcctaccaacaccaactcagggcatgctaatggcagcactgccagaactcctactccagcagcagctctgtctcgtcctaactctcaggcaagaggacaaggttctcgtgcctccaacaactttggtcgaggccggatgaaccacattcaagctgagaccgctcaggatgttccagacgttgtgatgggtatgttctctgtcaactccgtacccgcaatagttctgtttgattcaggagcttcccattctttcatatca

SEQ ID NO: 6057 - DNA, 21374 bp, Oryza sativa
acatctacaagatacgattggtggcgaaaagttacagacaaattcaaggtgttgattatgatgaaactttctcgccagtcgccatgctaaaatctattcagattgttttagcgattgctgtctatttcgattatgagatatggaaaatggatgtcaaaacagctttcctcaatgcaaatctcgatgaggatgtgtacatgacacaacccaagggttttgttgatccacaattagttaaaaagatatgcaaattgcagaaatccatttatgggttgaagcaagcaatctcggagttggaatattcgttttgacgaagtagtcaaggcgttgggctttgtcaaaaacgaagaagagccttgtgtatacaagaagattagtgggagcgcactggtgtttctaatactatatgtagatgacatattattgattgggaacgatattcctatgcttgaattcgttaagacatcgttgaaaaatagtttttaatgaaggacttaggggaagcagcatatattctaggcataagaatctatagagatagatcaaagaggctaattggattaaggcagagtacatacattgacaaggtgttgaagaggttcaacatgcaagattctaagaaaggtttcttaccgatgtcacatgacattaatcttggcaagaatcagtgttctcaaacgactgatgagcgaaacaagatgagtgtgattccatatgcctcggcaatcggatccatcatgtatgctatgctatgtacacgtccagatgtttcatacgcacttagtgcaacaagccgataccaatcagatccaggtgagactcactggatagctgtaaagaatatccttaagtacttgataagaactaaggatatgttcctagtctatggaggacaggaagagctcgttgtaaatgattacaccgacgcaagctttcaaaccgacaaagatgattttagatcgcagtctggatttgtgttctgcctgaatggaggcgctgtgagttggaagagttccaagcaagatacattggctaattctacaacaaaaaccgaatacattgccgcttctgaagcagcaaaggaggctgtttggataaaaaaattcgtttctcaactaggtgtgatgactagtacttctagccctatggacctctattgcgataatagtggtgccattgcacaagccaaggagcctagatcgcatcaaaagtccacacattttatggcggtatcacctcattcacgagatagtgagtagaggatatgtgaagatatgcaaaatacatacggatttgaatgttgcagatccgttgacaaaggcactccctcagcctaagcatgaggcacacactagggcaataggtataagatacattcatgattgactctagtgcaagtgggagactgttagtgatatgccctagaggcaatcatagagataattgtatcacatactatgtttaaatatttatccgacattgttccttgaaatagataactccttattggttaatgaatatgtgattctttcatcagactctttatttgtttgttactatttctaaaggatccctgatcaaatatcatatgtagaacaaatatgtttatatgatcagaacatgtattaattgatgatcatgtctcatggatcatggtatagagatactaaattaataatctggacacatgttggtgaacatgttgttcgatagacccaacatgagacactgcaagagctatatgtgttgtgtcatcagtgatcttatttagtgttggtgttgaatccttagacttgagattatcatggttctcaacatgtgtagtagcttacttacggactactaaactctactatgtaaatgggtagctataaaagtagttttcgggtatgctatgaaacatgtagtgggatataaataaccaagatgggatttccccctcctatggagagatatctctgggcccctggatgttgtagattatggaagtgcatgaccatgccaaaggtgattgaggagtcaatcacaagttatataatctatcaacaggttcgagtgaatgattgagctattagaggatggcacatatctagccttgagcttagtcgatatcgtgaggcaccgggttcatacaagtatacagtagaggtttagccgatatgatctttatgtatgcgtagtgggtcaatacgttctgctaggggccgctgttgatgcgtggaccgaaaaggagttttcgggttacagccgagtatatatgaacctacagggtcgcacgcttaatgggcctgaataaggggattggatagagatccaatatgagcttaatttggatagggatccgaatcggagtcctacgggccttggagggctcgagtgatggatcctatatatttgtgaggggtgtgaccggcggaggcattgcatcacgtgagaaaccctagtcgtcactcccctccccgagcaaaaccctagccgcgcgcgggtgctagcacatctgcgcgtggcgttccatccctatacgtgtggataccggtaaaggcgccgctagtttgcggtgctgatcggtgtgggagtacggcaaggagaacacacgaggaggagaaggtcgagtcggtgcgatcgactacttcctctacatcgacgcgcgctacttcgcgagagttccttcgacttctcagcgtcttcttccgctgcacagcgcgtcgagtggtaactatctatgatctaatacttgcatggttcctggtttacgcgatagaaaattttgatttatcctatcgtagccttcgcgtatcccaacaatataatcattagatagcaatctattcttgaattcatacaaaaaagaacataggaatgagctcacctctaaatttaattgtcgcacacgagctcttgttatcggtccttaaatgaccattggaggattgttgtgtgtaaccgaggtagtgatgtctgcatcatcctccccctcttgaattgaagtcgtcctcaactcaagctcatcctcttctcccaagtatggcttcaaatctgaaatgtaaacgtgggactaaccctaaagtcgggaagcaactcaagtttatatgtattatcattaatcttctcaacaattttaaaaggaccatcagcacgaggcatcaacttagactttctcaattctggaaatctatcctttctcaagtgcaaccaaactaaatcacccggttcaagcttaacctcttgcctacctttactaccagcaattctatacttttcagtcatcttttcaatgttgaggttagttgactcatgcattttcagaataaattcagcgtgtgccttaggatcattatgaaccctctcactagtaggtaaaggcaaaatatcaattcgagcacgagggttgaaaccatacactatctgaaaaggacttaccttggtagtagaatgtgttgcccgattgtatgcaaactccacatgaggcaaacattcttctcacatcttcaaatttttcttcaaaatagccctcaatatggtacccaaagtttggttgactacctctgtttgtccatctgtttgtgggtgacatgatgtagaaaacaatagctttgtacccaagttgttccatagcgtgcgccaaaaatgacttaagagttttgcatctcgatctataacaatagtagaaggcataccatgcaagcgaacaatctcatggaaaaacatatcagcaatatgaacagcatcatcacttttatgacatggtatgaaatgtgccatcttagaaaaacgatccaccacaacaaaaatgctatccctccccctcttagttctgggcaatcccgaaacaaagtccatagaaatatctgcccaagaaatagaaggtacaggaagaggcatatacaaaccatgtggattcaaatgagacttagctttctgacaagtggtgcaacgtgctacgaacctctcaacatcttttctcatccttggccaaaagaaatgcatggccaaaacatcttccgtcttcttagctccaaaatgtcccatcaagcctcctccatgcgcttcctgtattatcaaaagacgaacggaaccaactggaatgcatagacggttagctctataaacaaatccaccattgatcacaatttttttccaagtacgtccctctttgcaatttaacatcacttcattaaaatcaggatcaagcgcatattgttctttaattgattcaagtacaaaaatccgacaatcaagttgggacaagaaagtatagcgcctagacaaaacatctgcaatcacattatctttccctttcttgcgtttgataacataaggaaaagattcaataaattcaacccatttagcatgtctacgattcaaattattttgagaccgaagatatttaagcgattcgtgatcggactgaataacaaattctttatgccacaaataatgacgccacgtctctaaagaacgtacaagagcatacaattccttatcatacgtggaataattcaaaacaggaccatgcaacttctcgctaaagtatgcaacaggcttaccatcttgcatcaacacacctccaatgccaactccactagcatcacattctaactcaaaagtcttaccaaagtttggaagttgtagcaatggtgcgtgtgtaagcttgttcttcaaagtgtcaaacgacttcccctgtgtctttccccaatggaagaccacccctttcttcatcaactcatgcaatggtgcagcaaaggtactaaaatctttgacgaaacggcgatagaatcctgcaagaccaaaaaaactcctcaactatgtgatggtttggggaaccggccaactctttatggcttcaattttcgtctcatccacctcaattccctttggagtaacaacatatccaagaaaagaaactcgttccgtgcaaaagatgcacttttcaaggttagcaaacaaacgtgcatcacgtagggcattaaaaacagcacataaatgatccatgtgttcatcaaaagacttgttgtaaatcaatatgtcatcaaagtaaactaccacaaatcgtccaataaaaggccttaaaacctcattcattaagcgcatgaaagtactaggtgcattagtcaaaccaaaaggcattactaaccactcatacaaaccaaatttagttttgaaagctgttttccattcatctccaagtttcattctaatttggtggtagccactacgcaagtcaatctttgtgaaaattatagaaccacacaactcatcaagcatgtcgtctaacctaggaataggatgacaatatcggatagtaatattattaatggctctacaatcaacacacattcgccaagaaccatctttcttaggaaccaaaattacaggaactacacaaggactaaggctttgacgtacatacccgctgtccaaaagatcttgaacttgccgctgaatttccttagtctcctctaggttagttcgataagcagcacggtttggcaatgatgctcctggaatcaaatcaatttgatgctctatccctctcataggtggcaatcccggggatatctcagctggaaagacatcctcatactcctgcaaaaggttagtaacaacaggaggtatcgaacgagcaatatcatctagagaaaccaaggcttatttgcatatcaagaaatagcacatatcattatctgaaattacagcaatgtcacatttcgtagcaagcataacaccacccttcaacttaattccctcaaccttagaactaggtgaaagcttatcctttttgggtggaaaaacagatttagccacttgctgattttcagactcatcaagtttcaaactagcagctcgctctttatcagcttctacaatttcagcaggggtaaaaggtagaaaagtaattttcttttcattatgcacaaaagtgtatttattactcctatcatggtgtgtagcatcattatcatgttcccaaggacgacccagcaaaagtaaacaagcttgcataggaaccacatcacaatcaacagaatctgcatatgagccaatggaaaatgaaaccctacaaacctgtgttacctttgctcttccggaatcgtttaaccactgaatatggtaaggatgtggatgtgtacgtgttgtcaagccaagcttagtgaccaaatcagaactcaccaaattattgcagctacctgcatcaatgatcacacgtgcacgatggttgttgatgacaaagaaaatctgaaacaaattatggcgttgcaacctctcaggctactgtacctgcgtgctgagcacccgctgcacaatgatggtcctgtaatccgatgtgtcatcatgaccaaagacttcgccatcctcatcctcaacttcttcttcctcctcttcctctttcacgtcggaggtggtgatgtagccatcttctgtagcaacataggcccgttgactagggcaatctttttctgcacatgcccaaacccttggcaatggtggcactgaatgcgtcccgtcgaggcgatagatgaggaactcttggcaggtatctgcgaagaacctttacctgactctgcttggtggagatggttttggtgccgtagaagctccagatgcagctggtcgcttgctcgctggctgggaatgcacccgaaaagagacagccttgggcagtcccgcagatggcgtcgtgcgcggagtgtatgtacttgccttgttcttgccctgatggtcacgcccctgcaattccttctctgcaagcatagcaaaccgaaacaactggttgacagagttaaattctttataatcaacaatattctgaatttcctccctcaaacaagagtaaaaacaacaaatagcatcctcgaccccctccactatgccacagcgtctcacacccttttgtagctcaccatagtaatcctgtacagatttatccccttgttccaaacgcatcagtttcttgcgcaaatctctatgataagatggaggaacaaacctatcgcgcatagctaccttaagttcttcccaagtagtaggtagtaccccctcatcagacaacccagcccaccacatgatagcaaaatccttgaactcactactggcttgtctaactctatgttgctcaggtataagttgggcattaaactttgttctactgccatctcccaatcaaggtatttctcagcatcataatatcccgaaaaagatggtattttaaacataaccatagcataaggataatcgggcacacgattattattaccttgttggtggcgagtgccacccatacctgtgcggtttgtgcgtaggtgacgtcgtagctgtgcttgccttgtagctggtgtgtcaatatagccactggaatcatacaccgtatcttccggatgagcatcgtcgtcaccactcaccacttcctcattggaaggtgtctccaacgcggcaacccgatcagttagcgtggatatccgtttgtccaacctctccatgtggttcaggaagctgagtttagtgaaggcatcttgcacagactttccaacggcctccgtgatgtcctttttcttggagagttcatagttgctcttagctgacatagtcagcaaaatcctggggactcttctcaccttcgttacctgccattgaaacaccaaaacagaaacaaacggtgaaggttatccctaataatctactacgcaggtgtagtggtgcctctcaacgattctcagcaatatggagtacctaaccaagctcttataaggttcttagtagcaaagcaaaggatacctggaaggcgtagtcagcgatgcagggatcaagaacctgtgctgtccagaagtaaatatgtggagctaggaaggccaaatatatgtatatgagtggtacacaatccaatgacagatagtaatgctgaataaaaatcccaagtcacttgcccttagttgctggtctactcgtgtattagacagtagtggtaacaataatggttcaaggaaaatgacactagtaaatagcaaagaaggacttgcaggcaagcttcggcgagttttagcaaaaacaacaaaaccgaactggcagataagctcaacggagcacgtcgtgagcttaatgcagtagtggaaatcaacttttctttttttttcttttatttttttgatatttttttctttttccagaacacgaaaataggcacacctctaagttacagctaaatcggagttgatatgtggcctatggaattttctgaaaccactataaacaaggtgcaggaacttgtgggctcgaacagacaattttgcaagccaaattttagaatttttttctcttatctgaaaagttaaaatttgcctgattccgagtccgtatgcaaaagttatggctgtttgaagttttggcttctggctaagttttccaaaggggatataacctagcctattttgcggtggaattgggatatggtggcagcggagtttgtaggatgttgtggtgatgcgtggtgatctggaattgggtgtttatgatggcggaaatggctctcaaaggatagggttataaaggaaaaaacacacgactagactaaaacacgcactagaccagcaataggaacttaaactaggactcaaactcaacactacggactctgaaaaagaatcatgcaaaggctaaacacggtctaggttaaggttactaacgactaaattttttttggcttttctgtagactctaggataattacgaaaaacaaaaactaatctagggcaaagaaactgagcgaacctgacggtgaacctagagctctgataccacttgatgtgcactagggttcccgatcttccgaaatgttttgataaacaacgatttgggcggagtcgcgacacaaatcgatctgtcttcttgaacgcgcacgctcttgagccccgcaatcgcagcaccacgtctcctctggttatcacccgtgtcgaaacgcggatgacctcgccgagaaggctaatccctgtttgccaatcgaagaacacaaagaagaacgagacagaaaacaaccaaaattgcagatgaatgattaagctcacgagttgtggtcttacaaaccgatctagcggcgaaactgttctcgacagattaatctaagcaaaacccaaagacctaaagatggcggcggtacttatatatagagtttagggtcttgcaacccgctctcgacgcaacgctaatgagttccaacgcgatacacgggccaaaagtccaaatacggtgacgcaacaccgggacagaatctggacatcaacttgttcgggcgattcctattgactcggaaagaatttggatgtgggaccagaaccattggaaaggttatctttttagctttccatccatataaagaacgtgtagcgcccgttccgtcgtggcgcctagcgggaaaactatctcttaaaaaccctaattgcgaaatctggttccttgcttggtgtctatccccgatctatcgtcaaagttcaatcccgaatctaaatccttcccaaatcaaatccctccgcagaagtctattttgcctccctcaggttcgatgggccgaattcctcttggcccatcttcccccttcccatctccccctctctctctctctctctttctcccgctctgcccatgagccgcgccgagccctccctttccggtctcgctgccggtcccaccgatgccacccaaattgccgcggccgccgcgcgcgcgcgcgccgtggtggccgaccgggcactcgccggtgccgtccgagcctgccgcgcctgccgagcctgcccgtgccttgcacccgtgtcgtcgcttcactccaaaccgcccccgacgttatcgccggtgttatagacccgggcttcgtcaattcgcgcgctagccttcaagggacggagggagagctcctccttcctctggcgcgttcgccccgttcccttctttcttttccaaagtgggaatgggcaaagccccccttttcttcctttccttttcccttttttctctttcctccgccggcgtcattcccctcctccttgtcgccgatttggccgctagccggagcgcccgatcactggcttgaccgtccaatgtcggttcccctctcccaaaccgactttgtcgcccatataaacccaagctcccccactttcctttcctctcccattcgccctcgctccaccgcgccattgccgtcccctctgtcccgcccccgccgtcaccgccgccgtcaggtgtgccgaaggagccggtgcgcgttaggacgcggaaggggactccgggcgcgccctcttcttcctcttccccggcctgagggtggagagatcactcccgtgccgtcagcctctcgtcacagcgccccgcctcgtctcggtagtgcctccctccgttctccctcctcgttccatctcctccccttagactcgggtagtagcacgagtagcctcgccgtagctaactagcgccgccccgaccgttgcagccgctcgctgtgtgctcgccgccatcgccgcccgtgcttcgtagcgcccgcttgtcgccggcctcgctcggcgtagctccgcctaatccgacgctagcaacggattcccggagttgcgtagatgctctagctcgcccgaatcggtctcccgtcgcgccattgccgtttcacccttctcccgccgccggttgccgctaccgcaatccgccgccgtcgagcatcccccggtgaatccgagctgttggctcgtctcccctcgtcccgagcaacttcccggtgtgctcgctttcgcctgtatcgccgtggttcgctccgccgcccgccaccgtcgtccgccgtccgttgcggcagacgtcgtcgtctacctcccgccggcccgcgtggcagccacgtaagtgccacgtcggcgccacctcggccgcgaccgtgtcaagctgacaacggttcgcagctttccccccgccccactcgcgcgcgcggtctaccgcgagccgtgaggctgcgcgtgggcccaccgcaccgcgtcctccgcgaaccgcgcgcatgcgccgcgcgtccctcctgaaaccctagcacacctcgcatgcacctcactcacggtgagtcgagtcgccgacaagcgagtcccacccaggaccacgcgggatggacccggcccaccggctctctctctctcctccccgcccgcgcgcatgttctgggccaccttctcgggccggccggctcgttaagttcggccgagccgcccctttctctcgggccgcgccctagccgcccgaggaaagtctaatttccctccctccttcttttcttttcttttctttttcaaaaaggatttaaataaatccttttcctttagaccaaaaatccaataatcttagaaattgaatatcttcccaaccgtaagtccgtttgactccgttcaacttccaaaattcctcaaatctcgagatctatctaatggcacgcttagaggtcaataatagggctttatttttgccgtttgctgagttatcccgtttcgcgtgtagtttcggagcccgaagacccgcagtgcgaggatttcgaggattaagctcaagatctcgagcaaggcaagccacctttgaacatcttgagcctatatttgaacttaattatgttgcttgaaaaatattatgcattaataggattgcacttaatctgcttgtcccgtctgcaaggcagattggcggacctacctaacttgttgcatttgacccttccatcgaaattcttataccatgttcccttgtaaccacctagttacgcctcggtaatcgtgcactctgcacgagtaacgacggtcgccttcaaacttaaaatctgagaaacatcttgggtaaaacatgggttttataaaagacttggaaaacctgacaccagggtcggtgcttgcgaacctaaatgaatttccaaaatcgcggaccggggaacgtaccgggtgtacggtttcccgctcttgcacttaaggaccgtttccttggaatttcatctgaacataagacaagtacgaccacatgggtggaatgggacacccctggctgagtaactagctaatcgggggagccatgatgccaagagacatgtggattcaacggggtggtgtcggggaggacccccgggtttcctggcatagtatggtctgggacctaatctagtgttggtctgggacccctctcgttggcatatggtgaacctgtgtcggctttccaaatgccttgtcatgaaagccttaaggtctctagtcgtggccgttctgcacgggctggatgatctgggttagtaatgtcgtgtgggtaaagtgtaccccctctgcagaggttattaaactgttcgaacagccgtgcccacggtcatgggcggatgtgaggtgattcctagcgtagttttgtttgactactgctttgtgaaatttgctgatgtggtttgggattgatgtttggaaaatctgcggctgatgggatcatccaggcccaggtggccgtttaaaagccgttggccgggtgccaaccttgatcaattcaaaagactgataccttgcacatacttcgaccagacgagacgcactgtctcatctgtatcgtttgagaagcactcacttagttgtttcagaaaagagtttaaataaaatcaattgcaaaaacaacagcctttccttgaagcctgcattaaacacttatttcccatggcttgctgagtactcccgtactcacccttgctgtatataaataatcccccccagttgttgaagaagatgaagcggatcccgctgacgaggagttcttccaggagcaagccggctacgatgagttttagggttttcggcctagttcccaagtcgcgcctgtgatgtttggtccaagtcttggcttccgctttccttttgtaatgcagttgtgagctcgggatctgtccgcagcccaacatgactgggctcctactctataataaagagacctctgttgctgtgatattctgtcttcctgtgatactagcactgtttcctgggactggtatcgattaacaggttaatttggagcgtcacgggctagttctgctcgggactagtccggggcgtggcaagagatggtatcagagcacaggcttggccctagggcgaaacccgacgtttaggacgaccctaaggatgctaagttcaaaactacttgcgaaaagctaaggctccttttggtttctttattttcaatagtttgttgctaaaatggttattgatcttttctccctctttcaaaattgtagatggcagtgaacgccagcttcagttcccacggttttggcgagggtcaccacgtcgctcagcttcgtgacctcgcccgcttccttggcttctcgtgtcccgagtacacggggtactccgtggaccgtgttccccctcgctgtgagctctgtgtacctttaccctcgtggaggtatacacggagctggcctttgcccacaccacttcactgtggccaggcccactctccagatcgcgtaccaggacctctcctggactgcgcttcgacgcttggcccatgactacagccaccgtctcgggggctctgccttctggcagctcccacgccttccttctggccacgcagacgccaggtacccttgtccgtacagcgagtctcagccagtgctgactcgcatggtggagctttcggaggcttaggccactcagcacgacctactcctcgaggcttaccgctcctttgcccgccgatacgccgctctggaggcccgtctggccgaggagggtgtcacctcagttgacactgtctcttgggactcagcccgcctatgccacgccagccacctgtcctcccacagctctcgcggctcttcctgcactcccagtggcccgcgctcccccagctcgcgtgcgccgtactcaccagtgtactccccctacccacacccagttagcccctcctacacccccggacacaccccagttgcttcctcccgccgtggcccacgctttatccgcactgtgcggaagcatgttgttggttcttccaccgtgttccgcttcgactacccagctcccccaccgccagcggcccgtactgctgccggccctcgacaggttccgccggtcccttcgcgctagccgatcgacgtttcttcgactgaggagccgactacaagaggcagccaggcagacgaggagtagaggaggcagtcttcagcagctgtccgtgtgttaggcccttttgttccgccgccaactcttttggagtcatggcgagatagtgcgtgcgtgtgtttgatgtgggtgttgtttggtagtctggttctcgtaggtggtgtgcgtacagtcaagctcggcgtagctctgtgacttgtccacacccgttgtatcaggtgtttttatgatttgaaaaatccagtttatgcctagtgcgtgctatctgagttgttatttactttgctccttgccctcctaagtgcttatctgattcttacctcgccctcttcggtttagatggctagccgcccccgccgtgctgctcatgcatcagcctgcttcggttttgaggaaggtagagttgagccagaagcaaatcatgagtcagctaatgagcaatctcaccacagcaaccgttcgcaccgtactgcttcccgcaatgcagaagttgagcaaccccgccgcagcaaccgctcgcatcacacagcttcccgtatagcagagatggaacagtctcaccaatctcaccgcgctgctagtcacaattctggagaagaacgcatcccttccccacctcatgtggaaaacaacatgcaacacctgatggcagttcagacacagatcttgcaaggattagccgcggctatagccggctttcagcataatgcgcatggaaatggccaccctcacatgagcaacaatagatccaaactgaccgacttcctgaggtctcggccgccagagttctctcagaccgtcgagcccgttgaggctgacgattggctgaaggatgttgatagaaaactcaacttagtgcagtgtactcctgttgagaagacgctctacgcctctcaccagctaagaggacctgctgcagattggtgggagaattactgcaatgcacaccctgaactcactaacattgcttgggatgagtttgctatggctttccgtgcagctcatgtgcccgaaagcaccattgatatgaagaaagaggaatttaacaggcttaagcaaggcaacaacagtatcaatgagtacctaagtcagttcaacaagttggctcggtatgcccctaaggaagtggacacagacaataagaagatcaggaagttcttgaagggaatcgcagttggaatgagactccagttgcttgctcatgacttccccacttttcaacatatgatcaacaaggcacttctacttgaggatgccagaaaagagtctgccgaagaatataagaaacgcaagtctaaccatcaggggaattcttcccgaggcgcacctcgccctcgctatggtcaacccatgcaataccactagtcggtcactcaagctaaccgccagccaggctacgcccctcgtcctcagatgaaccgctcggcacctcagccacagcagcatgccccaagtggcaatactgcgcccaacagggttacctctttcaagtcaccgctaggactgtcagcagttcagtgtttccggtgtaaccagatgggtcactatgctagatagtgccatcagaatcctaccaacaccaactcagggcatgctaatggcagcactgccagaactcctactccagcagcagctctgtctcgtcctaactctcaggcaagaggacaaggttctcgtgcctccaacaactttggtcgaggccggatgaaccacattcaagctgagaccgctcaggatgttccagacgttgtgatgggtatgttctctgtcaactccgtacccgcaatagttctgtttgattcaggagcttcccattctttcatatcacaagcttttgtgaaaagaaatggttggaaaacccaaaatttacatgtaccaatgatagtacattcccctggaaggaatataagggcaactcaaatatgcccggaagttaaccttagaattgaggaagttgacttcctagccaaaccgatagtcctggactcgcaaagcttggacatcatcctagggatggattggttggctaagcacaaaggacagatagattgtgccgaaaggtccatcaccttgcaaggacctggaggaaagcaagtccgctttacctctaacacccctaccacaagtcggtctatcctaacctgtttacaagtcacctccttggagtcggtgcccatagtctgtgaatatcctgacgtatttccagaagaattaacgagtatgccaccagaccaagagattgagttcgccatagaactggcaccaagcaccgcaccaattgcaaaaagaccctaccgaatggcagctaatgagttagcagaagtcaaaagacaaatcgaagaattggagagtaaaggttatgtgcgacccagctcatccccttggggagccccattgctcctggttaagaaaaaggatggctctgagagaatggtaatcgactatagagccctgaatgaagtaactataaagaacaagtacccgttgccacggattgatgatttgttcgatcaacttaaaggagcaagagttttctctaaagttgacttgagatcaggttaccaccaattgaaaatcagatctgaagatatcccgaagactgctttctcaacgcgttatggtctatatgagttcacagtgatgtccttcggactcaccaatgctctagcattcttcatgaacttaatgaataagatcttcatggaatacctggaccagtttgtcgtggtattcatcgatgacatcctgatatactccaagaatgaggaagaacatgctgaacacctgaggctgataatgggaaagctcagggatcatcaactattcgctaagttctcgaaatgcgaattctggttggaccgagtagcatttcttggacacgtgatctcctccaacggtgtcaaagtagatcccagcaaggttgaagctgtacttgcttggaacccgcccaagaatgtgtcagagatccgcagcttccttggcttagctggatattatcaaagattcattgaaggattctctaagctagccagacctatgaccgagctgttaaagaaggaaaagaaatttgaatggtcagcagcctgtgaagacggctttcaagaaatgaagaaaaggttgaccactgccccagttctcaccttgccagatatccgaaaagatttcgagatcttctgtgatgcatcaagacaaggcttaggatgtgtcctaatgcaagaacgaaaggttgtggcctatgcatccaggcagctcaggcctcatgaagtcaactatcccacccatgatctcgagttggcagccgtggttcatgctcttaagatcaggaggcactatttaatcgggaacagatgtgaagtatacacgatcacaaaagtcttaagtacatcttcactcagaccgagttaaatatgagacagagaagatggctggaactaatcaaggattacgatcttagaattcattaccatcccggtaaagctaatgtggtcgctgatgcgctaagtcacaagacctattgcgatgtagctcaaatatggccagaccaagatcgcctgtgcagagaattggagaagttaaggctgaccgtggtacagtcaggtgtccctaccagcttgacagtgcagcctaccctagaatcgcaaatccgggaagctcagaaagatgatgaagggataaaagaattaataaaaagaatacaggagaagaaggacaccgatttctccatagacgatcaaggcacaatttggtgcggtccacgcatctgtgtaccggccaagaaggagttaagagatctcattctaaaggaagctcatgagtccgcctactccattcatccaggaagtatgaagatgtaccaggatatcaaggcatacttctggtgggctggaatgaagcgagatatcgcagaatacgtagccctgtgtgacatttgccaaagagtcaaggcagagcatcagaggccagctggtctgctgcaacccctatcgattcccgagtgcaaatgggaagagatagaatggatttcatcaccggtttgccaagaacccctagtgggtacgactccatctggataatcgtggattgactcatgaaatcagctcatttcgtgccagtgaaaaccacctttgatggaaagaaactagcagaactctacatgacccatgtcgtatgtagatttggctgtcccaagaagattgtgttagatcgaggcactcagttcacctcaaggttctggaaacagttgcatgaagctcttggaaccgatctaaattttagtacagcttaccatccgcagaccgatggtcagacagaaagagtaaaccaaatcctagaagacatgctacgtgcgtgtgccatggattttgaaggcacttgggatcattgtttgccgtatgctgagttctcatacaacaacagttatcaggccagcattcagatgtcgccaaatgaggcaatgttcggaagaaagtgccgcactcccttgtgttggaatgaggtgggcgaagcactggtattcggtcctgacatactcaaggcagcagaagagcaagttaagctgatccgagaacgtttaaagacagctcagaaccgtcagaagaattacgctgacaatcggagacgtgaccttgagttcgaaaaaggagaccatgtgtacctgcgggtatcacctctccgtggtatgaggaggtttgggatgtccggcaagttagcaccccgctacatcggcccctacctcataaccgccaggcgtggcgaagtggcttattagcttgagttacctgaaggtctcgcagatgtgcacaacgtgttccatgtatcccagttaaagaaatgtcttcgagttccagaagaacaagttcccctgggtaatatcgagctggaaaggaatctgacctacaaggaaagaccgatcaaggttcttgaagaggcaggacgtcagactcgaaggaagaccatcaagttctataaggtccaatggagcaatcattccgaagatgaggcaacctgggaacgagaagatcttctccgcgccgagttcccggagctgctcccttagggctgaatctcggggtcgagattcttgttagggggttagtctgtagcgcccgttccgtcgtggcgcctagcgggaaaactatctcttaaaaaccctaattgcgaaatctgtttccttgcttgttgtctagtgaccgtgccatctcggatctcaaatccccgatctatcgtcaaagttcaatcccgaatccaaatccttcccaaatcaaatccctccgcaaagtctattttgcctccctcaggttcgatgggccgaattcctctcggcccatctccccctccctccccatctccccctctctctgtctctctgtctctctctctctcccgctctgcccgtgagccgcgccgagccctccctctccgctctcgctgccgttcccgccgataccgccaaatcgccgcgccgcccgcgcgcgcgcgccgtggtggccgaccggccagtcgccgccgccgtcagtgcctgccacgcctgcccgcgcctgccgcccgtgtcgtcgctccgctccaaaccgcccccgccgtcatcgccgtcatcattgactcggccctcgccactccgcgcgctagcctccaagggatggaggcagagctcctcctccctttgccgcgtcgccaccgttccctccttcttttcccaaagtggcaaggggcaagccccctttcttccttccttttccctttttctcttccttcgccggcgtcattcccctcctccctgtggacgatttggccactagccggagcgcccgatcactggcttgaccgtccaatgtcggttcccctctcccaaaccgactttgtcgcccatataaacccaagctcccccctttcctttcctctaccattcgccctcgctccaccgcgccattgccgtcccctctgtcccgcccccgccgtcaccgccgccgtcacgtgtgccgaagcagccggtgtgcgttaggacgcggaaggggacttcgggcgcgccctcttcttcctctacctcggcccgaggccggagtgatcactcccgtgccgtcagcctctcgtcacagcgccccacctcgtctcagtagtgcctccctccgttctccatcctcgttccatctcctccccttagactcgggtagtagcacgagtagcctcctcgtagctagctagcgccgccccgaccattgcagccgctcgctgtgtgctcgccaccgtcgccgcccgtgctccgtagcgcccgctcgtcgctggcctcgctcggcgtagctccgcccaatccgacgctagcaacggattcccggagtcgcgtagatgctctagctcgcccgaatcggtctcccgtcacaccttcgccgtttcccccttctcccaccgccggttgcccccgccgcaatccgccgccgtcgagcatcctccggcgaatccgagccgttggctcgtctcccctcgtcccgagcaacttcccggtgtgctcgctttcgactgtatcgccgtggttcgctacgccgcctgccaccgtcgtccgacgtccgttccggccgacgtcgtcatctacctcccgccgggcccgcgtggcagccacgtaagcgccacgtcggcgccacctcggccgcgtccgagtcaagctgaccccggtccggcgttttccttccggcccactcgcgcgcgcggtccaccacaagccgtgaggctgcgcgtgggcccgccgcaccgcgtcctccgtgaaccgcgcgcatgcaccgcgcctccctccccaaaccctagcacaccctgcgtgcacctcgctcacggtgagccaagtcgccgacaagcgagtccccccgggaccacgcgggatggacccggcccaccggctctctctctctcctccccgcccgcgcgcatgttttgggccgccttctcgggccggccggcccgttaagttcggccgagccgcccctttctctcgggccgcgccctagccgcctaaggaaagtctaatttccctccctccttcttttcttttcttttctttttcaaaaaggatttaaataaatccttttcctttagaccaaaaatccaataatcttagaaattcaatatcttcccaaccgtaagtccgtttgactctgttcaacttccaaaattcctcaaatctcgagatctatataatggcacgcttagaggtcaataatagggctttatttttgccggttg

SEQ ID NO: 6058 - DNA, 9060 bp, Oryza sativa
aaaaccatattttttctcgtgtgtttttttcttgttttctcgcacgtttttttgcttgtttttttcgaaggttcttttttgctttttttctaatacacgagaatatatgacgaaataaagccatgtagtagatggcaaaaaatcgatggatcccattcgactcgagcgtccatcaatttagtttttttctgacagttttttcagagcgatttgtttttaatagacggtgtttttttcttgcacggttttttaaaactatttttttagaaatggcgtgttttttcaacagttttttcctcgcatgtttttttaaaatattttaccgatgatggaaataatttttctcgcgcgtctttttttattattattgacaatggaaaacctttttagcgtgtttttttgcgcatttttttctgacttttgcctcacacgttattttaaccgtttttattttctcatgcattttctctttttaaatagttagattagagatagagaagagatatatactggttagaaatcagattttggttcgccctttccattttttctctcttgcattctttattttatacgaaccagctttttattttttacgaactatttttcgccactttcttagggaatcgaacaaactttttaagatgtttttttagatttttttcgcctttataggaattagacttttttttctgtttttaaaggaatcggatctagctttttttgtcaccactttttttttttgccttttatatgaatcagattttttttcccgtcggatctacagtttttttggccactcaggggaaaaaacttttgttgttgttgtttttctttattttctttttttacggtttttctttttatgcacctttctgtctttgttctctttctcttttatttttttttaacaaaaacgacctcaagtaccttgttgcaagattatagggactcaaatataaatataaaaattacagggactcaaatataaaagtacaaaccaaaaaattaaaatcatataaaaatggaatgttgtcgacctgtagattccgtttttgcaaacagatctttaatccggcacatcaatttttttcaaagtcaaattttttttccgtttctaagaccgaatctgatataggagtcaggacctttttttttgctatttcggatataggagtcggacattttaattttttttcattatttttttatggacgaaggaagcacctcttattttttaagtagtagagatgtgatcttgggagttgaattttattgaatcttgtacatgaactttgtttaaaacataattagcaagtgccaacctagtttgctatataatttaatttagaattttggaattaataaatatcgagttatacttaatgttagagtcacaaatataccttttcatgatttacttaaatagcaagagctactgctattgacttttcaaaatgtgagtttataatttgttgctacctggataaatttgaaatttgaaattcgtaaatagaaatttttaatggttgaaagagtgcaatctatttgaataatgatacaaataatatacccactgatctttttaatggttgtggacgttactattatgacacgtcctagtgaaccgacatcaattaattttaccttttcactctaaccttctcatctttgcaattgttgagagtcaaaataattgcagctaatacatgcataaattaattgagtttaaatagatacactcggaactccttttatctgacgacttgtttttgtttcttcaacgtctgttacataagatgctaaagccaatgatatccgcggaagggagaaggtggtgtcaatatgaattatttaacacgtggtcctctttcaataagaattttgtgggggaaaggatttcagcatagttatctcatggaaaattgaaatttccttgttctcagaaatttaggaatttttgggaatgatatctttttgaaagttgaacaaagattgatttaactcataaaaaaatttaacttggaagtttaaattttgaaacgcatcttgatttagtgcttgctatattagggtggttggtgactctactatcactgcaaagccttggaggtgactagagatcggtcggccgatcgaaatcttcaaaactcgagcgctgacgtcacgctgatatcagcgcccgacttacgtgcaaaactactttaaaatgattttttcttaaattacttatccaaatcatgatccgattgcaccattaaattcgttgtaattaaatcttcaaaataagaccatacatagatatattctgatgaaatttttttagcttattattgaattttttttaaatgttgcacgatgttccatcagatatatcggaattgtttcactaagtagatcgaaaatgtttcactcgtttaaatcgggtattatttcaccttatataaaaacaatgtttcagcaaatagcgaaagaatatttcagttcactacgacatttgatctatacacactaaaacattataagaatagtaggtgaaacattttttcggtggaacaaaaaataaaacaaattcccttaataggggtttctaaaatatgtgggttttttttgttgcaatggagtatttcagttcactgcaacattagatctatacatagtgaaacatagtgagtacactaggtaaaacattttttgtagaaaaaaataaaataaattctcttaacagggggttttcaaaaaatatgagttttttttttcaatgacgggtggtagcatagaacgctggtggggccagagcatgcatgcacgggggaggggcgtggggggagcgcacgatccggctcccccgcgtcgggcgaccggatcacatcattatcgcaaagctttaggcgctgcgatcgtggttgtcaacttgtcataaaaagttaccaacagcttgtaatggttgcttattagcagaaattaacaaaggattaaaactttgcaacacaacataaatagtaagcgacatagtacgcgtactatttgtttgaagatactaaatgatagaacaaaattgtgtggcatatagattagtccggcaatatatagattacattatgttccaattgatgctatgggcagtcaactttcttgcgatggtgcagatcattgcaatgccggcggcggcggctgcaccaagtggatagtcagcggcgtgctcgcgtcttctaaactgcttgtagatggtgacacaaccgatcaatctggcgatcaagtcagtcaagtaactgctcgatagatggtgatggatttcttgatgttcgtgcaggatctggagaacggcggccaaatcgtggtgttggcgtacttcatctcaaggtatcgatggcttcttcgtgtacacaggcgggttttccctcgtcgtcagggagctcggcagttgtgatctcgcgtgacgtgtgctgagtcctgaccagatacatgatatccacgtaggccaactggtgcaccacaactgtatggattagatgaaggcctgtacaaagattggtaggctttaaaacgcaagattagatgggcacattaaaattaaaagccacatgttgtcatgatattatgttgtatcaaatcaatgatcagatatttctggatatccacataggccaaccaccgagatatccgtactttcatatgtggtaactgcatggattagatgaagaatcgaagacccgtacaaagattggtgggctttaaaatacaagattagatgggcattagaattaaaagccacatgttgtattaatatgttgtcatgatattatgttgcatcaaatcaacgatcagaaatttttggttaacgggagagctcataaaaaatgcctgattagtatgtgtataaatgtatagatatatagatagatgtatagatatatatagatgtatagatgtatagacagataatgataatgtaaacaagtattatttggttcatacgacattatctttactactttaaaaagtacatttttttcaccaccgcagttgttctccttttcccttccaaccgtatgaggtccacagatccagtaatttatttttagtcctcccacccaattgaagataatttgaacttaaattggagatattttggtctgtatacgttgcttgatcagtaaggtttggtaatccgagctgacccaaatcaggagctgcaaatttaaattccccggttcatcgccggccgccgggacaagatgtgatcaagcaataattatgatccgcacggagaaggataataagttaatcacacaatcagggggatcatgcatcatggcaacaacagctaacccgctaatatataggtgcgaaatgtttgcttgataattagtggcaccccaccgtgtaaattaactttctctctgtttttcttcctttccatggcaggaagtcatatgactagcggttaacatcgagaacctaccttttgggtagccactcattgcctgttccacctccaccgtgcatccgtgatttcatacgtttgaaaagatcaaaagggatgcacctcacctcctccaaaagatcaggcagcaggaaaaagcaacgctcgagtagtctcaccggcaatggcatcgccttacgcatcatgccattcgttatgcccgactgcccataatttcatacatcgggaaaatggcaatgctggcctttcttttgtatgcgcgcgtgtaattttgaaacagacagcaacatgttagagtaggggtcaaatatagcagtcctattaagagctggacttataattgaaataggtataggataaagttagagtcggacactatcttatactctctcttaaatatagagtgggacaacacgatataatcattatgactacaatatagcgtatacaagtagggatacgatggcgactaggccatgtactcatagcggctagatgctatgttgattggggaggagcgcctataatcaaaagcccgaagatatattcttgtgctaaacttcattaacaaatgtcatgtgttcgtatgttgtcatctaacatatcttggtaatcaattactaaagtgatcgagaagactacttgtcgttccgttatatcaaacaacttttataacaagtgatatatactaaagctatacgtgtcatgcaattgtgtatgtttagggaacacacttactatttattataggcacacataatgtactccttgtcttggtaggaccaaaaggtgtcgtagatgtagttgaccaatccttaatggttattctcgagatttgtgacagtgaccacttgtggatcaaagaaggcaagttccggtgcattctcctgacaccactgccaacttaacctatacgcaagaaaaacgatcttataagcgggttaaatggattgttattactaaattgagttgagcgacaatacttacaaggagtagcacttaagtaggtttgtgtccaccgctcggagcctgtcgaggtcgaatagatccttaaagttgaccacgatataatttgttggaccaaggaatggctttcgatcgtggtctccaaggatattgctagctatattctgtctcctggcgttagatttctccatttagtatacgtgaaggtccttgcaagaggtgcccattgtggctagcacgtcgtctccaatcaatggcatacctagttggaactcttgtggagcgacgtacttcttctggacctccttccccttagtctcttcatgccccttgcccagatctagcttcttcggagccaaaaatgaggcctgcacctttcctcctcttcctctcccccttgaagtaggtttatcgagagtaattctctgaggagaagagtgcgcctttctgctcttcttcatcgattggggttgaggaatcgccatgctgtcggcctccatatggtcgtccccaaaatccatgtcatactgcaactccacatcataagatcttcttcatcgtcgtcttgattacgtcgccaccgattggtatcttcgccttcaccgctagcttattatgtcaccgctaatgggcatcttcatcttctgcctcatttgtcaccgactgattatttcgccaccatggctacacaactgtgtcgctatcgctgggcgccttcatcttcactaatgacagaccatattactgctgactggtttcttcgcctccacggctgtgcgacttcatcacctttgattggtgccactgtctttaccaccaccaatatctttgtcacctttgatgggcgatgtcatccccttgttagtcatctcgtttccatgccgactacataagctaccatcaatggacaactaaaactacaacagaagtacatgttacatgcttagggggctcatgaactcaagcgcgatgatcataccttcaatttggacttgttccagatgcatgcaacataaattcatgatcatgagtcaatttcttatgctcaacgagtgaactattcgttatttcccacgagggctatcatctgagtatttgtaagagtcaggatttaatttttacatctactgaggtacactctatgaggataaccactcggatcagaagccactaaaatgagatgcactcgatctacatcacccaggaattttatcacctgggagcatattaataggtgttctaggggtatcggtaggcatattttggccctaggcctaatatgtctgcagcccatattttcaagtgtggccaatcacgttcttttagggactaaggcattttttgcttaggcaaaagtgtgcatgatcaagtgcctaataccttaaaatccctttatatcgctgtcacttaactttttaggaggtggtaaaatgcattttaaaaggtgtcaaatagtgaagctttatatagttaccccactgacttgtttttatttatttaaggcgttgtttgggtttacaaagtaatcgattggatacaatatcgttgctttttgccacataagtgtgcatttttattgacaaatattatgggcttagactgattatatattttggtcattttccaggcggttggtaaatcctttatgagtttatttagtcggattttacaccacatatgccatatatttccaggtgtgatgaaaccatgtgtcttttagggactcaagcacatttgttaaagcagtgtgcgcatagtgtatgcccaatactttgaaaatttctttattcacagcatacaagcttcttgattgttgttttgctctgtgaattttccatgatgtatacaactttaggttgctcacatcatattttgcaaagcagtcggtatatcactcggatcatgttgatcggggattcacaccgcatatactatatattaatattaagtcacttggttggctacaattatcgaaatcactcggttgtttggtgttgacggtccttaaatcataatatctgaccatcaatacctgcatataacgaaataaaacatggtatccaacgtagtggtaggtattattactaatcatttccactagtgttggtgaaatatgtgtatgcgagtattttgagaagaaaacacatccgtcaagcgacaaactgcacctccgcgcattcaggacacatttacacggattggaggccccataagtcaattaaacaactccaaatgggcccaactatcatgccaatgggctgagggcctcaaaattagtgtccacaacgaaaaatgggccgaatggagccgtcccgggttcggccgaacctccagtttggccgaacgattttggtagccgttgatcgccaaatttcacgtggacggtcctgatcacatcctaatggcggttctggggtagtttggtcatttcgcataggttgtaaccgtcatacctgcctataaaagaagcagctcactctcatttccaacacacaactttgacctgaattacaagaggctttattgtatcttttgtacattagaataaggtagagagtaaggggaagttctggaggagtgcccggaagtttggcgctcatccgacttctacctcaaggagtgtagcttcctaggaggaattctggaggagtaccggagccgtcggtacactctgcttcgggttcggagaacttcttctataaagtaagcattcgtgtttctttcttatgttatttaattactttgtctaagtaagatagatatccatctttgcgggttcattgtttagtatttatactaagtgctctagtactaggactccagatagagaaggaagctcttgcgcaagtattagagtagtaattaataacttagacgtggtgtctagtttagagattacctttgttagttgtgtatcccacggatttgttagaggtagttggcaggtggtgatagccctgaatcccgtcctagtaatcctccacgttcggatacatcatagagctatagccggaaccacgctggcagacaagcaggggtcggtgcctgaagcaacagatagggaattacctttacttagcttaaataattaaaaatacatagagagtcctctctagcctgcctaccatcagttgctgtccttggatagtctcagccttaggtagattacacacattccctgagttcgatatctttttggggtcacctgaaggtgaagtgctacaacggtattccgtgcgcttgcggatttatctgtggtcgtaagaaataccaacaagcatttttggcgctgttgccggggaacggttgctaatttatccgagtctaggtcatcctcatatctttatttttacttcttcttgttttattcctttccttgatggagcaacccacaattcaaaacatttctgctcctcgggctaatctttgtgagtcatcctattcttcaaaaccaatcctttcaaatggctatgaaatcggtcctggctttatagccatggtttgagagcaaaccttctctggtggtattagtgaaaacccatacctccatcttcaggactttgagctagtgtgttcttgcctatccatcataggcatgacacatgaaactcttaagtggaaattgtttcctttttctcttagagatg

SEQ ID NO: 6059 - DNA, 5210 bp, Oryza sativa
aaacaatttgatgagtatgatttttctaatgctcaaatgattaaggctgctagtaataagtgtaccggttctgcatcttttttgtggcatactgtgggaaataagcttgacacttgggatgaatacaaaatactgatgagaaaaagatttgtattttcatactatagacgtgctctctttgaaaaatttgaacatctaaaacaaggtgacaaaactgttagggagtactttcatgattttaaaatttgtatcacttatagtggtttacaagaatctaatgagaacacaatgactagatttttcagagggcttaattccaatattcaggctgggcttgttaatgtgacatataatcatataggccaattgttcatgcttgcttgcaatgttgagcgcaaaattttggaaaacccaatggagcaacaagctatgcttgtgcctcctatcactgatattttgcaggaagttcagaacagtccccaaaatgagaagaacgatatgtttgagatgtcacttccatcactcgcgaatgaggagaaggctgatgcacctacattatctgaagagggcataaaaggtaaattaaatggtgcagaaattactcaaggtgagtatgcttctgatgaattacatttttctacttttcatactagagaagagcaaccattagtggaaccaattgctgagatgcctttgtcacaagttgatttacttgctgttccttgtgatagagtagaggtgtgtgataatgcttcacttatatccatgccacaactagtgaatgaacatgctatttctagtatttctttgtgtgctgattttaagcatgttgttcacattgctaatgaagtaaaggaacgtgaattgctatcttctttaaatactttgggctatgttcagtttgatgatttttgtgagctcgataatttggaggagaaattatttgctaagactgatttgccatgtccaactaatgctatttttcatatcattggcgaatatgatgatagaggaatatgtttggtgcatagagtttatatatgttccgatttagaacctcctgtacatgtggataaaactggcaagctagagagggatgtaatttctaatcatattacttccagtttgtcttgttttgattggatgaaataggttgttttaaatcgaccacgcgatgagcaccatatggaaaaaccgaggacggttttccgtgaagaaagggaggatgatgtgaccatggctactacggatacaaccattgttcacatcatggatgaacaagaagatatcaaggtcaagtcctccaagtgctggaatccgattcggccacctactacactgctgacttcaaacggccgccaaatctccattcgagctccgttttcggcccatgagtacttgatggaaagctctcggagtcctctttccaacggatccagcctcattgtgatattccatctcagttatctgcaattgaagaaacaatgggctgcattgtctgtaatgggcctgtgggcttgtaacttcgtctgggaccccggcccaaggggggctgcgccgcaaacagagggacgacacccttctgacctcctccatcccttaaatagctagtaacccctccagggttagtcgggttttgatagattaaagtttagccattgctacttgcttgcagcgcgcgtgttggctagatcgcccgtctgcttgttcttcggaaccccaacttatcatttgtattaaattcctatttgcaatatcagattgcttttatcttattcttgcttgtttcttcgatttgcttgcaggaatagggttgatctgcaccggcaagatcaacaacccacggagaggtgtattgatcgctaaggcgcaacacaacgtctcgtatggttgtagtcggatcgtcaacgtttctcccaaatcgtagttatcacaactcactgaaagattgggccaacaacagccttgagtgtcaagaggaactcagggttcatcacaatgatattgtaggattgaaacacaagaactaagccaacctgagggggggggtgaatggtcggtatacccaaaaaccgaaaacttttagcggaaataaaagttaccctcaaattcgacggagatcggtctgaccgagattgatctgccagtctgaccgtttgaatgctgtcattctaaccagtatagatagatcggaccgaccgccgaaattgcctgccgcgcctgttgccgccgccggtctgaccgcctcgcccccgccggtctgaccgctggtgtgtcaccggtctgaccgccggtgtgtcgccggtctgaccgccgaaacccggtgaaacacaaatcggagaactcttaaaatagatgacaactttattgcttctctctgtgtttacaaagtgcaccaatagcactccttacaaaaatttcgactaaactcgaaaccctaacttaactctcagctcaattgctctcaaaagcgataccgggaagcctcacgctcccccactatttatacccgaggtaggcagcctaaagccacgaaccaaattcacactagaagtcctaaacaccttaggaaaccctctagtacaagaaacaaactttacataaccactcataccaaatttagacactttccaaattcgcctccgcatcccatacgcacacaatacctccatcgtatgccatatggaatcttcacaaaccacgtgtattgaactatagccttagtgtcccgcaagatctctgactaccacggacgtcgtcttatccctaagtcgactcctggtccatcaccgcaaatactctcccgaggcatcgagtcacctacacatgaaataaacaaagaaaccatatttcgagaacaagctatctccaacttgactcattagtagcaaacaacagtattacatacgtatagtatccttctagaagccataatcatgaaacaatcacggatatccaaacaaacaaaccaaaaccgaaaccgacacagagtcggccggtcagaccgcgggctgcgccggtctgaccgcgtgatacacgccggtttaaccgacaacacatgcccggtctaaccggaccagatccagcagtacctatagatttacctgtgaaatccaatcatctccaaaaccacttcgtgaataaattccaaatatcaaaaccaataatctccaatgccaattgttcatcacagaataacaatcaaaaacacctttgattttacaatctcccccttgaggaacacgttggcaaacccatcaaaaatgttttggtgtttggaaaaataaaaacaaaagtggtaaaaagcacacttcgtacaaatgtacacatcgtgcttgaaaatccaaaagaaaacttctctcacttttgaagagaaagaaattccaatcgaaccaaaaacaacatgttcttctcaacacttttgcttctccaaaaattttcaccttgcttctcccccttttgacaaagatttcatcaagcacaggaattatgttcattaatgtataagagtttagcatacatatagcatatcatgtcttgtgttgcgataaaaagaagatgaacctatctataatatagcaagcatgcaataaagtataaacatgaaccaaagattttacaattaagcttgaatcaacaatcaaaattcatgatttcaaatgatttataatgaaacatcttaacaagcacataggttgaagaataaacactaaacacatataacacatatacctattgcatttatcactctttctcaaataacctttagcacaaaacaaccaagaaaattttttaaccttttcttttcttgagcctttttgctcatatttttatcttttattccgggtacgtccctgtcgtcaagactgtttctatggattcggcacccattattttgctcacatcgaatacgtccttgtcgtcaagactgtttccaagcattcggtattcatttttttcatatttttattctcttttcacaatgagcaattaaagtgatttcaggaataacaattcaataaagcatatatatagagcatttagaaatcaaaccacatgctagcatcaacattgcatatttacttaattcaagtatggaatttaagtgtcatgcatcatctcccttaaaagcaaaatctaaatctcatgcaaagactagaatacatacaagctatgctagagacaaataaaccttcaaagtattgctagtatgcacaagaaaataccacatgtataaacaaagctctcttttctcaatttttctcattgacatatttttgctagataaaaccatgaggtacaaactccccctcaaaacatgccaaaaggatgaattattcccaatccaccacgaagaaaagcaaaacgattagaatccaaaggtttagtgaaaatatcagtaagttgcaactttgtgtccaaaaactgcaattcaacatctcccttctcaacatgatccctcaaaaagtgaaagcgaatatcaatatgctttgtgcgtgagtgttgaacaggattcttagcaatgttaatagcactagtattatcacaaaagagaggtactttcttaaaattaagaccataatctttcaaagtagataaaagccatagaatatgtgaacaacaactagcaacagcaacatattcagattcagcagttgattgaggaacactagattgtttcctagaagaccatgcaatcaataatataccaagaaaatgacatgttccactagtacttttcctatcaattctacaaccaccaaaatcagcatcggaatatccacttaagcatatagaagatgaagtagaataacaaattccaaactcaagtatatgattcaaatacctcattattcgcttgacggcttgacgatgtgaagcacgaggagaagcttgaaagcgtgcacacaaacacacagcaaattgtatgtctggcctagaagcagttagatacaacaaagatccaatcatacttctatactccttttgatcaacagcttcaccatcttcatcaggatccaacatagctgtagaaccaattggtgttgaaattggcttacaattctccatcttgaaccgtctcaaaagatcctttgtgtacttcgtttgatgcacaaatataacttgaggtgtttcttaatttgcaatcccaaaaagtacgataactcacccatcatgctcatctcaaattccctgcgcatagtctcagc

SEQ ID NO: 6060 - DNA, 17863 bp, Oryza sativa
cacaagacggaatgtatgcataccaaagaatgtcgtttgggttgtgcaatgcacccgcgtcatttcaaagacgcatgatgtctattttctctaacatgatcaaggatatcgtggaagtcttcatggatgttccacgaaattatcttcccttgttttggaactccgcggatggtgataagtgacggagggtctcatttcatcgataagaccttccgaaactttttacaagaacttggggctcagcataacattgccactccgtatcatccccagacaagtggacaagcagaaacaagcaacaaacaaatcaagaatattctacagaaaactgtcgatgagatggggaagtcatggaagaacaagctacctgatgcactttgggcatataggactgcttataagacgcccatcggcatgtcaccataccaacttgtctacaggaagacttgtcaccttccggtagagttagaacacatggcacactgggctatccagacttggaacatggatctaaaggaagccagacagcacaggaagatgcagctctttgagctagaggaatggagggacaaggcctaccacaatgccaagatttataaggacagaaccaaaaaatggcatgagaagcggattaagcccaaggagttcaaagcaggggacaaggtcttgcagttcaactcacgagtaaagcttttcggacatggaaaacttcgaagtaaatggatgggtccatgtaccgtcatcgacgcttcatcacatggagccgttacactgtgcaacaacgaaggtaacatctttaaggtaaatggccatcgtttaaaagttttccttgatccgttagaagttgatcgtgacttagatgttgtgaatctagtctcttttagcttctacccggagtctttaggtcccccttgatccgttagttttcaatgccatgagtccttaggcctccctctagttatcttaggtctagctttcatggataaaataaaataaaataaaataaagttggctccttggtcttccaaccaagtgagtccttttttgcgtcactctggtctttgtttttgttttttgtgtccaataaagcttcccagatacaaagacaagtgtggggtggtcttgcaagatcaccccagaagtgatgagccatgacaaactatacaaggaaaattgatgcagtcagacccaatgaggggtcagccaaacctccagttcggctgaaccacctctaccatgaatcgtcctctgttttatacagagcgcaggtttgcacaatttttcctttggacatccattctatcttgagcttaatttcattatcaattctaaaatatcgaacataattaaactcaagctagggatggtacaattagagttcatggtctacttgaaaataatatgcatgcctattattcttagctcattacttgttgctggtggtgatatatccaatagggaccccatgttatctaggtaattgatgaatgagatatagtctgatgatagaaatcctactcttcatgttgcacacttgggaattttataaaaagaaaaaaatatatataacgatgataaactcctcattgatatttctattcctactagagccataggttgatcagtcatgattagcttgctacatacgctgcttgtcattacattgagcattgtcaagttttgtgacccttgtgaaatgcgtttcatactttcatggtcaagatcacatgcattccacatacacgcacatatgcttgacttctacactggaagttagcatttctcatttaccgttcatttcatccatagttcacaaaataaatactccttgttatttatgcctcttcttccaaagttctttcaaaaaaaaaagagagatggcatggctatgcaaaaaagaaagaaaaaaaagtgctcatacaagtatggagcatgatgatgaaaaaaatagaaagaaagaaaaagaaaaaaagagatagccatgcactctccaaaatttcaaaagagaaaagaaatagaggaggaggtatacaaaaggagttatttttattttcctttttccactcacaaattcatcatacacatacacatgcacattcttgaccagaaagtatgtcttgcatttccgtggatcctttatttgactttgcaatatatgtgatacaagtaatgctctactcttttccataccctaagctctacataaaccttattagatggtaggaaaagaaaaggcacagtcatatgcctttgtaaggaatcatacactttgagtgatcaagagaatctattgaggagcaaagtaaagttataattttatgttacttgaaaaaacccaagttgttcttcatgaaaagttagggtgacttgagtcaagatgattccatttctcgattgtccaagattgcatggtcgacactacaaagatccacaagtacaaattgactccccgcaaaaaaaatgatccacaagtacaggtatgactttgaataatttgtttgcatgattattagtaaggaagtcataactttgttgtagagtccatagccttcactcgggacgagcaaatgttaagtgtggggatgttgttgacggtccttaaatcataatatctgactgtcaatacctacatataatgaaataaaacatggtatccaacgtagtggtaggtattattactaatcatttccactagtattggtgaaatatgtgtatgcgagtattttgagaagaaaacacatccgtcaagcgacaaactgcaccaccgtgcatttaggacacatttacacggattggaggccccataagtcaattaaataactccaaataggcacaactatcatgccaatgggctgagggcctcaaaattagtgtccatgatgaaaaacgggccgaacggagccgtcccgggttcggccgaacctccagttcggccgaaccattttggtggccgttgatcgccaaatttcacgtggacggtcctgatcacatcttaatggtggttctggggtagtttggtcatttcgcataggctgtaaccgtcatacctgcctataaaaggagcagctcactctcatttccaacacacaactttgagctgaattacaagaggctctattgtatcttttgtacattagaataaggtagagagtgaggggaagctctggaggagtgcccggaagcttggcgctcatccgacttctacctcaacgagtttagcttcctaggaggaattctagaggagtaccggagctgtcggtatactctgcttcgggttcggagaacttcttttataaagtaagcattcgtgtttctttcttctgttatttaattactttgtctaagtaagatagatttctatctttgcaggtttattgtttagtatttatactaagtgctctagtaccaggactccggataaagaaggaagttcctgtgcaagtattagagtagtaattaataacttagacgtggtgtctaggttagagattacctttgtttgttgtgtatcgcatggatttgtcagaggtaggtggcatgtggtgacagccttgaatcccttcctagtaatcctccacgttcggatacatcatagagctatagccggaaccacgctggcagaccagcaggggtcggtgctagaagcaatagataggaaattacctttacttagcaaaggtaattaaaaacacatagagagtcttctctagcctgcctaccatcagttgttgtccttggatagtctcagccttaggtagattacacacgttccctaagttcgatatccttttggggtcacccgaatgtgaagtgctacagcggtattccgtgcgcttgcagatttatctgtggtcgtaagaaatatctacatttggtttatttactccttgactatatgtttagtttgttcaactaaccacatagttaggggctacacctattaggtgcatttagtcgatgcacctaagtttacatttaattatttttcagccctctacactcttcagatctggtaaaagtactcgggagaccatagcgaagatgattgaaacacttagctttggagtaatctagttcgagagaagattatctttttgactgtgaaggtctcaggggctactgtgtatattgtgggtaactcctacccacacggcaaggttatctgactaattataagggatagcttagatctatggaatatgtaacggatcataacttgaatattacgtttccttgtatattacggaacggcctaaagtcctggtttgataatagatttaggaaacccttaccgtatttgttaaggtttttgtcgtgtaatcctatccccccaccccggtgctatataaggcaggcaggaggccctctacggcatgatttcacaaccagatcgtcagatcaatactacaccaggtggattcaaatccccaaacaggagtagggtattacctctcattgagagggccagaacctgtctaaatctgttgtctctgcattcatccagttttaggtctcatgcgctaccccctttatattgctgaaatcttgtttcgacactaaagatactgcaattctgagtccgtgaagtagtgcttcatactcagccacattatgggaagctaaaaaatgaatctacaaaacatagctaagtcgttctccagtcggggaaatcaatacaaccccagcacctgtgcctaatattctcttcgacccatcaaaatgcatagtctagtactccaattttcgaaggcgtgtcttactagcacttggtccactcggcaacaaaatctggcaaggcttgaggcttgattgaagtgggtggcttgaatgatatgtccaaagacatcaactccaaagcgcactttgcaatacgactagtcgcctcacgattgtgaagatatctccgagtggaaaagatgtgaacaccatgactaagtgactttgaaagtaaagggccaacttcctaatggtattagaacaccatataacaacttttgtacctgaggatatcttgtcttggaatcggccaaaacttcactaacgaagtagattggtcgttaaactttttgaacatggccctcttcctctcgctcaatgacaagcaccgaactcactacctaagatgttgccgacacgtattgaacgcgctgatgaagcctgaaggggggaggggtgaataggctgtccctgaaaacttaaaaacaaatcgcagcggtaaaattcaaatagacccggaacttcctggtaaggaactccagaacttccggcctaccaggcccggaacttccggtgttcttaggacaggaactttcgggttacagaaggaagatgaaattcaaattttgaaactggagactaagttaatcttcacaagatggtgaacatgtattctaagcagaggatagatcacagaatcatccacagaaacatcatagaaagagacaagagcgatttttttcccgaagttcggatcttgcgatcctactctcctttgaggagctccaaagagctgggtctcgattaaccccttgcctcacttgtgcaaaaaccccagagaaaatccacagccttcaaccccaaatacccctaggcaaatttctagaattgaatgaccaccaagatataactcaacctatttctagaaatccgccacaagtgtgggttgctctagttggaaagcctctagaatctcagcacaagaacttaattaacttacctcgttccctttcggaggagaggagatccttcacaaacttatccgggacatcgacaatatgcaatggattctcacgggcgacacctaactgtcacgcccagaaattcccgagtaggattccaagcagaatgtgcattaaaacccccgtccaggaccggccagggtacacaaacgacaaagttgacatatagatccacgtcttacaaacatcataaagtcttacataaatgcagcggaaaattaaaagataactggagctaagccttgacttggaccgcagcgggatcaccactccacaggcatcctcgacggcacggctaagcctactcctcggagaagccaccatctgacgcatactcaaactctggggtttggggaaaatagagcaagactgagtactacccactgtactcagcaagtcataccggaataggggtatgatgcagggaattatcaagggatagctacagaggttcgtttgcataaagcgagcatttataaacagtagttggaagcagtaaaacaattgtaacaattaatcaatattaatcttccactgtccaacgctacaccatgttgcaacaggcccaaccatccacctagactactcaaattcaatagactagactagggtgaaactaatcatggtgaatctggttgaccgcccataaccgcgggcacggctattcgaatagttttactctgatcagaggtgtacaactgtacccacaagacacagccccacgacacgcttccgtgcaacgacatgccaccacgacataccggatagaggccgtgacaggacccttcgcataaccccctctaaccaagcacaccacacctcaggtttcacccccactcctcgcaaggcagcggacagtcccctctcgtgcctaggtgaatccggaagccgcataggccgtcgcagggcctggatgcgtcagctagaggaaagctacactacaagcccagccgttgcccacgttggcttgtggtaagtacgaggaattcttccagggtttcccacaaaccggtccttaagtgccatgggcgcgactagcaaaaccatccacccacaacccaccatttaacatattttaatgaagcgacaccaggatggtggctctaatccaacatcaacactagaacctgaagtctatacattaatatgatttcccccattgtgtgctagttgaactaagcatggctaagcaatccctagtccaatatctagtcatgttatatcccaagctaacaaaggaacatggaacaaaatagcatggctataatagtaggtaaacatcccacggtaacagtataaaataatgtagtatttgaaagaaaacaatagagcatttgcaatataggatcaacatgttcaagtgacaagcatgacttgccttgctctgctgctggaggaacctcggcgactatttcaaagtacaccggagcgtcgggagagccggaatctaagcggcatacaaagcaaacaatataaactggctataagactactgaaacaaagaacaaaaccctttttaatggattctatgcatttttcttgatttactgagacttgaatgggcttaaagggagctcggatgaatcagatatgaattttagaagattcactgtgtttttactataacagaaaaaatccttaattgatttattgagcaataaataaatcccgggagagagaggggcggtgccgacatgcgggccccacatggcagtggctgcgagcgctggtccaggggaaaaggggcgacgcaccacgtggtgacatgtggcgccgacgtggcacgcacgtggcggcctcgtggcagccacgcgggcggcgggatcggatggccccgatctaccgcctggtagatcggacggcggatgcagctcgcggccggcgcgcacgggcacggctcaagccggcccggcggccatggcgcgcggcggcgaacggccggcggcggaggacggcggtgtcgtggcgacgcgggcggcgatagcgacggctaagcggctaggcggtggcgcggcggctaagcggcacgggagagagggagaaaggggaggaggggcctcaccgacgacgatcgacgatggcgagcgatggagggcgatggcgacggcgagacgagctccgggaccacctaagggatcaaaagggatgagttagagagggagagggaaaccatggatggctagggcggtgaccgaaggcgccggccatggcgaagctcaccggcgcacggcgcgtgcggggttccggcggcggattactacggaggaggggtggatgggacggcccgcacgacggcgaacgcgacgacgtcgacgacgcggctcggcacggcggctagcggcggcggcggcggcggcggcggcggagaggaggtcgatgacggtagggtggtggagtgcacgggagcgggcgattgcaaaacgaaaaagagagaggaaggaacgggggtgctttatatagacacacgagggttgatcgtggccgggagaccgcgatttcgccggaggagtggggagaggtggggaggagaaagaggcgggattcaaaaattgaatcctggccgtgtcgagcgctggcgcgggttggagagagggggagtgggcgcggggacgtgggcgcgagggcgacatgggcgacgtggcccggaagacgtggttgcagggcgcggcggtgccggctggaggtgggagacgggcccgacaggtgggccccacctgttggcgacccggggagagaggaggggggctcgggcggctggctggtccgtgtcctgcggccggcccagcagggagggagagagaagagagaatgggcctgtggcccattcgaaagagaaaaagggaaaaagaaaaagaaaaagaaggaaatgaatttttcccgggattaaatattgcttgtgctcaattttaattggttaaaattatttctggagctctaaaaattccactaaaaatcttgttagcgtatttcgacatgtagaactcaagaaaaaaaattccacatgccaattctgattattatttgcattgatttattagggtttactcttgcttttacaccggtattttcttgagaccatttataacttgaatttaggcttgggaaagaacttcagggtgtgacaaacctacccccccttaaacggaatctcgaccccgagattcggaagagctggtgaagaggtgcagatgggcggcctttaactcatcttccctttcccaggttgcttcttcttctgagtggtggctccactgaaccctgcagaacctagtgaccttgtttctagtccttctttcactagtctcaaggatacaaactggcttctccacataagttagatcttcttggatgtcaatatgctccgaatcggcttgttcttcgggtaccctcaagcacttctttaactgggacatatggaacatgtcatggatgccgatcatgttggatggaagttctagctgataggcgacttctcctcttcgttccaagattttgtatggtcccacgaagcgtggtgtcaacttgcctttcgtctggaaacggtgcactccccggagtggagtaacatggaggtacacataatcccctgcttcaaaagtcgtccttgtgcttggtcttgattacaacattgtccatgtaagcttccacgttgcagctaatatggcttgaaaaacatctctgaatcatgcattgataagttgccccatcgttcttcaaaccaaacggcatagtgatatagaaataagcaccaaatggtgtgataaatgaagtcttcaagcagtcagactctttcaggctatctggtgatatcccgagtagtaaaccaaaaagctgagtagctcgcagccggctattgaatcaactacctagtcaatgtgaggcagcccaaaaggatctttagggcatgacttgttgagatccgtgaaatcaacacacatacgccattttcctgttttcttcagaactagaactgggttggccaaccagtcgggatgaaagacttctttcatgaagcctgctgctaatagcttggtcaattcttccttgattgcatccttcatgtcctgtgcgaattggcggagtcgttgcttggtatgattaccgtattatttaacatttaaggagtgctcaatcacctttctaggaataccaagcatatcagatggtttccacgtaaagaaatctttattagcttgtagaaaggtgatgagtatgctttcatatttacaatcaatctctgtgcctattacagcagttttggtaggatcagatggatcaagggggattttcattgtctttgcatcgccttctccagtcttgggtagcttggtagcaggttcttcaccctcagctgatgttgatgcaactagtcggatctcctaaggagcgagtgctgtctcacaggtttgggccatctcacagctctccttatcgaaggtgatggcttgcttgttgtcgcttcgcagagatatgactccgcgttgtactggcatcttcatcatcatgtaggtgtagtgtgggacagccataaatttagctaacgccgggtgtccaagtatagcgtgataagccgtttcgaaatcagcaacttcaaaactgacgttctctgtacggaagttttcccgagtgctgaaggtaaccggcaaagtaatctggccaagaggtgtggatgacaaccccgggatgactccatgaaagggcgcaatactcggcttcaactcagttcttgggatttgcatctcgtctagagtcttggcgaagaggatgttcagtgcatcgccaccatcaatgagagaacgcttgagcttgattgtcggcccctagttttacaacacaggaaatcggatgcattttgttgaaaccaactccctggatcggtaggttggtacacacatcatacatcacatggtacaacagagtctgcacgattaagtcttacaatacttattgatacacgggttgcccaagtgggtcccgaataggccttatatggccgagtacaataccaaaaagtagagaaggggaaaaaggtgagcgtaagagaagctgcggcggtcctacgtctccacaagcatcgactggggatcactcctatggcgcctcctggggttcactgtcttctgggatgctctcaaacagttccgcagcgtcggtcaggtctaggagggttttcagaaagcaagagtgagtaccaaccgtactcagcaagccactaccacaacatgcatttagtgcactcaggaatacaaggaaggctaggttcatttgcataaagttaatttgcacaactcttttcacaaacctatgacttagcatttttaactaaaaacaacattaggttggagttatcattcaatctacgagggttcatcccctttccccaaagcctcgcttggtccggctttaccctcgcatgcagttttccctattcccatcattatcatgaccttcccgcccatcgggcaaggtcacaccactttccttatctaagcaagattaaaaactatgaggctagtcaagcatagtacaagtcccgatgctcattaaccgcaagcacgtctattcgaatagatttgatttactcacactgtagtggatgtatgcttttaatcctgcactccgcggcttgccaaacacataagtctagtcccaacacatgagacttgccacggcccagtttttcagtcatcctagcgtttcggcacccgctccaaggactattcacccccattgcacccccggcacaaaacaacacctcgagccggcggtgaggagagtcctggcgctcccgatatctcaatgggttaaattacatataggttaggtgcgttttagttttcccgggtaccatacatcacatcccttcaccttaactcacaacatacttcagaaccaccatgacaggggtgccgccccacgaggatttcttagtccaccaggtctatacccactcgagaagtgcagtcatactcttattgtttcctgcccaacttcttgactcagtctttaattgaccagggacggcggctagccatttctaggaccaccaatattctatccatgccgccccagtcgaaaacattttgttccattaggtttttggtttttgcaaagctttttgtgctgcgggtggtgcacatgtctccacccgccttctggcaatcactctcgatgagtgaccaccaccaacacatccatatccaactactatggagtgtataatcgtctatgaataagcaatattaagcaatgtcaataattgaccacgcataaataatagactcaggcaacaaggatataataaaggtaacaatatcaaggatggttcatacacaaatttaggtacgcattttataattagcatgcaactttatttataaacaaaacatttataaaatgggttcaacatgctcaaggaggggagcgtagtgacttgccttgttcagtcagtagttcggcttcgacaaactcgtatccgtcctcacacacgtagcctgatttgatcgggaaacggagaatcacagtctattctaagactagcggaaaaaagaggaaaaacaaataaaatagcagaaaaagaaaatgctaacccaagctcattccgaagggtttgggataagaagaattttagcgaaaggttcttcaaaattcgacttgagatgaacaagtggtggcccctaaaagatttggaaaggaattacaaaccacaggagagacagaggacccacatgtcagcccatgtggtcttttaacagccctaggcccatctgtcagccttgctttagtggcgcagctaaaccggagtgaggtggtgcatgtgggtcccatggattagtattaaatcggtaattagggatgaaaggaatgggtggtccccacctatcggccgctcaggcacctcccccttcttcctccttcctcctcggccttgcgcacgcatgagcggcatcgccactagggctgaaccatgccggcaacgaggggtttggaagatagggcggacagtcagggcgggtcctatgtgtcacatcctgatttttgtttcaggatttataaattatttaataaattattattagaatttatattaaatgttcattaatttacaagtgaagttaaatgtgggaaataaaatttcctaaatataaagcatggatggatttaatttttattaaattctccatgattaattatactctctggaattttctcggatttttcggagctcaattcctaattttaatcatacaaagagcatttcagtaattacccacatattaaattaatcattaaatggtctaattataattttgttaagtactttgagtgtccaagtattttcaggatttttcttggaattatttgagcattggaagtatttttaacaattgaaaggtcatctcattggttaatttatttggaaaagtaaataaaagtcctcttcatcagcttgggccgaattcagcccattccctcccttcctctcagccggctgaaaagtctagtttgcctcccttgcactacagtgctccttcttccagctctggacagagccagagccgtgccgtgcctgttgccgccgatccccttccaaaatccaacctctccgttgctcttatttccgaattggttgcgggaatggaatcctctcaatctcctcttcctagtccccaagaaatccccaaaagtttatatggaaatcctttccaatttcgcggttcaacctttcctttttccggcgaagatctaaactttcccgagtttttcccgtcgttgtgggctcgatcccggcctcccatggctatataaaggaccccctagtcgtcctctactcatcccctcaagtcccgtcttccgccgtcgccggaaacgctctccccacgctctccctctctctccacctccggccgccgctccagccgccattcgccgtcgccccggccgtcgccggtcagcgccaccacctctccgcaaagtcgagctctaccccagccacccgttcttttgcgccgaacccctccagaagtcgccgtcaccgtgaaggccgaaccgttgccatgttttgatctccggcgaagctttgccgtcgactccgtggtcgccggacctcgccgtatccactgtcggcatcgcagcagtgaggagaaacccggcagccacctccgcgaagacgcaagccatcggagcaccgtcgtcaccgtgaagccgatctgttccatcttcagtcgcgccgtttgtcgtcgtccgtcgtcgccctctgtcgccgtcgactccattgggttcgcaggagcaaggtgaagcccggccatcggttttttcttcgccgaagattgctgaaacgtcgccgccatcgctgacccgaccccgtcgccgcctctacctcgctgccggccgtctgccgtcatcttccatcgtcgcgccacccctcagtgagctttcctctctccgatgtcgttcaccggtgtagtttatccatagggtcttgatctaatctaatctatttcgcaggttgctttaatcttttatctcggttataaattatttgtaaattgtttaattaatttagaatagtcttttctttaataggtttaattggaattaaattttgtaaaattcgtaactaattcatatgaagtcagaatgaggctgttcaagtctcataattcatctaaaatcatgatttacatgtttgtttactttatatgtattgtttatttggtttttattagtctttttcctcgttttgcgtgttagcttgtcgtttccgtcgtttcgaaggttcgtgagtgcgtcgggagtgttcagaagattaattgaagaccgattattgcaaggcaagtcacacagatcctaaacacaatcctttgagcatgttgatcctatatttaaattctctatttatttcaactgtgcatttattttcgaatgtcaccgggtggtgtgaacttattcctttcttatggccaatttgcattgcttaccctatttcttgattacctcgggttataatttgactagttggatttatatattggttcaactagatgttagatataattgcttagccatgcttagaaacattagcacactattgggataacttatgactcactattatttaatgatggcttaatgatagttcacgagggtcaatcgtgattggttaattaattaaattggtaattaaaatatgattaatggtgggttatgaggacatggttttgaaggtcgtgctcatagcaattaaggaccggttcgcgagctactgttgtgaaacattaaccatgccaaccacaagccagcgtgggcaacggctttaccttttgtatagcatggttcattgcggagcaccagactgagaagtggcggagataagcccacgggggtcgctgggtaatccatgccttgttttataagggggtgattatgatccaggaatggtgcactgtggtgagttgtgttgtgcagagggtattgtcacagcctctattcgggtactttccagtatcgcgacgcatggtagacatgatgttgaggctgtgtcttgtgggtacagtggtacacctctggccagagtaaaactattcgaatagccgtgcccgcggttatgggcgggttgagcaatgtttttcgtgattagtctcacacctctcacaataattattgatgctataactggtaataatttgtttagctcctggtttggagttagatctgtgcagccgggtatggttgttcaggatggttgggcctgtgcagcatgggtgtgctgttcagtgttgattaaaatttctgattaattactccactgttttacttctcttaaatgttttgttaaatgctgcttttgcaaatgagcctatattatgccatcctttggtatccttgtgcacttgcatatttgctgtgtggcttgttgagtatgtcatatgctcattcttgcaataatcaatcaacctcagttgaagaaaaaggattcagaaggagaagacgtttggcttataccccagttgagctgcctgtgggagtggagctgaagccatcgctagaccattattccgctgctgttttcttttcttttgtaagtatgtaatgttattattatgatggatttgtatattaaattgtcagtttgtgtacctcggctgattcctggacgaagattttatgcacaaataagttcggaaattactagtgaatttccgggcgtgacactatggaacctcccccgtgtgtgggtggcggcgtgtgggttatggtgctccgaggcgaccgcaatgcttgggtgcggcggcggcctatgcacacgcatcctggacaccaactcggcgacgatggtggggtgcgtgggtgatggtctgggggtcgggggaggtggtcagggactcgacggagtgtgccgaggttgagaggggatagcggggacgcccggaacgagctcgcaccgttctcacgctcaatgcggcggtggtggaatccggctcgtcgacgataggttgcaagggtggagaggaggtggcggggggatttgtgtgagtttggtggaggttggtggatggttatcccggggtcgggatgaccggtaatgaagagcaggtgactagccacgacagcgcgcatggccgaccggcggcatggcgagggtgccggcgaggggttacattaggtgccaaatgctgaggggtttatcgacgacgcgtggtaagtgtcctctggcacgcttacgtggttcgggacagcttggacggcggtagccgtttggtccgggccacgcatgtcacgaacagagccatggagcgcggcgcgtgcacatgcgtgtcccagtggcacggtcgaaccgacgaccagggaaacgccatgggctcagagggtaaggcgctggggacctaatgtccagccgctacggccagcaaaatggcagccattgagagttgcgggggtggcgtttcacccactagtggcgccacgccgcggcagcagcgacatcacaggaaaaaacgcggttgagcaagggaagggaagggaagggtgctcaccgcgcgacaaccaggaagcggcacaccgacgaggtaccggtcggtgtaggtcgagcgcgcatttcgtcctcgcgccccaaatgttcgaccggtgctagtcggtgttcgtcctggttcaagagaggttcgagggtgttcgagcaattagattgcaagttttaggtgattaattagcgttcaatcgttcgtccagttcatagcgcagctccctaccccccccatcttgctcaacctaagcttcggccggaggcgagctgaggcgaagcaagcggagcggcggtagcccaagcgcaaggagtgatagtggagaagaacgagagctagaggagacagagatagagatggattggggcgcatggcgcggagaggtatttatagagcatgggcatgtgccgagcggatgatggcgcattgaatatggcctccgagtgctgggctgtcgccgttgcagaggaatgttggggaggcggtggcaatgggatggcctccctgtgcagcagggcacgtggcggcgaggtgcttgaccgcgcggggacaaagcgacgcgattcacgtgacgccgtcgcccggggtagatgagccgccgtcgccaccaacctacaccggccggttgcgttgcattgatggtcgcggttgccccctctctccgtgccgttgagtggagcaccgagccgggcggtgtctttgccagagctgggtgtcacggcggcggcaagccaagaagagcttggggaagggcaagggcgagcccgccggcgagatgggcgtggtaggcgtcggaagggatggtggggctgggagcgtggcgccatgtgtgaccgcgtggcaaggcgttgcgcggagaaggggatcgagccccgtcctcttgtggtgtcggctcggctcggctgagctagggcttccaagccagcctcaaaaagaggggaaagaaaaggagagaaaagaagagagggaggagggaaactagactttttctgtgcagggagggctgagggaccagaaacagacttcactgatggtccttagatgaattgggtcagtaacagggggaggaaaggtagaggatggtggaaggtgaggggaaagttt

SEQ ID NO: 6061 - DNA, 39637 bp, Oryza sativa
atttctactatattcctattccaccagctagatactactaaactaacttgagagaaatgagagagctattgcttgaggtgtgtgagtgaagtaagaagagaagctccttttataggcaggtaatgacggttgtgacggttgaaatggtcgataataccctccaaccgtcattcgggatcaattccagtcatccatccaaaccctgcatccatcggtgccacggaaggttcgaccaaaccatgggctggcctaacccaacccatcttcggctagcggcctcttttgttgtcctcctccgtagacttgtgaattttggcccaatgtgtcgtgttatttatgagttcatggctcattcatacataagtatagttcttgacaccgtacgatttgtttatcgtctgagttgatgtcgattctcctccactttattgtcattctctgcaaaaggttagtatacctaatactagtggaattttattattctaacatatatatgcattgcaagcatcactagttctcctctattttagtaatattgacggtcgaaactgatcgataacgaccgtctacagcgggaccggtggtcttttttgcatagaatagtttgaggtgtttccataatcttcaaaagatcaccctcaaactagaatgataattccaaaggctgaatttcttcttcctttgtttctggcggttcgaatgagaattcaacggttgaatcttggtgtatggaggtagatggctccgattcaacggttgaatgttcatctggtgtaggctcgatttcctggatgctgtcgcaatgaaaaaaagagatgttgtcaagtatccgatcgagttccgtatcttccgttgtcatcttgtgtgcgaatgatcgttgggcgcaaatatcaaaatacatggtagactccgtgtctaaactcgaatggaagtattcctcagcaacgtggtcagataggcacaagtctgggctggctagagttagcaaatagaactgtgctcaggctacactgatggactccttctagtcatgctaaagttgagaacctccctacggagagaaactacacgactaatgggaagaaagcaaggcaaaacattttttttcaactcctcccatggtcccatttcccatatagcttcatccgcaattcaagaaacatggtgctatgccacttgccatgtgtctttgggcttgtaactttattctgggatcccagcctaagtggggcccaaattgggtgctcctcaacctggtggagcacgaccctccagaccccttggtcgtattctcacctctttaaatagctagatacctctttagaatttctcgagttttgttaaattaaagttttagccattgctactttatcttgcagttacacatgttggctaggccgtctaattactcgtttttagaaccccaccttatcatgaagaggtaggaggaggagacggctgtacttaccacatgtaagtattaccgtgtacttcgtctggtgccacacaataatacaatgtaaaaacctatacaatcactttctacgtgcaaatgaacaaaataaatatacatagacagtcccttcggtcgggtgcgcgtcgaccaacagctgatcttcgagcattaggtctcgcatcacctcgggtggccttgggaagaagggacctgatctaatgtgacgctaataagctacaggcaggtgtcaggcaggtcttgtttagctctgcaaaaatttttactctacatgacacattgaatataatagccgtcaagccgtgcgttgcacgggctctttatttatatcatcataaataaatattaaaattttagttatgtatgaatatgtggtcttttctaattacaatggctcttagattatattaaaagaagagtttttatgaaatatacattgttaaatattgattcctaatcaatagaatacttaaaacgataaaattcatattttttaattcattttgagtatgacttccaatggcatattttcttaatacaatgtcccaatatactattattagattaataataaataaaacaattttagtcatgtttatccctcaacattgattaaaagaaaagtacttcatctgaatttgttggaggaatgatgtatttttctgaagtaatgaatatcaatgaaaacataaattgttcaactggatgaagcatgcaacagattatagtgatataggatgatacacatatatatacttatttatcgtgagaacatggcataataaaggatcaaaatcaaataacatatagtattaacatatagtaagaggaaaccatgtactacgtataaatattaatggattagttctaggagccaaatcaagaactctgctgtactatcctaccataatgttaatatggattggttccgtgtccaataatttttcattgtgtgccatgttaggataaagtaggatcagcaaaatgcatgggattattcttttttccatggttttggaaaatagggacgaaaataaaccatgtttcactgcacaccatttgtctttttcatgcatgcatgtatattactgaagcaacgcatgcatatctattgcttttttccacccatgcattattatcgaaaaaaactgcacatgcatatctattgtttttttccatgccctttgcctttgcatgaccacctgtataacacaaaatttatgatgaatcaactaaataatataattatgcatctatttgccaatatcgggtggaggttctctaatagatttcggtagttagaggatctttttcttctgttggtgtctattagtttgtgtttgcttagctttgtttctgctatcgtaaactttctgtgtgagttctgtaataattggctgtagctctttgagtaaaggccggaatgttacattccattataaaaaaaatcaactaaataatatacggagagtttttttttttgcggggatagtttaggaaagtccgaacatatttttgaacataaatatgaaaaaagttttttacaatataataataagggtagcaaattcttatcacataggaaaaaaaatacattttaaaacaaatatactcccttcatccacaaatatttttgatcctagacttcaaattctatccacaaatataagggatttaagagtagaactttgtaaagccacctctcatttaatatttttcgatcaatcttatccctaaccatcgttctactgccccttcaccccgttttaaactttatcttcatttttccttcattcctaatctcttgaaatcgcttatatttaaggagagagtgaatatatgaagaatggtaaaagtagatcaaatacagataaaaagtcagactatgcaaattgatggaatacttacatgtagtacatgtggcgaccactatggatcttcctaaatgccagcgaatttgtcaaagcaaatagatggaagacttctatgaattattatggtacgatgaccatggattggcttgtcaggtgctatcgaacttgttgatgctgaatcaacatctcaacatcaaaaatatatacagtatggtgatgacgtagattagttcctattggacgctgtgacagatgagaagtatgcatgtaaagagaattgaactggaaattagaagttagaatcaaaccttaacaatggagaaaacaacaattagcattcggctgacgttgtgtgcttttccggcgctcaccggctgcacgtcaacctcgccttagtgattgtgtgttgctagatccgataacgttgatatattcgcctttgccgcggccgagcgagcagaacataaatggcgtacgatgtgcttgtatgtactgtttcctcctgcctttctccgtcgtttgccgctgccggccggcgcgatggccatgccgtgccctcccgtatcttccattgcatctgatcagatcgatctcagtaaatatggatggactcatcggtttagaaaaagaaacaaatacccacgttcgaaagaaaaaggaaaaagaatgcgtgcgtgaaaggatcatatcgatgggcttgacaatataggttacatgggctttaaaagacccaccacgtggaacttggattagattgtaatcaacggttgacatattatggtttgtttaatcaatggcttgatcttcctgattaacgtgagagctccaaaaaagtgcccgattagtatggatacatatttaaagtattaagcgtagtctaataacaaaacagattaaagattccaccagaaaactacgagacgaatttattaagtctaattaatccgttatcagtaaatgtttactgtagcaccacatggttaaattatagcgcaattaggcttaaaagatttgtctcgcaatttcttagtgaactgtgtagttgattatttttgtctacatctagtacttcgtgtatatatctaaatattaaatattaaatgtgatagctatgaaaaattttgtccgggcctaactctgctaggcatcaacgagtccatgattcaatcaccggctttgagagtggagtaaatttttcactcgtcagacaagctctagtgcggtaacccctgcggtggattggacacacagctgcatgcatggcatacaatccgtggagcatggcttttgcttttttttttcgcaggcctcgacagccagtcacgaagttccgctgagccgctgacaatgggtcgcgtcaagctttacaattgatgttactgcttctgcttgctgctagctcccttagagtagaatataacatgtcctatataatccctctattttataatataaatcattctaacatttctcatattcatattaatattaatgaatctagatatatatctatctatattcattaccatcaatataaatgtggaaaatgctagaatgatttataatgtgaaacggagagagtaatagttttattcggattaatcattatacgatggttgtgtttagctcacactaaaattggaagtttggttgaaattgaaatgatgtgatggaaaagttagacatttgtgtgtataaaacagttttgatgtgatgaataactttagaactaaagacggtcgataacacggtcgatatgttacgtcctgttcttgattaagtttgtttacacgaaggaagtactgtgctgctatagcgtttacagtacagtgcttcgttaaatgccactggtacggaaacatttttctcgtgtgcccgaaaaattggcatctctcttagcggtaccgtaacggcgcatggagagtgattgagtacagttagtcaagttatgctcgcctccccgtccaaaaaaaaatcacaaatataatgtcgaaacaagatttcagcaatactaaaaaggtggctatcaagctgaaaaagtagatgggtttacagacaagaaattttatacaggttcagaccttcataataagaaataataccctactcctgtccggggattgatccgtcgagtgtattattgatcgtatgatctgggagaaaaatcgtgttctaagaggcacccggacccctctttatataggggaaggggtccgtattacaaagtacaacccatatctctaacggaataggtagttacagataagatacaatcgtaacctactataatcccaggtgcttccttgatatacaagtttagacatttaacccaaaaacttttaaagatattctatctatacatggtacccccatacccagtcggatatacattccgtgtgggtatggggtatccataatctccacagtagcccctaagacctttatggtcaacgaaatagtcctttctcgtaattcaaaacgataatacaagtgattcagcttcttctgccttggtgtcccgagtactgaagtcaaagactgtgaagggctgaaaataaaaagaaaatcaggtgcatcgaccagatgcacctaattaggtgtagcccccgactatgtgatccatccgagtggttcaaggtacattacaaccaccgaatcactttgggaattaaatatttaatcttaagcagcacgtgataaaatatccaaccgactgctttaaccataatacacccagaaaaggcataacgagacccgagtgaaaagcactctaaaagtctataaaccaacatatatgacaagaatctgagtaaaaaactcttaaaggattcatcaactgttgtataaagaatgacaaatgacaagtcaatatggcctaagctgtgacttatgtcaatatcaaaataagcatataacatgctgaggggatagctatctgaaattagccatctcaacaaaacccaagcagctttgcaacctaaaaaggtcaacaaaattagtattacacttttctaccgggcaccttctttatttcgcattacagtaattccaaagaattatctaactgcatcgaaaaggatttcaacggcattgggctatcctgttgtgagcaatttttaccaaggcaaaaatatatgctgaaatccctaaggaacacaaccagccacgccaatattgaagttgggctgaaagcactgtataggcctaggcccattagcacctcccgataccctaacaaaaaacgctaaacaagtgccgcttcgtcttccctgccgagacctccgccactttccccattctccgctacagtacagcgaccactccggcgagaactagggctagcaaatccacaccaatccactcctctcgaagcttcgtaaattcgcaaaaatcttttgcgcaaccaccgcaccaatctccccttcattcatcgccatccttgcttcaaatcccatcatccattctcgcatccatggcgtatgagagagagttttgagagtcaatgggctccctccgatgttacagaggagaacttcaaggagatggtggcgcacaacgttctcctagcgaaggaaattatcgggtggcgtgcggcgtgcggtgaagcatttctgacccctgacacacacgaggtcgtggtattttctcacttcttctatggtggcttttctctcccaacatcgaaattcttcagggggatccttgaattttacgggattagcttgcatcatctgaaccccaattccatagttcacattgccaatttcatccatgcctgcgaagctttcctgggtattaggccgcactttgccttattccgccgcatcttcttcctcaagccccagccaaacaagagcaagccgtgcgttgttgggggagctagttttcagttaaggggaacccttagtcggaaatacttccccatgcccttcaaaacctcaaacaagggctggcatgcaaactggttctatgtgcagaatcctgaaccagcgctccctgagtactcttgccttcccccagtataacaagacacttggaactcgcttccagtgggagatgaagccgctcaaccgcttaccctaatggagcacatgttgaaacttaaagagcaaggcctgcaaggggagcaaatcactcggcactttatcaacagccagctggcacctattaaagagagatcccgcacagtcttcgaatttgatggcaaaactgaccccaatcgtgaagatccaaaatctcttgagttcaagattatgaaggagaagatgtacaaaatcttctctaacgctattgtggtctgctattcacacctgctgccagtggtgccatataacactttcaaccctcctccatcggtatgtatcaaaaatatctcggccttcctgatgacatccttttgtcttttgtaatgttagctgaaaacttgaaatattatgcataggaattttctcttatgaaatctgatcctccaatcgctcaacgccgctcgccccgccggcaggctggtcaggccagtgatgggccgaaaatccaatctgacgctcagcccaacatctcaaagccaactaactagtcgggctctcagaaaaggaaattaattctttgtgacgacgaaggtgacaatgttgggaaagctggcagcaaagaggtgaccggaaaacagccaaggcaggctaacccgaaaaagaaaacatccagtcgtccaataccaaaaatcaggaagtcatccaggtacgagtcatctagcaatttctcctgtattgccaaacatacaccatcaaggtagcaatttctcctttattagcaatttctcaaatctgcaggaagccatttgacatcgattcctctggaaaagaccctgaaccgactgacaaggagactgatcctacgaccaccacagaaaccgggctgactgttgaaaatcgcccgactggtagtcaaccggcgaccgacaatgtagaggccggaaatgaacccccgactggaaaccagtcggccgaagctgaagccggtgctaatcaggagcccccgactggaaacgagtcgggtactgaacaaaataaggacatcccggaaacagaggctcgggcaagcagccctcccccaaaaaataccaacaccgacccggagtccaattcatctgataaggtgcaagggcctgctcgtcctcaaccgaagattataacaggtaatcaattctccgaattcattttgacttgacaaattctcttcgattacttcatcatcatttgtgagtgttcaaaggcccaatgatcggcgacgaagaagatgttcttcggattcagtcagctgaagattctcgcccacccatcttagttaaatggtgggatgatgaaatgcagcctcaagggatcataataaataagcagaaagaagatgaggaagtgtccttgcttgcaaagacgctcaatcaggccactcatctcgtaaatgtatgtttctcacatatagctttactcatcctatcggccacttcactaaattgaaatgaatttgcaatgcagagaattcatcttaggaatgaagcgaaaactacaaccctcgagaaactggttccacatctcgaaaccctggaagcgactagagcccaactccatgaaactagggagcttgctaggaaaaccgaacaagatctcagggaccaaatcaccgagctccaagattccaatttcgagctgagtggttcatccaaaggtaacccctacacctgattaacttattctaggctgctatccgcatccaattaatcagtggaatatattacagtacaagctgccaagatcaccgagctagaaaagcaaatcaaagctctggaaaaagacaagggtgaactaaccaaaaagagggactcggctctaaaagatgtcgaaggtatttgtagttaaaactctaaaatcattcttatcttcgtgcctggacgttgatgtgaaccttttatgcagatcgcaaaattaaatctcaggctcaattcgaagtcctggtcaacaagattaagaagcttgaaggagctagggatgaagttgccaacgccgccacaccactcatccaagccatgttttttaataacaatggtccgagttcgttcgacgctgttgaaatcttcgacaagctgagagctgctccagatacatactttaagaacatcaaagaagctggatgcatgggagcgagcatggcattggcaatgaccaagtccctgtacccgaagattgatattgacgctgtcgacggctttgcaaatgggaccagtgaagaagatgcccttgacctcatcaataatgcatagaaggttgccgacaaaatcgctgctgatgttgttgagagatttcaagacagtaatctcggtccgactgggtctgatgattctgataatgaaaaaactaagtctgattgacattgtgtgatgtgacttatgatgatggaggcacaatttgtacaatactgatgtatttatgctgtgcttgataatttaaactcagctcttgatttcttaaaagtttttgtcaaaccttattgagcctagaacccgcaaaagttgttaaaaacattcagtcctcattgactaagccaaaaaatcaaacaaggcaatgataaaccaagtaagcaaattgaattgataagaatcacactctattattattatagtagcccccgactgttaactcaaggagaaacttgatattagcagtcaaagagggaaagaagatacaaaagtaatgcctaagcataaaaacgacgaagatgctcaatattccaagagttgtcgacgtgagtaccatcttcacgcttgagtcgataataacctggccgagtaacttcagaaattatgaacggtccctcccataatggagataacttgtgccgatctcgtgtagtttgaatcttcctcaagaccatgtctccgactaagaatgcccgcgatcgaacgtttcggttgtgatagcgtcgcaaccattgtaaataccgtgccgactaaatcaatgctgcctcacaagcttcctccagtcggttgagatcatcaactcggtcttctccgtagcgctcctccttgaaattgcgaaatcgcaaggattcgaattctacctcacttgacaacattgcttccacaccatgaaccagaagaaacggtgattgccccgtggcccgactaggcatagtgcgtagagaccaaagtacagatgacagctgatcaacccacttgccggtgtagggatgcagtccgacgaagtcttgtgctttgattccttgaagtaccataccattggcacgttcaacttgtccattgctcataggatgcgctacggaggcataacaaattttgatgctgaagtcttcacaaaaatctttaaacacacaaccagtgaattgagtaccattatcggtgataattcgattgggtaccccaaaccagtgcacgatgttgacgaagaaatctctagccttgtccgctgtgattgtgacgactggcttggcttctatccacttggagaacttgtcaacagctacaaatagatgagtgaaaccaccggtagcccttttgaaagggccaaccatgtcgagcccccaaaccgcgaacggccaggataatgggatagtttgcaactcctgagctggtaaatgagtttgtcgggcaaaaaattgacaaccttcgcatgttcgcacaattttatcggcgtctgatacagcagtgggctagaaaaaaccctgccgataagccttgccgacaatggttgtggggacacccgatatagtcatggtgccccacgaatatgtaactgcccaggatgttcagttaagcatgaaatgatataaaagtataaacttcgattatacaatactcaagtcacttagttcacaacacaacataaatacaaaccattacatatatggcctataaagccttatttctacaaacagataaactgctagactccaccacaggaaatgcctgagcgtagggtgacctagaaaccatagctgtcccactctaacgggtcaacaggatcttcacaagcatcctcctcctcatgatctgaacccatttatgagtacaaaaggtactcagcaagacatgcttatgataataaatacaataattgcaatataaaacatgcagtatcgagagctgcaaggtttaaaccctaaccttaacagttatttcatagagcctaacttaataaacatttgatataaacaacactattgaacatttaatttaaacaataataacgagcataaaaatataaatgttacttataattaacatgaatagaacattaagtaataaataagttaaccatattaattaatagccatttagtttaacttgtgcccataatctggaatcacccatagacacatctccattaaccgggagcacggcgtattcgaatactcaacgactctgcagcgtatgcccagctttacccgcacgatacccacagctggccgggctgaaaagtaacaaggtgtaatattgctccatatatctttcccttctgcctagtaagttaaaggatgcttgggatgttgctcggagtgatccggtccgaggtgtgtaccaacctacgtccgcatccacttaccattgttcgttactcgatgggcagccgagaacttcatgggccaatagggcagttctgaactctcggggcccatcgagcccacatatataaatcatataaacatgaaccatgtcactttgcttcacacacttgaaagctaatggcgagtacactgaaaggcctgcagaagtttaatcaattggagcaatatacggccaggttcgacaaatcgatcgtgtggatgggcgaaactatgtcattcttattgacacaagggggtttattattatatcaattttaaataagaaataaccataaatatatccatatatccatcacgaccataaacaggtccataaaaccaaacacatgaactctatcatgtgtaccacccgctcacatgcgctgtcaacagttcttagcatatagccataaatagttccataagcatgttttcataagcaataataataatatccatattaaatcgatagcatgctaaataattaacagtttgtttaaatgtttctcaaattttatcctaagtttgttagactctaaggctcattaaggtgtttataacaacaaacagaaaatataatgcaataatagtaatataattaatttaaaagaattcgtgcagtctatcgtactccaaaggacaagtacgctactaaaataactctctatctactcggattaaatttctcaagggagggtgcatgtattgcaaccttcgggctcgatgtagtcgcacaaaccatctcctcctggcacggagatttcactcgcttcgactaccgaaccaaagtcagcattttctatttacgcaacaatcatcaccacaataaataacagaaaaacaaagataaccaaaacaaatagtatcacaaagtgcaacaatgggtgaaaaggatttaaagaaataattttagggattttttggaatttcggtgaacggcgaaccataggcctaaaattagggtcgtgacaacgggtgctcggattgcaacgaaactgacacggatggattcggaataagaaaaaggatttttcttatttatttttcaatagaaaaatcggatttttcttttcttctctcgctctgtacaggaacggccggcaactccctggcgccggtggtggagatggccggttttgagcaagggggcgccggtttcacgatctaggggtcagggcgactccgttcccgtggttggcggcggcacaggcggtggcgcaggcggtggcggcggggctggcgacggcggcctagagcaggaggcggcggcggccatggcggcagtggtgcaaggggagcgcggtggtggcggcggctcggcctatggcggccgggagcggcggcgcgccgtatggctggcggtggccgaacagagcggcgacgccgggaggaggcgctggtgacgttccggcgacggattggaatgggaaagagagggaaaaggtagtactcggcatggagaatccatttttaccttcaatttcagaggatttgcgatgtatgcgacgaatttaggagctttattaatggcgcaaattttgcgttttggggatttttcctccggtaatggcgatttgattcagtggagataggtgcgcatttgagtagtaagagaggtcggaattgcggttcttttacccccggtattgagccttctagttgagggacgaaggagatacggaggcgggaagctggaggtgtcgtccggggattcgtccgtcgatcggcctcatgtgcacgcgtgcgagcgtgtggcatgcgcgggctggcacgagctgggcgcgagcgtgcgcgagcatggtgcgggatcagcgcgtgacaacaccgggcgacacaggccctggctcggccgagcccagtagaggaagaaagaaaaggaaaaacagagaaaggaagaagaaagagaaaaacagagaaagagggaaaaagaaaagaaaagaaaaaataatagagaaaaggaaaactagggtggaaataaagaaaaggaaattttgggcaaaattaaactagatagaatttgaactgatgtgatatttagatggtgcgatatttgggatagatttaaatcggattcaaaggaattatttgagggatgatatgcactttgcgacaaaaaattaaacgagaaaagaaacaccggaaacaaacttggaaaataatattttaaataaatgtctaactcgacggttatatttttagagaatcaaagcaaactaaatcggttttaaaaagttgtcaaattttaaggatgttacaatggttcgtgcggcagcgtgattgtcgctgatgcccgagtgtatatctctgagcaattgccttccctcctccaaagagacacaacgttgcagaattcctgatggacttttcttgtacagctcggtctcatgtatgacataaagcttgctgcgcctggaaatccgctcggcttcgtctttatcctgagggagttcttgcttggtcaaaaacttgatgagggctctctccagtcggcgtcgatcatgcttacttcttgagtgtctacagcctcggttgtttcccttcttggtacggttggttcgtaaagatgctcaacaaacacatcagagggagatgtttctcgtttcgaaccgaaattggctagtctgtcggccgcctcgttattatgtcggaggacatgggttaactcggggccgtcaaacttgtcttctaacttgcgcacctcttgtcgataagcagccatattatcatcgaggcaggaccattcttacatgacttgattaacaaccaactgagaatctcaacggactatcagacgacgaatccctaaagatactgtcgaaacaagatttcggcaatactaaaaatggggaggctatcaagctagaaaagtggatgggtttgaagacaaggaattttacataggttcaggccttcttaatcaagaagtaataccctactcctgtccggggattgatccgccgagtgtattattgatcgtatgatctaggagaaaattgtgtccctagagggacccggacccctccttatataggggaaggggtccatattacaaaatatagcccatatccctaacggaatatgtgattacagataaaatacaatcgtaaccgactaggatcctgggtatttcctagacatacaagtttagaaaactaacctgagtcctcctaaagatattctatctatatctggtaccccgtacccaaccaaactatacatgccgtatagatatggggtatctataatctccacagtagcccccgagacctttacagtcgacgaaataaccttctcttggagcataaagcaataatccgtgtgcttcaatttcttctgctctggcctcccgagtactaaaatcaaagactgtgaagtgcgaaaaaagaaaataaaaactgggtgcatcgagtagatgcacctaattaggtgtagcccccgactatgtggttagttaaaaatctaaacatgtagtcaagaaccgagagattttacaaccaaacatcatatagcaaagcatacgtggcattcaataaaacacccagccgactgcttcttggctttaatatatcgagaatagagatatgaaaaggcccgagtgataaacactcaaaaggtccataaatagacatatttgacaagaatccgagtaaaaactcttaagatgatccaccaaatatgataaaaatcatggtaattaacaagtctaatagcctaggctatgaccctcaccataaccaaaacaagcatatgacatgctaagagaatgactattagtaaactagtcatctcgaatcaacccaaacagcttttggagcctaaaaaagcttacaaaaatagtataacacttttctgtcgggcacctttttatttgcatcgtagtaattccaaggaattatctaaccgcgtcaaaaaggattttaacagcatcgggtcacaccattgtgagcacaaattgccaaagcaaaaaatgcctaagtccctagggatcacaacgggccacgctgataataatattgggctgaagtactgtataggcctaggcccattagcactcccgataccctagtgaaataaacactgaagtccaagcgacgtttcgtcttccccgccgagactctcgccattttccccatttctcgctacagtgcaaaaccgcgccgacgaagctagggttcaccaatccgctccaatccatcctcaaaaactccgtgaaatccttctgcacgaccaccgcaccgattccccatccccttcgagccacatctcggaccaaatcaaaccatccagttcacatccatggcggaagagagagaaagctttgagagtcagtgggcgccctccgacgtgaccaaggaaaatctgaaagaaatggtggcgcacgacgttcttctggcgaaagagatcatcgggtggcgaccagcattcggcgaagcgttcccgacccatgatacacatgaagttgtggtattttctcacttcttctatggcggtttttctcttccaacctcaagattcttccggggtattctgaatttctatgggattagcatgcatcacttgaacccaaactccaaagttcacattgccaattttattcatgcctgcgaagcttttttgggcactaggccacacttcgccttgttccgccgcatcttcttcctcaagccccaaccgaacaagagcaaaccatgcgtcgttggggggggctagtttccaacttaggggaactttgagccaaaaatacttctccatgcccttcaaaacctcaaacaaaggctggcatgtgaactggttttatgttcaaaaccctgagcctgcactcccggagtacttatgtctccccccagtttatcaggacacttgtaactcattgcctatgggagatgaagctgctcaagcactggaactgatggagcgcatgataaagctgaaggaacaaggtctgcaaggtgaacagatcactcggcactttatcaagagtcggttagctcctattaaggcgagatctcgtacagccttcgaatttgatggcaagcacgacccaaaccgtgaagatccagattctcttgattttgaggtcatgaaggagagaatgtacaagatcttctcaaatgctatcgtagtcagctactcacacttgctgccggtagtgccgtacaatgtattcaatcctcctccaccggtacatattcaaacatctcaacctccctcaaaagcatgatctcatctcttgttaaattgtttgacattcatgctcaggagttcgcgttgatgaagtcggatcctccaatcgctcagcgccgatcacctcgccttcaaactggtcaggaaagtggaggaccaaagattcggtctgaaacccaaccaaacacctctaatccagccggccagtcagattcccacaagaggaagttagttctgagtgacgacgaaggcgatgatgccagaaaacctgaagataaaggggcgaccggaaaactaccgaagcaagccaatccaaagaagaaaacatccagttgtcctatgccgaaaatcaggaagtcttccaggtacaaatcatataacgatcttccttgtattgatgctcacccatcatgaaaatgatactgatagcacaactcaaacttgtaggaaaccatctgatatagatccttctgggaaagactcttatccgactaacatggagacgggctcctcaaaagaaactgggccgactgcaaaagatcatccgagtgacaatcagccggcaaccgacaatgtagaacccagcaacgaacccccgactggaagccagtcggccgaagctggagccgaagttaaccaggagcccccgactagaaaccagtcggacacagggccaagccaagagatctctgaagttgaagctcaagcaggcagccctcccggaaaggatgccagcaatggcccaggatccagatctcctgtaaaggcacaagagtccactcgtccccgtcgagaaatcatcacaggtaaacacattatctgaaatcattttgatccaacagactttattcgattgtttcacctttattcatggatacattagggccaatgattggtgatgaagaagaaattctccggatacgagcggctgaagattcgcgccctcctattctggtcaagtggtgggataacgatgggatcgtaataaataagcaaaaagaagatgaggaggtatgcctgctgaagaaggcactcagccaggctactcgcattgtaaacgtaagtttcttgacgcccgacctcaaccatctgttcgccatttagctcaagcgctaataaaactgttttgcagaggattcatctcaggaacgaagcaaaaaccgcaaccctggagaaattagttcctcatctcggcacccttgaggccaccagaaatcaactgcacgaagccaaagaacttgccaggaaaactaagcatgatctgagggatcggattgctgaggtccaggaatccaattttgaactgagtggctcatcaaaaggtacacataaactctgtccaactaacttgtgctgctatctttgtaatttcgattaaccggagtcaatatagtgcaagccgccaagatatctcaactggagaaacagattcagactctggagaatgacaaggctgaactagcaagacagagggactcggctttgaaagatgttgaaggtaccagtaatcaatacttcaaaagccatcattttctttatgctgacttattaatgtgaatctgttgatgcagaccgcaagatcaagtcacaagctcaatttgacatcttagtcggcaaaatcaaaaggcttgaaagggctagggatgaagttgctaatgctgctaccccactcgagtacattcgatgctcccgaaatcttcgacaagctgagtgttgctccggattcttatttcaagaatatcaaagaggctgggagtatgggagcgagcctggctttagcgatgaccaagtccctatacccgaagatcgatattgacgctgttgatggctttgcagacgggacaagcgaagaagctgctcttgacctcatcaatgacgcacaaaaagccatcgataaggtagcggttgatgtagttgagagattgcaggacaccgatcttcgaccgactggtcctgataactctgatgatgaaaagactgatactaattgatgtaatttgacaacaatgattctgatgatgatgatggaggcacaatttgtacaatactgatgaatttatgctgtgctcagtatttcaaacctagcttctgatttcttaaaagcttttgtcaaaccttattgaacctaaaacccgcaaaagctattaaaaagctttcagtcctcatggactaatccgaaaaatcaagcaaggcaatgataaatcaagtaagcaaattgaattgataaagatcacactccattattattataatagcccccgactgataacttcaagggggagcttgatgttagcagtcaaaatagggaaatacaaaagtaaaacttaagcataaaaacgatgaagatgttcgatattccaggagttgtcgataggtgtaccgtcttcacgcttgagtcgataggaacctggccaagtgacttctaagattataaatggcccttcccataagggggataacttgtgccgatatcgtgtagtttgaatttttcttagaaccaggtcgccgactaagaaggttcatgatcgaatgttacgattatgatagcgacgcaacccttgcaagtatcgggccgactgaattaaggttgcttcgcgggcctcttccagtcggtgtagatcatccactcggtcttctttgtagcgctcctcgcgaaagttacgaaaatgcagagattcaaattccaccttgctaggcaacattgctttggctccataaactaggaagaatggcgactagcccgtagcccgactgggggtggtgcgcaaggaccaaagtacagatggcagctgttccacccatttgccggcatagggattcagtcggtagaaaactcgtgcctttattccttgtagacccatgccgttggctcgtttgacttgtccattgctcataggatgcgctacgtgggcgtggcatatttaaacgccaaagtcttcacagaagtctttaaatactctgctagtgaattgtgtgccgttatcagtgatgatccgattaggtactccaaaccgatgcacattgttgatgaaaaaatctctagctttgtctgccgtgattttgatgaccggtttagcttcaatccacttggagaatttgtcgacagccacaaagagatgagtgtaaccttcaagcccccaaaccgcaaacggccaggacaacgggatggtttgcaaatcttgggctggcagatgagtttatctggcgaaaaattgacaacctccacatgtccgcacaatcttatcagcatcggacacagctgtaggccagaaaaaaccttgccgataagccttgccgacaatggtccgtgcagcagcgtgattgccacaaataccagaatgtatatccttcaataattgtctcccttcctccaaagacacacagcgttgcaggattcctgatggacttttcttgtacagctcggtctcatgaataatataaagcctgctgcgcctggaaatccgctcggcttcatctttatcttgggggagttcttggttggttagaaatcgtataaggggctctctccagtcggcttcaaccatagctatgtcttgagtgtccgtggcctcaactatttctttccttggtacggttggttcgtaaagatgttcgacgaatttgtcggaaggagctgcttcgcgtttggatccaaaatgtgctagtctgtcggctgcttcgttattgtgccgaagaacgtaagtgagttcgagtccatcgaacttatcttccaacttgcgtacctcttgccgataggcggtcatgttatcatcaaggctggaccactctttcataacttgattaacaaccaactgtgaatctccacgaactatcaaacgcctaattcccaaagagattgcaatccgtagtccgtgaataagcgcctcgtattctgccacattgtgagatgcagaaaaatgtatccacaacacgtaacttagtctttctccaatcggggaaattaaaacaaccccaacaccagtgcccgaaaatctcttcgacccgtcaaagtgcatagtccaatactccatcttctcatcgggcgttgttgacagaaaacacgaggccgttaacaggcgtatcctcttggcactcggcgacgaaatcggctaaagcttgggacttgatcgaagttcgcggcttgaacgatatatccaaggacatcagttctaaggcccattttgtgatccgcccgtttgctttgtgattatgaagtatatcgtcgagcggaaacgatgtaaccaccgtgaccgagtgaccctggaagtagtgagataatttcctgacggtaattagaacaccatataacagcttctgaacttgaggatatcttgtcttggagtcggccaaaacctcgctaacgaagtagattggtcgctggactctctgaacatggccttcttcttcacgctcgacaaccaataccgtgctcacaacctgagaagttgccgatacgtacagtactagcggctcttgcggatgtggtgaggccaaaattggtggagtggtgagaagtttcttgaagtcttcaaaggctttctgtgctttgggtccccactggaaattgtctgttttctttaacagcttgaagaagggcatcctccgctcgccgagtcgtgaaacaaactggctgagcgccgccatgcatccagtcagcttttggacatctttctgcgaactcggcggtttgatgttgaggatggcgttgactttctctgggttggcctgtatgcctctatgagacaccataaatccaagcagcttccctgacggtactgcgaaggtgcatttttcagggttcagtttcatcctgaacgcgcggatgctcacaaaggtttcttccaggtccatgatcaaatcatctttctgcttggtcttgacgactacgtcatccacataagcttcaacgttgcgaccgatctgagttgagaaacatctctggatcaagcgttgagaagttgctcctgcgttctttaatccaaaggcatggtgatgtagcagtaggccccaaagggcgtgatgaatgaagtcttcaagcagtcggattccttcaatcggatctgatgatatcctgagtagcaatccaaaaaactgagtagctcgcagccggcggtcgaatcgactacctggtcaatgcgaggcaacccaaaaggatctttggggcaagacttgttgaggtcggtgtaatcgacacacatgcgccattgcccggtcttcttccgaactaaaactgggttagccagccagtcgggatgaaggacttctttgatgaagcctgctactaatagcttggtcaattcctccttgatcgcgtccttcctgtcttgtgcgaagcggcggagtcgttgtttgatgggtttagcgtcttccttaacatgcaaagagtgctcaatcacctctctgggaataccaggcatatcggatggttttcacgcaaagatatctttattattttgaagaaaggtgatgagcgcgctttcctatttacaatctaactcggggcctattacagcagttttagtaggatcagaaggatctagaggaattttcttggtcttggcttcgctttctccactctttgagatcttggttgaaggcacttctccttcacttgccatggttgcagccagtcggatgtcttctcgggcgatcgcgatctcgcgggtttgggccatctcgcagctttccttgtcgcatgtgacggcttgtttgatgtcgctccgtagggatatgactcctcgaggacaaggcatcttcatcatcatgtaggtgtagtgcggaacggccataaatttggcaaacgccgggcgcccgggtatggcatgatacgctgtctcgaagtcagcaacctcgaagcagacgttctctgtgcggaagttctcccgagtaccaaaggtgaccggaagagtaatctggccgagtcgcgtggcggatagccctgggatgactccgtggaagggcgcattactcggcttcaactcggtgcgagggatctgcatgtgatgtgaccatggctactatggatacaaccattgctcacatcatggatgaacaagatgatatcaagatcaagtcctccaagtgctggaatcagattcagccacctgctacactgctgacttcaaatggccgccgaatctgcatacgacctccgtttttggcccatgagtacttgatggaaagctctcggagtcctctttccaacggatctagcatcatcgccaaattccatccaagtcatccatagatgaagaaacaaggtgctgcgtcacctgtcatgagcctgtgggcttgtaacttcatttgggacccggcccaggtggggcccatgtggggtgcgccccaagctggtggagcacgaccctaggcacccctaggtcgtcctcccacccctatatatagctagttaccccttcagggtttctcgggttttgatagattaaagtttagccattgctacttgcttgcagcgcgcgtgtcggctagaccgtccgtctgcttgttcttcggaaccccaacatatcatttgtattaaattcctatttgcaatatcagattgcttttatcttgttcttgcttgtttcttcaatttgcttgcaggaatagggttgatctgcaccggcaagatcaacaatccacggagaggtgtatcgatcgctaaggcgcaacacaatgtctcgtatggttgtagtcggatcgtcaacgtttctcccaaatcgtagttatcataactcaccgaaagatcgggccaacaacagccttgagtgtcgagaggaactcaaggttcatcaggtggtatcagagctttcattgctcggtgagttttaatctacccataactagaaaattgccatgaaaaaattgtgccattgcattgtttttatcagtttttgctttgttgagttttgtgttacatcgtcgagtcgagttgctggtgttagcgtctagttcgtttacagatacagtcgtcgtcacctccgtgtatctgttgtcgtcgggacctacgaaaacggaatcggctcgctgccacgattctatttttgtagttttcaaaagtttttaccggttggtttttgcagttgttgagttgcatcttgggtttgctgaccgccgtgcttctgttttggccgtgcctgtgtcgtgcacgagaggaggaaggtgaattaccatatctgattttggaagtagtcaagtttgttttggaaagatatagtagattggattgattaaaaatcagtttcctttttatcccatacaccaaattcggctgccatccactccacctcctggccgactcccactcgcccctttggccgagtccgactccctccctccctttcacagttccgagttttgtgaaacaccttggtgaatttttatttggtgtcggtttcgagatctatttggaaaaacagaaccggcataaattcagcattccatttttgtataattttaattttgggtttagacttttacatttgtgtccctataatttttatatttacgtttgagtccctgtagcgttacattgacgtccttgaatctgtttttgtaaaaaaaatcaaaaaaaaagaaagaaaaaaaaaggcagaaaggtgcaaaaaaaaaaagcaaagaaaagccgcaccctaaaaaaaagaaaagaaaaggaaaggaaaaaaagaaagaagaaagaaagaaaagagaaaatattgttatgtttgagctgaacttcatatatgagagttgtgcatgagttgttcctagtgctatcttatcgtattgtttgtgtctaggctcgcgtctctagtacgttctagcctaggaccagcacgatacttgactttgaaccattattcaactttgcattctctgatttgaaccattgctttcctttgctacatattttaagcctacccagagctctacagatttgattgtagccgtacagcaagtgcttgccaaggcatcgatacatccaacctccattggggtgcttggttgagtcggtgtatgtcaccttttcgcttgcattggtaagaacttgtaagagcttggttaaaagcttgagtgtgtttgatatttgagctgccactacttagtagttgataggagcgtgcatatatttgtgtatgtttcttgtttgctactaaccatggcaggattgcgaaaggggaaacgagatggtcatgctcaacatcgacttcttcaccatcaacgagatatattgtcttcttcacgctttgcatacaaggtacatgataacgatcttgcaagtgtagaatctaatttgcctgtttttgatggtaattatgattccgccgctaatgttaattgggagctagcagtagacaaacaatttgatgagtatgatttctctaatgctcaaatgattaaggctgctagtaataagtgtactggttctgcatcttcttggtggtatactgttggcaataagcttgaaacttgggatgaatgcaaaacaatgatgagaaaaaattttgtgttttcatattataaacgtactctccttgagaaattagaacatctaaaacaaggtgacaaaaccgtgcgggagtactttcatgactttaaaatttgtatcacttatagtggtttaaaagaaagcaatgagaacacaatgactagattttttagagggcttaattctgatattcagactgggcttattaatgtgacatataatcatataggccatttgttgacgattgcttgcagtgttgagagcaatattttaaagaacccaagggagaaataagctatgcttgtgcctcctattactgacactttgcagggagctcagaacattcaccatgaggagaagagcaatatgctcgagatgtcatctccatcactcacgaaggaagaagagaagactgatgcacctacattatctgaagagggcataaaaggtaaattaaatggtgctggtattactcaaggtgagtgtgcttctgatgagtcacatttgtccactatccatgctaatctagagcaaattttggtggaaactacttctgatttgcctttgtcacaagttgatttacttgctgttccttgtgataaagaagagttgtgtgataatgcttcacttatatccctaccacaactagtgaatgaacatgctatttctagtgtttctttgtgtgccgattttaagcatgttgttcacattgctaatgatgtacaggaacgtgaattgctatcttctttaaatattttgggctatgttcagtttgatgatttttgtgagctcgataatttgaagaagaaattatttgctaagtctgatttgccttgtccaactagtgctatttttcatatatttggtgaatctgatgatagaggaatatatttggtgcatagagtttacatatgttcagattttgaacctcctatacatatggataaaacatgcaagctagagagaaatgttattgctaacaaaattatcttgagtttgtcttgttttgatttgatgaaacaggttgttttaaatcgaccacgcgttgagcaccatatggaaaaaccgaggacggttttccgtgaagaaggggaggatgatgtgaccatggctactatggatacaaccattgctcacatcatggatgaacaagatgatatcaagatcaagtcctccaagtgctggaatcagattcggccacctgctacactgctgacttcaaatggccgctgaatctgcatacgacctccgttttcggcccatgagtacttgatggaaagctctcggagtcctctttccaacggatctggcatcatcgccaaattccatccaagtcatccacagatgaagaaacaaggtgctgcgtcacctgtcatgagcctgtgggcttgtaacttcatttgggaccccgacccaggtggggcccatgtggggtgcgccctaagctggtggagcacgaccctaggcacccctaggtcatcctcccacccctatatatagctagttaccccttcagggtttctccggttttgatagattaaagtttagccattgctacttgcttgcagcgcgcgtgtcggctagaccgtctgtctgcttgttcttcggaaccccaacttatcatttgtaataaattcctatttgcaatatcatattgcttttatcttgttcttgcttgtttcttcaatttgcttgcaggaatagggttgatctgcaccggcaagatcaacaatccacggagaggtgtatcgatcgctaaggcgcaacacaacggcttgtacagttgtagtcggatcgtcaacgtttctcccaaatcgtagttatcacaactcaccgaaagatcgggccaacaataaccttgagtgttgagaggaactcagggttcatcagcatgtcgtccagggtcttgtcgaagaggatattgagtgcgctgccgccatcgatgagggatctgcgaagcttgacattgcgaaccactgggtctagtaccagggggtacccccccgggtggaccactcggtctggacgatccgagcggtcaaacttgattgttgtctctgaccaccgaagatattggggcgtatcgggctgaacagcgttgatctcccattcagtcagcttttgctttcttttagactcgtaagccagagggccaccaaagatgtgattgagttccttgcgatggtcttgaaaacctgtcgaggcatcatcattatcatccttctttttcgacgtgctttgatctccatcggaggtcttccgtgcattcttggcatattgctccgcaaactgtttgtagacgaagcaatctttagctgtatgattggagttgggatgatgcggacattgggagttcatgatcttgtcaaaagtgttgacgcgcgaacgttgtcgggaggtgtgtgtagtagtcgcaccaagttcctcgggcttactcttgcggtccttgtgattgttacttccaccccctcccatagtcggcgcatctttctttggcttccaggtgggacccgactgcttggatgcgataatggcgtcttcggctttggcatactcgttggctttttcaaacatctgtttgaccgtcttgggaggcttgcgcccgaacttaccgactagatcttcgtgacgaatccccttggtgaaagcagcgatgatgacatcgtcggtaatgtcagagatcttgttgcgttgttcagagaagcgtcagatgtaatctcgaagggattctccagacttctgaatgacgttgtagagatcaaactgtgtgccagggcgttcaaaggtgccctggaagttggcgatgaagtggtcatgaagttccgcccatgatccgattgtgccacagggtaaccaatgaagccaggaccgggcagaatccgctagggccacaggtaagtagtttgccatggccttgctgtctcctcctgctgcgcggattgcgagaccgtagacggtaagccaagactccggattagtggtgccgtcatacttcttgattccagtcggcttgaagccgggctggccaatccactcgacgcaggtcgttagtaaaggcagctactccatccacgtcgtcgtcgtagcgatccggtgaatggcgatgggcatggcctcgtgctgcatggcgctggttgattgtatcacgaagatcgacagggcgcctacaaggtggggagcgaggctgttcaactcggcgctccctgtgtcgcttaggaggcgagtgaaccgatcgctcgttgtggcccctgctcctgcgattggatcctgcgccggcgatgctgaggcttggctggtgataatcttgagatcgaagatgggggacccggctgccagtcggcgtgcggacgcttctggagttaaccgggaccgaggcagcaatcatggtcttggtctggttcaagatgttgacgacgtggtcagcttggttgagtgcgtcttccttgaggatggtgtcgaggagggtgatcgccgcaacagcgttctgttgagggctacagaagaccgccgtcccctcaacgtcttgctgcccgatgagatctcgcgctcgtcgccctgcgtccaaggctcgttgtcgtcggtcctcggcctcctttgtagcccgttcgtgttcctgttgctcacactgcagccgttcttgctcttgtgcttggcgctcctcttccagtcggcgtcgctcggcctcctgttgtacgcgtcgtgcttctgtttctcgggcttggcgttgttcttccgtctcgttatcggccatgaagacgtcgaaatagagaggggtgtagttatcttcaaagctttcgtcgaagtcgtcgaggtcgcggttgtcgtagcggtagccgaattcgtcatactctatgatctctgttggtcgtgagtcgacgccgggggagctgaagtagctttccaattgatccgtcgaaaccgtgccgagtggctggagtatgacgctgacttccttggagctaggctggatcggtgttgaagccgaattctgcctaggcctacggggagaagacgtccttttagtgaaggtccactttgcaatccgtccatttgcttcgcgattatgaagtatgtcactgagtgggaacggtgtgaccaccgtgaccaagtgaccttgaaaatagtgggataatttcctgacggtaattaaaacaccatataacaacttttgcacgtgaggatatcatgtcttggagttggccaaaacctcgctgacgaagtaaattggtcgctggactttttggacatggccatcttcttcacgctcgacaaccaggaccgtgctcacaacttgagatgtcgccgacacatacagcaacagcggctcttgcgggtgtggtgaagctaagatcggtggagttgtgagaagtttcttgaagtcttcgaaggatttctaagcttcgggtccccactagaaattgtcgattttctttagcaacttgaaaaagggcatcccctgctcaccgagtcgtgagacaaaccggctgagcgccgccatgcatccagttagcttttggacgtatttctgagaacttggcggtttcatgttgaggatggcattgatattctccgggttggcttatatgcccctatgggacaccataaagccaagcagcttccctaacggtactccgaagattcattttttaggattcaatttcatcctgaaggcgcagatgcttgcaaaggtctcttctagatctgtaatcaaatcatccttttgcttggtcttgacaactacttcatcaatgtaagtctcaacgttgcgaccaatctgagttgaaaaacacctctggatcatgtgttgataagttgctcctgcgttcttcaatccaaaaggtatggtgatgtagcagtaagccccgaaaggcgtgatgaatgaagtcttcaagcagtcgaactcatttaagcggatctgatgataccctgagtagcaatccagaaaactgagtagctcacagccggccgttgagtcaactacctagtcaatgcgaggtaacccgaagggatctttaggacaatatttgttgaggtcagtgtaatcaacacacatacgacattgtcctgtcttcttccgaaccaggactgggtttaccagccagtcgggatgtaggacttccttgatgaagcctgctgctagcagcttggtcaattcctccttgatggcatccttcctatcctatgcaaaacggcggagtcgctgattaatgggtttagcatcttccttaacatgtaaatagtgctcaatcacctccctaggaataccaggcatatcagatggtttccacgcaaaaatatctttattattttgaagaaaggtgatgagcgctttcctatttacaatctaactcggcgcctattacaacagtcttagtgggacagagggatctagagggattttcttggttttggcatcgctttctccgctctttggtaacttgggtgcaggcacttctccttcggttgctgttgatgcagccagtcggatctcctcttgagcgagcgtgatctcgcgtgtttgggccatctcgtagctttccttatcgcagctgacgacctgcttgatgtcgctccgcagagatatgactcctcgaggtcctagaatcttaatcatcatgtaggtatagtgtgggacggccataaacttggctaacgccggccatccgagtatagcaaggtacgctgtctcgaaatcagcaacttcgaagcaaatgttctctgtgcgaaagttctcccgagtgccgaaggtaaccggcaaagtgatctggccgagcggagtagaagatagcccggggatgactctgtgaaagggcgcagtactcggcttcagctcggtccaagggatctgcatgtcatccagagtcatggcgaaaaggatattgagtgcgctgccaccatcgatgagagatcgttggagcttgacgttgcgaaccactgggtctagtaccagggggtaccaccccggatggaccactcggtcaggatgaaccgagcggtcaaacttgatagctgtctctgaccaccgaagatgttggggcgtatcgggctaaacagcattgatctcccgttcagtcagcttttgctttcgtttggattcgtaagccaggggcccaccaaagatgtggttgagttcgttacgggagtcttaaaaaccagtcggggcatcgtcttcatcatccttcttcttcgacgtgctttgatctccgtcagtcagcttccgtgcgttcttggcatattgctctgcgaactgtttgtagacgaagcaatctttggccgtgtgattttaattcagatgacgtgggcattgggagttcatgatcttgctgaaggtgttgacgcgtgaacgttgtcgggaggatggtgtagtagttgccacaatttcttcgggcttacgcttgcgatccttgcgattggcacttccactcccccctgtagtcggcgcatctttctttggtttccaggtgctgcccgactgcttggatgcagtgacagcgtcttctgctttggcgtactcattggccttttcaaacatttgcttgactgtcttgagaggcttgtgtccaaacttgccgactaagagttcatggcaaatacccttagtgaaggtggcgatgataatgtcgtcggtgatgtctgagatcttgttacgttgttcagagaaacgtcggatgtaatctcggagagattctccggacttctggataacgttgtaaagatcaaactaggtaccagggcattcaaaagtgccctggaagttggcgatgaagtggtcgcgaagcactgcccaagatcgaatcgtgccatggggtaacccgtgaagccaggaccaggcagagtctgctagggccactggtagataattagccatggctttgctatctcctcctactgcgtgaattgcaaaactgtagacggtgacccaagactcgggatttttcatgccttcgtacttctcgattccagtcggtttgaagctggttggccaatccactcgacgcaagtcacttgtgaaggcaacaactccatccacatcgtcgtcgtaacgatctggtgaatgatgggggatgtggcctctcaccgcacgacgctggttgatagtatcgcgaagatcgacgggacgcctgcgacgtggagagcggggctgttcagcctaacgctccctgtgtcggtcggcaggcgagtgaatagatcgttcaccatggtccctgttcctgcgactagatcccgcgccggcaacgctgaggcttggttgatgatagtcttgagatcgaagaggcggaactcggctgccagtcggcgtacggacacttgaggcgttgactgggaccgaggcggcgatcatggtcttggtctggtttaagatgttgacgacgtgattgggtgcgtcttccttaagtagagtgtcaagaagggtgatcgctgctatcgcgttctgctgcggggtgtgaaaaaccgccgtcccttcaacgtcttgttgtctgataagttctcgtgctcgtcgcccagcctccacggcgcactgttgccggtcctcagcctccttcacggctcgttcacgctcctgttgctcacgctgcagccggtctcgctcttgtgcttgacgctcctcctccagtcggcgacgctcggcttcttgtcgcgtgcgcagttcttctgtttctcgggcttgacgctgttcttccgtctcgttgtcagccatgaaaacgccgaagaagagaggcgtgtagctgttttcgtagccttcttcgaagtcgtcgaggttgttctagtcgtagtggtagccgaagtcgtcgtactcgaggatctccgtcggtcgagaatcaacaccaggggagctgaggtagccatccaattcttccgtcgaaactgtcccaagaggttggagtatgacgccgacatccctggagcaagactggattggggccgaggccggatcccgtctaggcctacagggagaagacgcccttgtggtgaagacagcagccaaatcgtcggggaggttcatcaggattgagggataggccccatcgtcttgatcaagtcgtgtcggagtagattgaatctcgtccgagtggtttgaagccgactcggttgagatgatcttggagtagatctcggccgagttcgggataccgaacggggcggagacctggcctctccctgactggttcgaatctgagtcgaggagagaaatcttgccgaagtcgttggtgatgaagtcgaggttgcccaaccggaatgcctgcccgggagggaagacgaagtcattgatatcggagacgaaacccatcgcactagtcagcgatgaacttgacgctacccctacctggtgcgccaactgtcgaaacaagatttcggcaatactaaaagggggtggctatcaagatggaaaagtggatgggtttagagacaaagaattttatacaggttcaggccttcttaataagatgtaataccctactcctgtccggggattgatccgccgagtgtattattgatcgtatgatctgggagaaaaatcgtgtcccaagaggcacccggacccctccttatataggggaaggggtccgtattacaaagtacaacccatatctctaacggaataggtagttacagataagatacaatcgtaacctactagaatcccgggtgcttccttgatatacaagtttagacatttaacccgaaaccttttaaagatattctatctatacatagtacccccatactaagtcgaatatacatgccgtgtgggtatggggtatccataatatccacatataaatcaagaaatccaaaaatagaaactctaactcttatccaccgccgtcttcgctcccgtgcctaggaaccgtcgttgtttctacggtagtgctcggagcacgtgatcaccaccgctccaaaggctgccatggtcgttagtggtcactccctttccgagcggccgcggatccaccacttccgagctggaggaacacggcggctgatatgccattcttgaaactgctgcttactcaaggccgccgtcgtcgtccccgcagttccggtggcaaaccacccctccctagggcagcaatgccggatccgccgctcttgaggatatcgttgtcatcctagttgtcgccattgtcatcacatcttctcgtagcgctagatccgatgcctccactgccattagatcgagccatcgtggagctgccactgccggatcatcacatcggggatccaacgatggcggatccactcgtcaagcagccagcgccggtcctatcaccgccctctcctaccacatgttcctcctgaggcctctggtggctggttgtcgaggagtggtgagataaagggaggagacgaaatgagaggagatgaggaaggagagactaaggagaggaaaataaaggagactgtgagaaaaaaggggaagaacatgagagaaaaggagaggaagagatggatttgtggccacatacgaatgcagtctctggcttcttagcaggaccatatgtgaaaattgattttcctaatatgtcgttactggatactgtatccattatagcctgtttgtaaaaataaatgaggcatctaagaaaaaaatcatttttagtaatgcgcccagcaggttgagcactcttaaacacatgtatccctctatttcaaaataaaggaccagaattccattaattactataaaagttatattggtgggtgatagataagggtatttaagggttaaaatttctcaaactgtggatcgatagtaagtaagaatataggtgttgaagcccgaactcctctagtggagagaaaggacacccctttcggtttcgaccaaggtacttgtgtcatagtaagggcttgtttagttgacaaaaaaaaattacccctgcatgttacatccgttatacggacacacatttgaagtattaaacgtagtctaataacaaaataaattatagattataccaagaaactgcgaggcgaatttattaagcctaattaatccaccattagcaaatgtttactgtagcactacattgtcaaatcatggcgtaattaggcttaaaagattcatctcgcaatttcttggtgaactgtgtaattggttttttctacatttaatactctatacatgtgtccaaacatttcacgtgacattgtgaaaaaatttgtttgggaactagacaaaccctaactgttgatgttgcggacagcagaagcaaagtcgggcatacgatgtactgtatcatagtaactgtatcttggagcggatcaggaatgagaactctatttcttgaagtatgatgagctagaactagggccatcaatgatagtggggccagcagctgatggggccacaacttgcaaatgtacaacggatctcgaaaagtttcgtcccgatagtttaaaaatggataataggtcattcagcgtatcattaacaaaataataataacagcaaaataataataacttatatataaaacttttatatatgtattttagtgacttaaaataccaatactgaaaaataaacttcgatgaacaaacttcaaatattatatttaagttttaaaatttaaattttagcggcgactaatgctgtatggagaaaacgatggggcctttcttctccagaaagttttatttttgttgttgaatggccgaattgttacaaaatagttcggaacagaacaatatatttttgtaggaaaaatacacagggaatgtgcaaaatttactaaacagacaatatgtttccgttgaacaaaggtagtttgttaactttttttctaagagaaacattagtgtgccgtcggtgtgttttgaccacagaaactgaatgaaatatttagttcgataactgcagcgtataatcgattttggtgggacccacaaaaataaatctcaatcccacctctatccactcctctcctctcgcgaccagccggaaaattccgcatgcgcacgttctcgttttccctcgttccccttcctttgccctctccctgcccaaacattccaaagctccaatccggtgataatctctccctgcccaaacattccaaagctccaatccggtgataatctagaaattaacccatggaggagagcagatcaggtcaaccagctatggatccaactagatcggatccttcgcggtgctcgtgtggctcgtgctcgtgctcatgtgggctgttgcacatgatgccatggaatcagtatgccgccgcatacggcgccgctgcaagctggctccagcggttgtgttggcgagtttgcttctcgttggcacggtcgtgcatcaacgaggtcatggagcgcaggtaggaaatggcaccctgggggatgcgtattgagggcctcaacaaacaacaccttgatccactaccaccgtcggttaaaactaattttgagtattataggagataagctcccgagtcccaccagtgctataaatagaagaaccgtagagaggagtgaatgctctaatctctcgccaaaccctaaagccgtgacgctatctcagccaacggcgtgaagaaggaaagcaaagccgaaggaagaagaagaaaaggcaagaagaaaaacagaggaatcaatttcaatggcttctagtgcaggtcagtagattaatttgtaattcgagtaaatgtaattgcttataagctaaagtaataagatcctgtaatttagaactccaacattgtggtatcagagctgatcttttacctaatccatccttcataatctcatcatccctgcctaagccatatttgcctttattttaaaccgagaagtggttcagcttgatgaatctttaagtgatatgagtccaattaaggttttaagctctactgttgttgcattctaattttattttgtcgagcagtagaggaaagatggaaggaggggataaactagattgaaattcctcaaaaccgtgtcactaaatttgtggagactagacacgctatcttcttagaaaataataaagtagggaactcaaaagataaggagagtaatcttgaagaaatccgggctaatgctccaatactggaaatccgagagactaatattccaatttttcaagctgtgccacagaatgtagtgccgccaacaacgggtaattctagaccctcttgctctaaaactactgtcggagggtaaactccttgagcggggcactgtggggacccccttccttgttcgaaccagggacacgggtgaggctttgagagtcgatgttggaagatgcagaggggtcgggcccctcgggaatgatggagacacaagcgatttagacaggtttggaccgctgtagaagtgtaataccctactcctgtatgtggttgattctggtgggagaatacaaatgctttctttctctgagttgcgacccccccccttcactcaggcatagacctccttttatatcttaagggattaccacaaaggcccaagacctagcttcaagggaaaggaaaacattctttacaggtaattaatgggtgtcttgtcctcccgacgtgtgaagccacgtgagcctcaccgcagcatcggccccatcccatcacgccgagcgtcacgggcggacgcacatgtcattccttcttaattgttgtcgactttcgactgtccggccccacaattgggaggggatctctcaaacggaccagtttgggaaaagctggtgcgagtccaaatgagaggcatgaagccccacattaatggtgacaagacgggggaggcgcaagccacgccctctgctagccgccgtcacatttgtcattccggttgcaagtggcccattagtgtgccgcagctgacaagacctctttaaatgcggtaggctggcgcggggagcacccgcccaggccacatatgtgaaacagagcgtggagggggtcagggtggcccgacacctagaaagaatgggaggtagccgccgctccaactccgggcccgacccccgaggggggcgccacgtgggcttggggcggccttctccctctatacagggtaccccggtttggcccgggcggtgtcgtggtagctggaggtgcgcggcaacggattagacacgtatggacgatgtacaaaatcgaatacatggaatccttgcttcttttttttattataggtactataaagatagattatagataaaggtaaaatattaaaaaaccaactcaaatatggataacgtaccaaaaatttggtggaaacagcttcaatttttataatagtagatagataggatgtatgcaacgtttttgtggtgttcagataatatagggtgctcttgtggtgttcatattggcatttgagaaaagtgggcctgaaggactgatctgggggagcaatttggatggaaaatttaggcgcactatacgtggtggtcggaaaaaaaatcacgcctactacggggacgatgtaagaaatttttttttggcaaaaacatgttaaatttttataatagataaagaatagacttgatttactcagcctatgatcatgatttttctatccgagtaaagcaatattgatttacttggattctatataaaaaaaataggaacgacatatatattacctgaagctagaaactaaagtttgcgtgtgccttatctttagctcttttttttctctgattggtgcggggacggagtcggataaccgaaaaaaaatcgtgcactgtacggagacgaagtcagataaaaaaatacgctactttgcatgacgtacgaaatctagtggcaaaaataccttgaatttttataatagatattacctgaagctagcaactaaagtttgcgtgtgccttatctttatctctttttttttctctaattggtgcggggacggagtcggataaccgaaaaaaaatcgtgcactgtacggagacggagtcggataaaaaagagtcgtataaaaaaatacactactgtgcatgacgtacgaaatcagtggcaaaaacaccttgaatttttatataactaaaaaaatacctgtacgttgcaacgggtaaagatg

SEQ ID NO: 6062 - DNA, 13159 bp, Oryza sativa
cacaaccgcactagcagctcctataaaccatcattccaactagttcatactactacggcctcccaatgcaatgttagacattaaacaacttaataagctaaggccgtcccattcctagcacatgtggttgcacagtatacttagatggtgacacaaagttcggtccttaattgactagggcgagcactccccctatcggtatgcaactagcaccatatgcataccacttgccgcccaagtctaaaatcacacttttacacattttaattcacaaatatcagagatattcacctctgtccagcagtgaaaatactccccaaattctcatttaaaaagtgatcatgaagttatttagcaactactaggcatggccaagcgtaaggcttttatgtaagcatgtataaacccaattgagcactttgaaagtactctaaccatttctaaggttacaatcagtgaggatcacaattattcaaagaagtaaatgcagcaattaggtcatagctaccataaccaagtttcaaataccgttatagtctaaattcacatgcaactttgcaaacaaatattttcaatcctcaaaacatgggattcaatgtgatcaaatattgggaggataaaacttgccttgttcctgggaaatgttagcacctaattcacttcttcaccatttacgcaattatctatataaagtacacgttatgcaattaaacaccaaaataggtaaaaacccaaaaggctctaaaatgcatgatttgtgcaccgtgggtaggtactggtctaagatgaatttaggtgaaagaatttctattttatctctttttatttgtcagttatgagttttagaagtttgctcggtatagggtggtatttacttaggtagtgttatgaaatatttttgcaaagtgatttttattaggtttgatttctcaggggtgtagagatgtgttttcaaagataatacatttggtttcataacttttagagttattatgaatttcttatgtattttacaagttttaacgtgttgtaggtaggtagcttctatgtgtacatggttttggagttttatgtccagtacatgtttcatattgtttgtgatgtataaaatgactaattttatcaaccaatataatcttagttcacaattttagagattatattactctactacacattttataagctaggggagtgttctatgttagttactgaacataccaacctagaaattgatatatgagctaagtgtgctaagtttttggtggttagggatggaactatgacctctctggtccatcaagttttattttggttacttagagctagagtacatttatatatacatttatacatatgtattgcctaaccaataccatgtgattagcacttatgttatctatttaaagtttagtgacatatttagtatagaaggtgccacattttaatttaactaattaaagttcattacttgctggttctgaagaaacttggttcattccatttggactaaagatgaattctctacaaattttagaagttgaagggtgctctaagttgtttattccttatataaatatttaggggcttttattgcactgtaagtatatatttttattatatatctttgaagtgctaaacttggttattctgcggaacttgagtttactcaaaaaggaagtaagatgaattttatataaatttttaaagttcagcttatctaaaactagttattttgtagaatatacatttagaggtatttggtgtaaagcaagtgcatctttttattttattttaccttagagagtaagttggtgaatctgtggaagttgagtttgcttcaatttaagttgaaatgaattctctatgcattttgtaaatttgtgcatgctttatgtgtagtttttcttagataaattttagaggtgaaatttatactgcaagtgccaagttttatgtttccatattaaagctcatccttctatgagttcacagaaacttgaatcatctcaaaatgagctatatttcactttgtatgaattttacaagtttgcatgtttttctgttgaaaatataaagctctagaggattttctttagattttcagatttttaagctcatggggtccacctgtcagtgagataccaatatgcaaaaagatctctgggttttcaggcaatcaatccgcagtcctatgactgttgcattgtgtggcagtttttacaaagtagtacctacagttttgtttcttctccacagaggtccctggttcgagctgaaacagagctagccatggctgagctcgttctcgagctttctggcggtgaacggtggcagatctcggcatgaaaccaaaagagaaaaggaagaggggttctttgcgaagctaatggtagtcttatcgtgatctgtggttaccggaatcaatggcgacggcggcacgagtggcggtgggtctcggggtagtgatgcatgtcacgttagaggccggatctaggtggataaaatgcatgcatgcaactctagaagctccagggtgctcacagtagtattggacgaggttggccaagcttggtcgtcgacgacggcgttcggaacggctcggcgacggcgctccttctccatgaacggcgtcggcttgactcactacaagaactgccatgcatgcgtgtctctcatgttatagtggtcgtaggaaatctatgtgtgcatggaatcgacttggagctcaccggagaaggaggaatcaaagatggagctcggcggccggagttggagaagaatagctcgatatctctcctcggtgctcggatcttggggattcttgagggcatttggagaggacctcgaggggaagattttggcgcgacggctcggccggattcgctccacagcagccgggacagcgacgaggtcgtggcggcggcgctccgggcgcgctctgaagctcccgtgggcacgatggcgttcccgtcgctgcagtggatgaaatgagatggtgtcaaaaggaaacttgttcggcatgaagattagaatacggaacgggaaagagttagagttggcaaagtcttgacgatgtgttgcggcgtccttcttcctggcggccggcaacgaagaggagagggaagacgatagctggagctctccctctcggtttctttggctcacgggtggtgagtgatgtgtggagatgcaactgggaggaggagaaagctagagatgcagaactgggcgtcctcacgtctcggccacgcgtcgaccggcgcccagagcgtgtcccctcttctctctcgtgttcttggtcggttggagaggagagacagaggaagggagcctgccaagtgggtccagggcgaagggaacaagtctggagtgagagaggtgggtaggagattgggtgttaatcgattttggacgattttcaggatttgaatctctctcctctctttgttaatctatagtttaatttttgggcatgataaattcatgtggatttttctagaggtagatgaggatacctagtttccattttcttttgtttctcttaaaaagtttatgtggtttgctctcagaaaattcgagaagatgggctcggtagatcattgtttgaatttttaggagatttaaacagagtagataaattctggaaaaattctatttattcatgataaataacctagtatttgaataaattatttcccctatacacttttatgcagtttaatgcacattatggtgagggtatgttttagccgattaaggattataattagtctatcatttaattgatttgactgatttatttgaggtatcatcctaagtgttaaaatttgaataaaattacagtgaattgtatgtgttgagtagagactacatgaattttcccatgattttaccttgcacgaattattttcaataattcgcaagcatttatttatataagtgttctcactatataaatgcatctaaatgtttgtaaaaacttatattaggaattgacttgaactgagttgttattatttgacttcactttcatgtccttgtaattatgtcacaagaatgaccatgggtttgtctagtagtgttgtccttttattcatgttcatgaacccaacatgatatgcaaccaaaatccaaatgcacataaaagacacaaatcaaactaatgctaaatgcatatgcatgtacacatttttgtttgcatttttgtcctaggctgaaaatggaaaggatttaatttgttctcaaatttttacttaagtacaagttaagttgacctcacctaggttaaagtagcaatttttggctcccaaaattggaaatgttagtttctaattattttgataagaaaattttaagacctagaattctggtatgtcacagttggtgtcatcggctcgtcccctaaacacgagagcgcgaaggttgcaggcataatgtttgcaccaacagtaagattataaagatttttcaccatggacctctctcacgagtcaaggaatggttaaggacggggagctaatccgaattgcttcactcatgatggtagtcagatgaggctggatccattggaaagaggactccgagagctttacatcaagtactcacggaccgaaaatggagttcatatgcatatttggctgccgttcgaagtcaacaatgtagtaggaagccgaataagattgcagcatgtcacaccctaaaaatcctaaatatataaattgttgtttaactggaattattaaaatttattttaaaagtctagaaaagaagatctaattttaaataataaattccaatataaaatagggctagataaaatttcattaaatactttacttaattctataattcctagatttttctgggatttatttgagctaaggaagtatttttaataaatagaattgcatttcatgaataatttaaattgaaaaaggtttttaaaatcctcttttggctttgggccgaaagtcggcccaaaaccttctctctctctctccctcggcccagtcggcccagtcagcccacagccgcccgcgcgagcgccctcggccgctgacaggtgggtcccacctatcggactcgtcgtcctcctcgcgccatcgcccggccggaaccctagccgagccacgccgccatctccttccaaattcgctcgcgcctttccttctccggtgaaatcaattgaggggaaatgtttcctgagatctcctctaccttttctctcttggaatcgtcggctaaatcgtttggaaatccgtggattcgagttcgattcggatcgatctctctcctccgaaccctaaaatttccttcgcgtcgccggtcaccgtgggccttcgccgccgcctccttgcccctataaaaggacccccaagcccgccgctacctgccgccaccctcgccttcgcctctcgccacccgtagcgccctagccccgtgtagcctagcgccgccgtcgtcgccgttcgtccagccgtgcgccgccgccgatcccgtcgtcgtcgtcgctcgagaaagtcaccgtcgtggtcgccgtcgcgtcgccgtcctcgtcctcgggaaagctattaatattttgagtgcaaaaaataataagtgtgagaagatctatagaaaacaggagtttatcattgaatctcttaattctgaaattgctagattaaaatctcttattcctaatgatgatgattgctcaaactgtgaggttttaatgaatgagatttcaaaaattagaaatctcattcattaatttttttttcaaaaattagagatgtaaaggcactatgtttagccacgtcatcaaaatagtttgaaccctctagaaagatggcgactctcttctctggcgacatccatggcgactctctctagaagatggtcatgccggcgccgcctactggatgggatttctccccggaggattccatccgcgatgaagtttggagccgttttggttcaccagtgcacttttcctctcattttagccgttctccgtttcgattagtggttgatgttcctcgttcttcgtttcgattgaccttgtcctcggtggtgaaaaacgtccggttttcatgtttaggggggtaattcatactcacccaatagttcaggggggtaattcgtactttttccttttccccctgaagaagaccttccccctgctggtccaaataatgatgaaaatcctgatggtaatgatgatgatgattgtaagcaagataatatttggcaatttggcccacatcctgtggttcttgcagaagaagaccaggcttggaatcaggctgctgtgggccatcaggccatggaccttgaacaagctgctcctgagaacatgggccagattgataacaaccatggctggaatctggttactaacagaagtttaattttcacccttgctgatgcttacaaagatgccttcaattcctggtctgccaactctctcgcaaattcagcccttaatcctacaaagcttaattttaatttgggaaatgaaattgtgccatatgattctatttcttttgaatcttctgctataatcctgagcccagaacctctagctgtcatccctccgcagtctgtgatgcctgttttgcctgaggatccttttggctcaatggaggaacattcttgtccttctactccaacaggcatggaaatagagattagtcttccaccttcccctaggaaaagagggaagaagagaacaccttttgttgactctcaagttagaaggagtggtagacttctggctcttagggatagtttcaagaatactctgcaagaggatccaaacatgggtgttggaaagccaagagggaaggcagttaaaaagctgaaacagttggctgaggcaagtggaattgttttcccatctgattctttatcttctactgatttaaatcctgatatatcttgtgagtctgaaagtgatcttacatctgttatacctgctgattgtgatatatcttttctccagaagattggatctaagatgtgtgggacttcccttgaggaggtttcaagcttggtggacttgggagaagctcaggtcatcaagccgaaagcaattggaccatccaatgatgaagcctagttctatcagacttttagggctgctagtggcactcttttggggcatgtgtttattcctttatcagcccttttattttgtgtttaagttatgtaaactctatgatggtactatgtgttggtgtgcttgggaactgcatggattattcctgcttgttatctttctctctttaagactagttgtcaaatgaattcggctatgagaaattggaatgtcctctgttggaatgttaggggtctgaattctgatgacaaatggttagccattagaaataaaattgaggaaagtggttgtgctgttttttgccttcaggaaacaaaaagatcttcttttgatcattcttacataaagaagtttgctcccaaacgttttgataagtttgctttctttccatctgttggagcttctggtggcattttagttggctagaacagttcagtttttgggggatcagatattataattgaaaggtttgctgttaagattactttcacctcaaatcattctggtttagtttggactttagtttcagtttacggtccctgcactgctcctgaaagagataacttcctgtcctggctccaccagttgaacattcttgatgatgacctctggctcatcttggagactttatcttctatagatcagttacaaatagaaataggccgggtgcagacatgaatgatattttcctgtttaatgcaatgatcagtgatctgggtctagttgagctgcccctcaagggaagggctttcacttggagtaacatgcagcatagtcctctactagagcaattggattggttttttacctctactgtttggaccttaaccttcccccataccttagtaaagccacttgctcggtctacttcagatcacacaccttgtgttgtgcaaattggaactgacatccccaaggctgacatcttcagatttgaaaatttttgggtagagcataatggtttctttgatttagttcaatccatttggcaaaatcatgggtatgaaggtaatgtagccaagaatatttttgttaaattgaaggctttgaggaaaggtttgaagaagtggagtaaatctctctctaaacttcaattgttgattaaaaattgtaatgctatcatagcttttttggactccattgaaaacttgagagatctcactgttcttgaatggaactttaaaattcttatcagaaacaagctactgttatacctgaagtataaacaaacttattggcaaaagaggtgtactatcagatgggccaagtttgggggtgagaatacaaaatttttccatgctatggctactgagtcttttagaagaaatgcaataccctctttggtagattcttctggtttagtttgtacaagacatgaggaaaaggctcacatagtgtggagtcctttctcttcaagaatgggttgttctcagtttgagttcatgccttttcagctgcaagaacttttccatgcaaatcaatctctagcttctttggatcaaccctttggtatttctgagttagacaaaattatacataatctgcctatagacagagccccttggcctgatgggtttaatgggatgtttgtgaagaaatgttggccaatcatttgtcaggattattatagacttgcagctgagttctactctagtacactggaccttgatcctttaaaccattcttttatcatcttggttccaaagaaatctgtgccagaaggtataaatgactataggccaatatcactcatgggaatctctcttaagattttaacaaaagtcctggttgatagactgcaaaaggtgatattggagataatcagtcagaatcaatatggattcataaaagggagaactatacaagactgtctagcatggaactttgaattccttcatcagtgccatcactccagaagggaaatagtccttctaaaattggactttgagaaggcttttgacactattgaacatgaagctattttgcttataatggaagccatgggttttagtgctacatggcttggatggataaggaagatcttttcttttgcttcttcttcagttctggtcaatgggatacctggaaaaaatttccactgcaagagaggagtaaggcaaggtgatcctttgtcacctttactctttgttttaggagctgaacttctccaggtcattctatcaaagccttttccatcagactttgacccaaattttcctattgtccaatatgctgatgacaccctgttttatttgaaagctagtagtaaagagctctttactctaaaggctttatggcaaaccttccagctgggaactggtttgaaggtaaattttaataaaacttgtctcatcccaataaatgttgatgaagggaaagctcagaatttagctgcagtttttggctgtcaattgggatctttgccatttacatatttgggtttaccacttggtactattaagccaaaggtaatagattttgcacctttagttgacagaatcgaaagaaggcttacaacaaatgcttcattcttgtcttatggagatagacttacactggttaattcagttttctcttcactacctacttattacatgtgtactttaatgttgccaaagacagtgattgataacattgacagagcaagaagacattgtctttggagaggctctgaggtcaattccaataaaagatcttttgcagcctgggataaagtttgtaagcctaagagaaaaggtggtttaggagtgctaaacgttactatccaaaatcatgctctgctcatcaaatttttggacaagttttacaataagaaagatttgccctgggtcaattttgtttagtctgcctattatggttactctgtccctcatctgacaaacttgaaggactcattctggtggaaagatatttgcaaactgatggatgtctttagaggtattgaaaagtgtaatctgaaaagtggaaatacctgctccttttggtatgatgtatgggatgatcaaccccctctttttcacactatgccaaggctttgttctttttctcaaaaccagaatgcatctgtctctgattttctgtccattgaggctgaagaaaattttacactatctttatctgctcaagcttttcaaaagtttcaagagctcacttcttcccttctagatatcgagctaattaatgaaaatgatgtttggtcttacatttggggaaatatgaaatattcttcacagaaattctatgcactgaatttcagagttattaagccaccagttcattttctatggttatggaagtgcaaagcagtttcaaaagtaaaggttttcgggtggctactcatgatgaatagattaaatactaagttcatgctagatcataagaattgtgctcctccggattgtgatctttcttgtgttctttgtcaatcggcagctgttgaagacctcatgcatctgttctttttatgcccatttgcccaaaattgttggagtcttctaggcattacatgggatactaatctatctttggaagcaatgtttataagggccaaattggattatcaggggagctgtttcatggagaaattcctttatgctacttggcatatatggaagcaaagaaatgggttcatttttgagcaaaagatcctctctttcatcacttggaggcaactcttaaagggtgacctctttcttctgttgtttagaatttctgcgagatatcacaatgtaatcataagttagattaatgggttgtaactttgttcttgttttcttaataaagtttttttaacagcgggggcctcccctgctgtgttctcttcaaaaaaaaatcagagatggtaatgctgcccatgatttcaaaaatagatcttctctagctcttaattttgctttgcacccaggcactttggatgagttgtttttaactaaaaagttgttgcaaaaatatcaaattgcttttcatgctagtttgatgtttaacatgatttgtgctaaaaagttaaaacaaccacatgatgttttggattgctcaacatgtactttgagtaagatgaaactaaaagatgctttaggtcgtgttgagtacatggaagatgttgtgaaaaacaatgaagtgctttcttgccccaagtgtcgtaaaagcaaaggtgtcatggtagattgtgaaaattgtgctaatttggaaaaagaggtttcttatttaaaaaattccttgcaaagattttctgatgctaaaaagaacctcaacatgattttggatcaatctaaggttagcacacataaccgtggtttaggttttaatccttatgctcatcatactagacatcctcctgttgtgttaggtgttggtgctagaagtggtgagattttggttaaacctaatactaataaaactgtgtttaaatctgctggtatcatgtctaccttgagtgcaccttctttaaaatccaatgttgtgcatgcaaaacctcctattgttacttgtgttgctaaatcatctgattctactaatgtgtctaaacatcgtgaaaaatatacttgttcttgttgtggcaaagatggacatattgttggtttttgtttcagattagctcataaacaaaaaaggagagagagagattgcttttgcaaaatcaaagtggcaaaaatctggtttttcctcgaggaaactggtcagaccggctactgagcagcggtcagaccgggcaccggtcagaccggcccccggtcagaccgtcagtaccacctcggtcaaatcggcctcggagaaatttttcagaaaattctcaaatcgtttttgcacgtagatatatgcctattggatcttctggtcgtgtgtctcagtactggattcctaaatttttattatcatctaacccccagtactaaggctttggtggcaaggaaggagaacgtgtggatcgtggatcccggttgttcgcggcacatgaccggtgataaaaattggttctcctccctcaaaaagacatccaaaactgaatcgattatctttggtgatgcgtctacaagtgccgttctggctacaggtttggttaaggtaaatgaaaaatttgaattgaagaatgtagctttggttgaggacttaaagtacaatttgctttcagtttcacaaattgttgatgaagattttgaggttcattttaagaaaactggaagtaaagtttttgattcttgtggtgattctgtgctgaatatttctcgatatggaagagtgtttaaagctgattttgataatcctgtttcacctgtgataacttgtttggttgctaagtttgataaagatgtaatgttttggcatcgtagacttagacatgttggttttggtcatgtcactaggttaagtggtttggatcttgttcatggtttgcctaaacttaagaaagatcttgatttggtttgtacactgtgtcgtcatgctaagatggttgcttcctcacatgctcctattatttctgtgatgacggatacaccaggacagctattacatatggacactgttggtccagctagagtgcaatctgttggggaaagtggtatgtgttggttattgttgacgatttttctcgatattcttgggtttttttcattgcaactaaggacgaagcttttcaacactttcgtggtttgtttcttcgattggatcttgaatttcctagttctttgaaaataattcgaagtgataatggtggtgagtttaaaaatgcttcgtttgaacaattttgcaacgaaagagatcttgaacatgaattttcttctcctcgtgttccacaacaaaacggtgttgttgaaaggaaaaatcgtgtattggttgagatggctagaacgatgttggatgagtataaaactcctagaaaattttgggctgaggcgattaacactgcatgctatatttcaaatcgcgttttcttgagatcaaaacttggaaaaactttgatttggacgtcaacccaaagtttcacatttgcgtgtttttggttgaaagtgctttgtcttgaaatctgaaaatttggataagtttgaggcacgttct

SEQ ID NO: 6063 - DNA, 29387 bp, Oryza sativa
accattttacatttaacctttcattaaacaatttaacaaaagatactcccaccatgtattgtgaaacaaaattccctcattttattagtgtctagttagctttggcatcacagctacacaactatcaaaataggtaagcaacaccttgctaatcacatcatatgtgactcttgtgctgttggggtgacatctccatgtccagcccaacctatgccccaaggtccaaaactgttttgataaccttgtcaagtaaaccaataatctccgcatatagatgtccgacatctatcctattttatcatgataaaaagtgacactttgctatggcaaacccatcacttatgatcacaaccgtaataggtgcaattattggaagagcataaattacagttaatttttctgagggaatctatcctaccatgttatatcaaatatacaacaacaataaagtaagatagatataaaaaccccaagcgaaatctaaggggcaacgcacacggcggtcacgggatacatagatcacatctacgattcgccatgtaaaaaccttaacggcataaacaaattatgccgaaaccgagtcaatctcattggctcatttttctcattggcgtgcggttccagtggacatcggactatctgatgaacacaatcgcgctcggccttgttgagtactagacattccagtgaagtcaccaacacatataccgattgatctcatcaacccatgcgtctgtcggttcatctcatgttccgatcacctaagaactcatatacaacataatagatctcatccactacatccgcatatcaattatatgcaatgatctagatcataagctatacaaggcggctctgataccactgttgggatacgcgtaggctacgatagcataaatcaaaattttctatcgcgtaaaccaggaaccatgcaagtattagatcatagatcgttaccactcgatgcgttgtgcaacggaagaagacgctgagaagtcgaaggaactctcgcgaagtaacgcgcgtcgatgtagaggaagtaatcgatcgcacctactcgaccttctcctcctcgtgcattctcctcgctgtactcccacgctgattagcaccgcaaaccagcggcgcctttaccggtatccacacgtacagagacagaacgccacaacagatattctagcacccgcgcgcggctagggttttgctcgggagggaagtgacggctagggtttctcacgtgatgcaatgcctccgccggtcacacccctcacgaatatataggatccatcactcgggcctccaaggcccgtaggactcctattcggatccctatccgaattaagctcatattggatctctatcaaatccccttattctggcccattaagcgtgtgaccctgtagattcatatatactcgaccgtaacccgaaaactccttttcggtccacgcgtaaacagcggcccctagcagaacgtattgacccaccgggcatacataaagatcatatcggctgaacctctagtgtatacttgtatgaacccttttgcctcacgatatcgattaagctcaatgctagatatatgccatcctctaatagctcaatcattcactcgaacctgttgatagattatataacttgtgattgactcctcaatcacctttggcatggtcatgcccttccataatctacaacatcgaggggcccaaagatatctctccatcttgattattcatatcccactacatgtttcataacatacccgaaaactacttttatagctacccatttacggagtagcgtttagcggtccctaagtaagctactacatatgttgagaaccatgataatctcaagtctaaggattcaacaccaacactaaatgagattactgatgacacaacacatatagctcttgcagtgtctcgtgttgcgtctatccaacaacatgtgcaccaacatgtgtccacattattaatttgatatctctataccatgatccatgagacatgatcatcaattaatacatatgctgatcagataaacatatttgttccacatatgatatttgatcagggatcctttagaaatagtaacaaacaacataaagagtctcatgaaaggatcacatattcattaaccaataaggagttatctatttcaaggaacaatgtcggataaatatgtaaaaatagtatgtgatacaatcatctctatgattgcctctagggcatatcactaacatatattgtgattagaaacaatggaggggacatggagacacttggagaaggacgtagagccatggaggatcatcgaggacgtccaactcaaggtggaggctcaaactaattcgacctcgggttcaattcggagtccaggaccagtctgcacgaaaacgggcgcccaggtcgcatacgtgctcggattggggtgttctttatatggatggaaagctaagaagataacctttccaatggttctagtcccacatccaaattctttccgagtcaatgggaatcgatcgaacaaattgacatccagaatctgtcctggtgctgcatcaccgtatttgggcttttgggccatgtatcgtgttggaacccattagggttgcgtcgagagggggttgcacgaccctaaactctatatataagtaccaccgccatctttaggtctttgggttttgcttagattaatctgtcaagaacagtttcgccgctagatcggtttgtaagaccacaactcgtgagcttaattattcatctgcaattttggttgttttctatctcgttcttgtttgtcttcttcgattggcaaacagggattagccttctcagcgagatcatccctgtttcgacacgggtgataactagaggagacgtggtgttgcgattgcggggctcaagagcgtgcgcgttcaagaaaccggatcgatttgtgtcgcgactccgcccaaatcgttgtttatcagaacctttcagaagatcgggaaccctagtgcacaacccaatcagactcgcgagcatctgatgcaggcgggttcaaaggggaggcggcagcatcccgggctcagtcgactgtcctgaggttgaagaagaacagtgccgagggaagcattgtagacttttagagaaaaggaaaaagaaaagaaaagaaaagaaaggaatggagtagcaggctggcatggctagcagcccgagagaggctttatgggccaaaaatgaccaacggcctagagaaaggttttaaaacttttccttctttgaataatccgtgaaatgctatttcattgattaaaaatacttcccttgctcaaataattcctagaaaaatctagaaaatagataatcaaacaaagtatttaatgaaattttatctaactcagttttatgttgcgatttttcctagattattagagtttaacttgtaagcttttaaaataatttctaaaaatgcattaaagaatgaattattaaattaggtgatttttcgggcgtgacaatcaccatctccgatactcagattaccaaatttggttgttaacagtggttttactagcgtcttccaataacgattcctaggcattgttgttttcttctctaggaaattctgcatgaatttcaccaggctgtccgtcttgggtggctccacttcgacctcttgaatattctgtgggttcggcccgtactttattctgaccatggagcattgttccgtcctcggttgaaactcaaacttctcttccttgccgatgatgtggaaacggatacttcctgttcccacgttaatgttggctcccgcggtgctaaggaacgggcatcccaggatgagcggtgtcttttttcccgtgtccatatccagcaccacgaagtcatccgggatgaaaaaatcccgtatcttgactggcacatcttccgctatccctgccgggtaacggactgacgaatgagccagttgaaggtgcattggtgttggtgccaacactgttaagttgagcttgtcgaagatgtcttttggcatgaccctgacactaactccaaggttgcacaatgcctggtcgaactattgtgccccgatcaagcaggtgatcataggacaccccggatctttcttcttgtctgggagcttgtggagtatcaggttgctgcattgttccgtcagcttgaccacctccgttgttgggagcggtctcttgttgttgaatacgtccttgagataactggcgtatgttggcacttgcatggcgtccaacaacggcacgttgatgtggatcttctggattacttcaacaaaacgagtgaattgctcgtccactgacggtttcctactccgttgagggaacagcagcaatcatgtgtcgcagtactcttgcggcactgtcttttttggctgaacttccttgtcagtcgagccattagatggcgcttcttttgatatcccattagttcctacagggttaggatacggcgaatcacgagtggacttacctcccctcgtcatgatcgccttgacattctcaatggaggagtcgggttgccccgaaatcctcccagtttcatttgcagggactaaggatgccaactgagctagctgggtttctatcattttgttaaagctcagctgattttgaaaagcggaagcaaagccatctaacttgacatttatgttttctaggaccttgtcattggctgcaagctttttgcttaacgcatcagtggttttagcttgcgcaaaaacaagatccttcaaggagagctggttagaaaagttaccgttgttgttacctccttgataatatgggcatggttggttccacccctcacctccttgtggacgatacctgttgttgttgttgccaatgtacatcgcctcctcacgggtttccgggcagtcattcccagaatgacccgtgttgccgtagacctcacatgtgatgtgagagtccaaggccttgacggtgccttgtggtcgtttcttgtggtcgtccaatcgcttcatgagaaggtccagcttggcagcaagtaactccgtctccttattggtgtgcatgcctcgctgacgggtctggagtcgttcctcactccaacccatattggagaccatcttctctattaaatcagcggctccttgaaccgttttagagaagaaagcccctccagctgccgcgtccaggtgatcgtgggacatcgagtgagtccattataaaagttctgcaggatcagccagttgtccatcccatgatgaggacaggcgggcacgtactcctgcagacgctcccatgcttctagaatagactcatctcttgtctgttggaaactagaaatccttcgactaagggcattggttttgcctatcgggaagaatttcgagaggaatgccgtagagcatttatcctaggtgttgacagcagcacgattggcatagaaccactgcttcgctctcccaagaagggagaacggaaacaatcgcagcctaacggctttgggactgacgcccttgatggtgtacgtgctacatatctccaggaactgtttttttttactgaaagtactgccagggctttgcccagcagtttaaattttataaaatataaatatgtacaaagttacaaagggaaggcaaaacaaatatgctacaaagtttgtatccaatcagaaagagattgcttgagtggatctttcattctacacatatgtagaagaacttctttaacaaacatagatttccatgattgaagtgatggctgaacagtttgaaagattaatccattcctttgcttccaaatatgtcatgctgccatgaaaaaaacatcaaggaaaccctttcgagcaaatctgattctcgccaagacaagcatttggaaaaactccaagttataattctaggaaatgcccatctgctgctaacaagccacactgaagggacatgtaaaaaacagatggagcctagtctctctttgatgtgtgttgcataaggcacatgtgaggtcatcgtcctcttttgcacaatgtcttctgtcaaagcatgtcccttgtgttgagtctatcacaaaacaagagccatgcaaagacctttatcttcatgacacatttggtcttccacagccaaatcatgggcctgggaggatgtagtgtggagaaattgagcttataaaatcttttcgctgtgtacacatctgaaccccaaatgaaactccaaacatcacctctttctggctgaagctgcagatgatttaactcctctcgtaactgcaagaactctccataagcaacatctgagaggggcaagataaaagaatcttccagtggccgtgagcacatgtcctaaactgaatcatttctgaataaagtcatgttgaagagattagggtagcttgtgcacctaaaatcatcattccataagtcattccaaaatagaacagatttccctgactgaactgtgcacttagctacacctctgaagatatcagatagggaaacattgtctctccaccagaaagaacctttgttcaggaccagatgtggcactctggattcataataggtttgagagatgagcctgaccgatggcaggtcagctccattataaaacttgaccaaatgctttaaaagcaaagcagtgttctgaactctcaagctgatcacacccattcctcccttgtctttgggcatacatactctatcccatgaagctagagattttctagttgaggatggattgttacctctccagagtcaattctttcttgctgtatcaattgccttgatgacagtgactggaagttgcagacagcgcatataatatgttgggatggaggaaagaactgagttgatcaaagttaatcttcccccttgaggcaaaaacatagaacttgctgtcagcctcctttccactctatccaccaatggagcaaaatcaaccactctgggtctagtagtaccaaggggcaatcccaaataagtaaaaggcagggaaccaatggggcatcccaaaataccagccaataatgatgctttgtcctgagatagattcaaaggatataaacttgacttgctaaaatttacctttaggcatgtggactgagcaaacatatttatgatggctttcaaacataagacttccttttgagaggctttaagcagaatgagtgtgtcatcagcatattgaattattgggaacccactaccatcattctcatttattggcttagagatcaaacccaactaaaaagctttattcacaactctttgtaacagctcagctccaagaacaaaaagaagtggtgagagaggatctccttgtcttaccccccctcttgcatttaaaagattttcctggaacactatttagcaagacagcagaagaagcagaagagaacaccattttcacccattctatccatttttcaggaaagcccatgtgttgaagaactgcaagaatagctgagtgctcaatagtatcaaaagctttctgaaaatccagtttcaaaaagaacaatttccctcttagattgctgacattgatggatgtactcaaaagaccaagcaaggcaatctagtattgtctttcctttgataaaaccatactgattctcacttactagcttaaggattatgccttgaagtctgtctgccaatagcttagttaagaacttcagagaaagccccattagagatataggtctataatcattgacagtctctggtgaattcttctttggaaccaaggttatataagagctattcaagattttcaagttagtgcactctgcatgaaaatatgctgctagtctgtaatagtcctgagctattatatgccaacattttttcataaaaaaaccattaaaaccatctgtaccaggggctttatctgtcgggataacagaaacaagactgtcaatttcctgtgtggaaaatatgtccaccaaacattctaggtctgtatgtcttgggaagagtgtactcaagtcaaaaaccattttagggtcccttgcaactcccattctattcttaaaacactgaagaaaaagagaggccttttgctcatgtaaatgcacaaactgcccattttgatcaagaacctgagacgttgtgttgattctatatctctctgttgcaatagactagaaaaatttgtattttcctcaccaagtaacatccatctattagtacacccctttttccaatatatctttctgaattccaataacttgaggatttgcattttcacaatttccctgaaattccattcaaagattgaaagacatcttgtttcttctaccagatccaaaaaatctatcactttgttatagttagtcaaaagtaacaacagctttgacagatttttcctccatgcaagaagccttttccttaacactttcagcttaaaacaaatgcatttagcagggtcttcaaaacctggatctgtgtgcgaaacctgctgaacaatgtcaaaaaatccctccatctccacccaatagttttcaaatctaaaaataggggactttggaatttttgtgtcaatcttcactacacagggcacttgatcagaaatatttctagtaagggggacaactgttgtgtttggaaaatccaaagtccaaggagctgatgtaaagacccaatccaaccttccaaggaggggattatgctgcatgttgctccatgtgaactttctacctttaagtgggatatcaagcaagccaagagagctaataatgtcattaaaaatgaagatatcattcatgtcagcaccagctttgtttctatcatgcacatacctataaaaattgaaatcacccaggaaaagccaattttgttgatcaccaatcactaaattctgaaccaattgacaaaatcagatcgctctgggccacttgagggccataaacacaagtaagggaccaagtttgagcagtatgtctggaagtgaaatcaacagtcacagagagcaaatttacttgaaccacagttccaacaaacattcttaaggaccagaccaccagaattcctcctgatgcaccactagagggtgcaaaagcaaacgaatcaaaccgttttgggacaaacttcttgatatcagagatatcaaaatgttccttttttgtctcctgaatacagaaaacctaacatgcacagttatcaattttttgtcttaaggagagcaatttttgctctgcattcattcccctaatattccagtgcacattccaagacttgtaattactcatgaataaaataggattgaaacaacaaccaaacagagctagtataactagcctataatgtcatagccaacatagtgctaacaactgaatcaatatatgacaaagtctcaaaaccacttgaccaaacacagacccttatagaattaactaaaaagaaacacaggtctgacaaaaactgtcagaacattaaaatcattttccctccatgtcaggcctgggcaccttctttcttcttgcaccccccaggctggattcagctacctcctcaggagctaggctgcacatatccactcccatcttttgcaacaaagagatagaacagtcagatggtgaggaatcagagtgattatcatcaggggcatattcagcaaaatcagactctttaatgttaccatcatcaaggatttttgctatacctgcaagctctttcaatttatttgcaaattttccccttggcttaccaatgcccattataggattcacttgtagttgtacttcctccttgctctgctgcaaccttgcactctgcctcctgtaaggattatagagtaaggtcttgccatctctttttttcactggagccttaggtagcacaggaagagctagtgcttgaccaacaaggctagaggaaggctgaacagacaaaggcatgacttccagcacttccatagcatcttgggcctgggaattcatggtatcatcatcagtcttagtgggaaccagggcccaatcctttatctcttgtcacgtccagaaattcactaataatttccgaacttatttgtgcataaaatcttcgtccaggaaacagccgaggtacacaaactgacaatttaaaatacaaatccatcctaataatagcgttacatacttacaaaagaaaagaaaaaacaacagaggaattaacggcctagcgatggcttcagctccactcccacaggcagctcaactggggtataagctaaacgtcttctccttctggatcctttttcttcaactgaggttgattgattattgcaaggtgagtacatggaatactctgcaagccacacaacaaatatgcaagtgcataaggataccaaaggatggcataatataggttcatttgcaaaaacatcatttagcaagcatttaagagtagtaaaacagtagagtaaataatcatcaattttaatcaacactgcacaacacacccatcctgcacaggcccaaccatcctgaacaaccatacccggctgtacagatctaactccaaaccaggagctaaacaaattattaccagttatagcatcaataattactgtgagaggtgtgagactaatcacgaaaaacattgctcaacccgcccatgaccgcgggcacggctattcgaatagttttactctggccagaggtgtaccactgtacccacaagacacaacctcaacatcatgtctaccatgcatcgcgatactggaaagtacccgaatagaggctgtgacaataccctctacacaacacaactcaccacagtgcaccgttcctggatcataatcaccccctctacaaccagaggcatggactccccagcgacacccatggacttctcgccgcttctcagtctgggaccccataatgaaccgtgctatacaaaaggtaaagccgttgcccacgctggcttgtggttggtacggttaatgtctgacaacagtagctcgcgaaccggtccttaattgtcatgagcacgaccttcaaaaccatgtgctcacaacccaccattgacaagttttaattatcaattaattatcataacatgattaaccatcgtgagctaccattaaatataatcataaataataatgtagtaagattcatcccattaatgagctaatgtttctaagcatggctaagcaattatatatatagcatttaactgaaccaaaccaatatataaggttcaagctaatcaatttattacccaaggtatcaaggaatagggtattcaatgcaaattggccataacaaaggaataggttcacaccacccggtgacattcgaaaataaatgcacagttgaaataaatagagaatttaaatatatgatcaatatgcacaaaggattgtgtttaggatctgtgtgacttgccttgcaagaatcggacttcaattagtcttcttgaacacttccgatgcactcatgaaccttcgcaacgacggaaatgacaagctaacacgcaaaacaaaaaaaaagactaataaaaaccaaataaacagtacataaaagtaaacaaacatgtagatcatgattttagatgaatttagagacttgaaccacttaattccgacttcatatgaattagttatgtactttacaagataaatctgattttagacttatacagaaagggattaacgatgtcatgacgacatcactgccggcgttggagggtttgggcggccaaaccgagggcaccagaagaaagaacatgacgaggggaactcactgaggggcggcacgacgaagaacgacgacgggagacggccagcgacgagctccgaagggcggcgaggtactggtcgacggcgacagcggctttctggcgatctttagcggaggaaaattagcggacgggcttcaccttggcgctgcgatgccgaagaaggcgacgacgacgtccagcaaccactgagtcgacggcgaggctcggccggaggtgaagtagatcggattcacgccgacgaggagcttccagcgggttacggcaaaaaggaaccggtggccgggcttcttctcctccttgcgaacccggtggtgacggcggcgtccagaggcgacgatggacggtgacgagcggcacggctggagcggctgccggcgacggagagagaagatggctaaggcacgggagctcgagcaaggggtttaaaacgaaagaggagagcctggggtttctatttataggcaaaggtggaggagattagctcggacccgagaggagagaatggcgccggatcgggaagaacagtggctctggtggtagaagatgacactgttgtgacagggaggaagtagagtttttgcttggcggaaaagaaaagaagagagggactagaattagacttttctgggaaagaaggagacaggaaacagagacaggcaaagaggaaggatgggctgaggatgagtagacttttccagtttcagcccgaaaaggaaaaggggaatttcaattacttttccaattaaattaatcactgaaatgatctttgaattgttaaaaatatttccaatgctcaaataatttcaagaaaaatcctgaaagtacttgaacactataagtatttaacaaaattataatcagaccatttaatgattaatttaatatgtggataattactgaaatgttgtttgtattattaaaattaggagttgagcttcgaaaaatccaagaaaatttcagagagtatgattaaccatggagaatttaataaaaattaaatccagccatgctttatatttaggaaattttatttcccacatttaacttcacttgtaaattaatgaacatttaatataaattctaataataatttattaaataatttataaatcctgaaacgaaaatcaggttgtgacatctcttgacccaccaaaggagcaaaatcaaacattgtcgttttgggaaggacaagtgtggtaaaaggattggttgcatgtatggcagcaggaacagaactggaggctaaaaactgatgcatagttcccttttctttgcgcagaagatcaatcttatcattcaggccagacattggataaaaaaatggatgcgcaggattttcacttctagcaattttgcccaacttagctaggaattcctgaacctttgggtcctggactgaaacttggaccttgtccttcctaacaagagaaacagctgtaggaacaggagcactgacatcaggaatagcaggtaccaaagctagcataccatcaggattaacctccattacttggcccattggatggtcttggctccatgcattgtccagctcagcatctgcagcttgttgacccgcaggaggctgacccatctgccaaatgttacctgcatcaagatcatcatcatcattatatgggtcatttggatcatgttgagggcccgcagggggcagatcttcattagggggcaagttgagaaaatccccttctaacaagaaaactgaaactgtccaagactctcctcccccacccatacctactgggtcgtgcagaacaattttgcgcggtacataatcgttgtctttaaacttaggccttatcagaactctccatttcatctcatccctttcaagctaaaaggaaagctgaccaaaagtgattgtagctaggtttagatgatcccaatcaacaaagtcaaggggaaaatccaagaaaagaaaccagccctccctattgtactgcgaggctctccaatttgttccctgatcatgctttacgaaagaaaccgagtgcacaccatcatagataaatggctcactatggaccagagcatctctatgcatagcagagcgaagttgatacatacccaccgcagaagcatgacgaaagctatttctgacctcaaaaagatgctcatcaagaatgtgatgcaggataagcatatggtggtgatcccaatcttactccggcactggcggctccaccaaagcaaggcagaactcctcatggcgatgaacaggcctttcagggaatgtgagatcaactcttgggacacgcaaatttcctcccaaatgcacaatgtgaccttgatggaggaaacgaagggggttagggttaagattcgccattggcaagggaatcggggtccggggaggcttgaacagtagtatcaacagtagattggaggagatgagggggttgcgtgataaccggcactatctctttaggtctccaaataaaattgccattaccccgggagtttaggactgcagtagaattaatgcggggggaaaaaaagactttgacaatttaaccatggagacaggcctagagctgcatgacccatattcatgcaggtgcggcaccggaaaggcccaacacaggcagacaaagaatgccccttctctaagcaacgtccacaaattaaatttgaatttaaaacttgcttaggaaacggatcccgattacctcgctcattttgaaatttgagactagccgccggctggatcaccggagctttggtcaccagaatggtggtcgctggagaaaccacgccatgcaccttcaagggctcctttaatctatcaaaaacactcttcaaaggaatatcactgtgaacagcttgagcgtaagaacgacccggttgtcccagagaaccagagatacgtttcttaggagccaccgaaatccattctttttcttgatcacgggtccaagcatcaaattcccattgccaattaggtccaccatttctccaaaggaagaagcgtagaacaaaatcatcacaagagaaagacctcaaacgataaatccataaacccactggcttggagcagaccaagaaagaataagaacgatctttaagaagggtaacagagagatccacaggagaaccaccaatcacagccctgagggctagagcaacagaagacgttgtcaaacgaaaatttgaacggggaatatccaccgctaaccggaaaggaggcgagctgaacttagcagagaaataaaccggcgatcgaaaacgatgccaagcttcatccctaattgcatcaccgggagagaaattccaccctcccagcggtgccggagtcaccatggaggatcactggaaatcgcccatcagagcacctccgtgaaaaccggatcgactagcttactcgtagcctcaactgctggtttatatgatactcctatctgatagatcatctgaggcgtttcaattgggggagtgcagatgagtattggcatcctcgttaggcttgccacagaacgggctagcatgcgccatcgtgatgagcctagacttcaagtcgaaatccacgtcccctatgttgacctacggcccaatggccacattgtcagcagagggagcagcgaactcacggagagtcttgttagccatagtcttgaaggttggtggcgctggtacggctggtttctctgtcggtagagttttctgcggagcagcgacttgcggcctgacgctccggaagaaagcttctggattttctttgaagttttccggcaagttgataccagtcatgcactaccctattttcacaacaaaagtgaaaacaaccaaggttagcctgcaaaggaaaatgattatacagaggcaaatataaaatattagttcaagtagtctctattatgaatcttccccggcaacggcgccataaatgcttattggtattcccagcaatggcgcagaaatacttctggtatattttggttacagagttcatccgcaagcgcacggatataccattgtagcatttcacccaagagtatttcaagggtatcgtatttattttatcctgtgggaagataatgtagagagaacttgactaataatttatatattacttgtgataatcatattctaagcaggggttaagataatccaagggtagagtgacacacaagcattaactactcattctcataatatattatctaagctaagtggatagaaaagagaaagataatctattcctatacttataaaatacatagtatacatacattctaggtaaccgatatactagctaataccctctatccgatgccctcctggtacatcgagaagccacccctgactgccgagttccttacgacagcccgtcatgaccatacaaccggggctaaatacggaggaataccctccccaaggaattaacttaggattatataccggcacggaggaatacccgtactgagctatcaccatcagcggcccacctcttatccgcaatatataaccccaaaaaatgatatctcgtaatctagacaccacgtctaaactactagatactactctaatatcatcgtcatgacatagagtaattgcataagcaaacactatacccgcaccaaagcatctcctagataagctagccgtatattcagtataacatgaacataatgtaaagtaagtactcatatactcggaaagtatttcaataccataaatgtatttagaagagtattctaataaaaatacaaggcttacaaaagagaagagaaaagctactatagccatacccgaactcttccaaaggcttccgtactcctgatttctactctattcctattccaccagctagatactactaaactaaacttgagagaaatgagagagctattgcttgaggtgtgtgagtgaagtgagaagaggaactccttttatagctgaactatgacggttgtgatggctggaatggtcggtaataccctccaaccgtcattggggcttcatctcaaccgtccagccaagacctggatccaacggaggcgagggagtttcggccgaaccccctagttcggctgaacctggggccggcccaactagcccatgctttggctggcggcctcctctgttgttcttctccgcagacagtgaattttggcccagtttgtcatgtcaattctgagttcttggcccattcatacataagtctggttctcgatatcgtccgattgatttatcgtctgagttgatgtcgattctcctccactttattgttattctctacaaaaggttagtagacctaatattagtgaaatattattattctaacatatttatgcattgcaagcatcactagttctcctctattttggtaatattaacggtcgaaactgatcgataatgaccgtcaacacctgccgttcttgtgagtagcgtcgtgattgttcgcgcacgtgagagagaacaacaaattagatcggtttgtttttttttggccactgtacgtttcacatcaaggcacatagaagagtccatctccaccttgaccagccactacacaagcccacctctctcaaacttgaccgaggctgttaccaccctccacctcatcacgaccatactgacctctccacttccgggtagcgggtatcgagtccgtagttttctctatatcatataattgttaagtagcggatttgagatatttttataaaaacgaaacctacgcgatgtgagcatttcatttttgagatgatctaattttagttttgcactttgcatttaagtccctgtaatattcatatttacatttgagtccctgctcgaggtcggtggttagttcttgttggaaaaaatagtaaaataatataaaaaagaaaaggcagaaaggtgcaaagaaaaagaaagaaaaagccacaccaaaaaaaagaagaaaaggcagaaaggtgcttaaaaaaggccgcaccaagaaagaaaaagataaaatattcatcctttgagtatgttttcagagtgtagagttgtgcaatgattcatatctagctcttagtgttgtcgggtgcctacttgagctagagttgagcctaggctaggccagcacattgactagtactttgaactattattcaactttgcattttctgattagcacaattgcgttcctttgctactatatattatgcctcccaagctccacatatatacttctggtcagcaccactttgatccttgcaatcgccacatcacgtccttgaaggtgtcacgaactagccaccggttgtaccgtccttagcattgctgataagacacttgtaagagcttgataaagtgctccattttcctgagttgttgagagacaccactacaccgtgtagctgattattagtgataaccttcactgtttgttgctgtttttgtgtttgcaatgacaggtatgggtggcgctcaaaatcagcgataccaacaaggtaacaataatcgcgtgcccgatgatccttgtgctaaggttatgtttaaaataccatctttttcgggttattatgatgctgagaaatattttgattgggagatgatagtagagcaaaaatttagtacccaccttgtgcctgagcaacatcgagttcgacaagctacttgtgagtttaaagattatgcttatatttggttggctgggttagttgcagagggagctttacctactagttgggaagaactgaatgtatctatgcgcaatagatttgttccaccatcttatcttagagaattaagcaagaaactgatgcatttagaacaagggataaaactgtacaggttactatggtgaactacaaaatggattgatgcgatgtagcatagtggagggaactgaggattctatttgtcgtttttactcgggattgaggcgcgaaatttaggacatagttgataataaggaatttaacactatcaaccagttatttcagtttgctatgcatgcagagaaggaattgtaggggcgtgatcaacaggttaagaacaaggcgagcacgtacacgccgcaggcgaagccatcatcaaggttgcccaagcctatctatttctgggcgtctccaccaaagagcaagcgaccggttacatctggagtttgtacagtgccgaaaccaccttccccacgacccgcagattcaggtaaaggttcttcgcacgtatccaccaagagtgccttgtctgtcgcttcgacgggatgcacgcataggattcagtgccaccgctaccatggatttggccatgtccagaaggtttgccctagtcaactggtatacgttgctacggatgatgactacatcagcacttccgatgttgaagatgatgaggaggaagagaagaaagacaaagagcaaaaagacctatctatagctccatgcatgcttgaggaatgtttaattgaccaagcgcctgtaatttctgaagatgagaaaaaaggtaatgataatggtgctacaactactcaaggtatgcatatttatgatgtgccaactatgtccactacttatgctacattatagcaacccgtagtggaaacaattgctgaaatacctttgtcacaaaacaatttgcttgatgtttcttgtgataaagaagagttgtgcgatgcttcacttatatccttgccacaactagtgaatgaacatgttagttccatagtagagctaccatgtgttgagtttaaacatgttattcacattgctagcgagaattatgagcttaaattgctatcttctttaaatacttggggttacattcaatttgatgatgtttgtccactcaactatttagagaagaaattatttgctagatttttattgccatgaccttcagatgtgattttttatgttattggcaattatggtagtaaaggagaatataatgtgcattgagtatatatttgtttgaatttgaccatacctccttttcatgatgaaatgaattgtctaggggactgcatgtgtagaagtaattctctatctagttgctttagttgtttaaatgagttacaggttggtttgcaagaaggggagtgttgtgattttgaccatcaaaaattttcctcaccagatgttgagatagataaagataagttcaatacactccatgacaagatgaaaccgaggacggtttccaatcaagaaggggaggataatgaggacacaactagctcggatataaccatgactatcttatatattaatcaaccaaaggtgcatatgttctatatgagatttacttgttatatatttgaacaaacgttgctacacaatgatcaaagtggtgctgaccagaagtatatttgtggagcttgggaggcacaatatatagtagcaaagagacacaattgtgctaatcagaaaatgcaaagttgaataatagttcaaagtactagtcaatgtgttggcctagcctagactcaattctagctcaagcaagcacccgacaacactaaggactagatattaataattgcacaactctgcactctcaaaacatattcaaaggatgaatgattttttttctttctcggtgtggcttttatttaaacacctttctgccttgtttttttcttttttaggtgcggctttttctttcttttttctttgcacctttcttccttttctttctttctttagtttttttttacttttttttcaacaagagctgaccactaacctcgaacagggactcatatgtaaatataaatattgcagggactcaaacacaaagtgcaaaactaaaattggataacctcaaaaatgtattgctcatatcatgtaggtttcgtttttacaaaaatatctcaaatccgcataaatatttgatatatggatgactacgaactcatacccaggttcggaggtggaaggtgggagtcgctcggttttctttctcacagcacacgcgcacatacgccacacatgaaaacctaacaaccaggcaactccaaaaccgctcgattaaaacttctccaaaccacaaaaacggaaacctgacaatgattagattcgatttttcaaggtcccggcaacaaccgacaatttacaaaattggacacaaaattgacgtacaactcacaccttgataaaccctagacccaaagtgttgaacagatgcattactcaaaactaaaaattaaatctaaaactaaaccatcactcgatacgacgatgcaatctagaattcaacaatgcaaaatctaatagaacaatgcaacaactaaaattgtctaggtaaagaataaatatttttgtgttgcaattttctggttatgggaagacaaattacctaataggcaaccgcgctctgataccaactgatgagaaagttaggtcccgatcttctgataagtattgataaacaatcaatttgggtggattcgctggacaactcgatccggcttctaaacgaacacgctactgagccccgcaatcgcagcaccacgtctcctctggttatcaaccatgccgaaacccggttgacctcaccgagaaggctaatccctgcatgcgaatcgaagaacacaagcaagaacaagatagattgcaacacaattgcatatgaatgattaagcactcgaatttggggttctacaaaccgatttagcagcaaaactgttcttaacagaataatctaagcaaaacccgactctaaacgatgacggctactgattaagtatgattagggatgtcctagggttaccctaagcctataagctttccaaatccatcttaaagtagactccataagctttccaacaagtactcatgggccccgaaattctttctagatcagcggctaggttcgtttgaagttgatgctatcaggaggcccaaatccgaattcaaaacgtgtagaactttatgtcttgtcttctatggaccaaaagtgacgtggtgagatggaagtgaacttggagaaggttttggtttggtccccaatcaacttctttaattatccatgaattccttacgctcgcctcttttctttcacccaagcaagtacctctgcaaacgaaaacacacaaaactcattgtgtagcaacgtttgttcaaatatataactagtaaatctaatatggaacatatgcacctttggttgattaatatataaggtagtaatggttatatccgagctagttgtgtcctcgtcaggaagattccaaaagcatattgtgatgccgaaagaatattcggaaccggtggggttctgattgaaggctagacaaacaacatgactgaaatatgtaaatcaaactagtgaaatagctttataatattatatagatatagaataccaaaagcctgatggctttgtcatcaatcaccaaaaagggggagatagaaagttcaagtgctaataatttggttttgatgatgactgataaattcaattatgtgagactaatttggatatgaaagtgctaggcaaagccctggcagttttcaaggtcaaaaaaatgtggatatgaaagtggagtgtgtgagagctgattcctagacttcatatgagttgagttgagatagaaacgttcattggtgatgcacctaaattacaaggatgaaatacatggagataaagctatatctatcactctctctccatgtacatattgatatgttcatatataatatttcgatgtgaataacattatacacatgagactaatgttttgtttgagcattttttgcttgtttagtctctttacattgagaacatgaagatgatgaaggtatacatttcttttaatgcgtatgtttgataaatgcattctattcttgtataggataagctcctaatgtttcattctttttaggaaaaagtacgaattacccccctcaacaattacggttgttcgatttttaaccctgaactccaataccagttatttttaaccctgaacattacaaaccggacgaattactcccctagatcgatccagggtggtttcggtcctacgtggacacacacgtggcagtccggtcagccaaaacaaaagaaacatatatgggacccacttgtcagccacaacaaataaagatggtggggcccactgtcagcccgagcctccacttctccccttcctctttgccccttcccttcgatctctacatctctagcgcatcaaggcaggtagcggagctcgccgttgatctcgccgcctccatggcgagctcgcagcggcggccaaccagcgcacatgctcgccacggaggaggaacacgagcatgcccagaatggaggcagagacgagagaggcgtcactgcgcacgcgctcatcgacggaggacatcgccgtgctggagacaggggtgggggagaagcgcggggccgaggacagagacggagcgagctcgggtgaccgacagtggcttccctatccccaacctcctcgccgttgaccgtggcgccacttgacctccaggtggtcggcggtagctcgggtggccggcggtggaggtggaggcagagcaagcctgggggcaggaggctgcggcggggcacgcaacgattagttgtggatggcgacgtgctagggcggatgcggcgagcgcagcgggcgggcgagaggctgcagcggggcgcgcagcgacgagcggtggacgacggcgcgcgggggtgggtgaggcgcgcgcctcatcctcggcctccgccacgaggaggctcacgagctcgccgaaggtcgtgatgttgacttgggcgtagggcctcatggcagcgacgcctgcacctgactgtcgtaggcgcggcgtgcgccactgccgttcatagcgccgacagggagagtcacggagggacctcaagacggcggcaggcagaactgcctcgcctcctctgccgtggcgctcacctccgccgccgcctcgcctcctccactaccagttaggatccgccgcctcatccttcctcagctctcccgacggcaccagacgagagagagagaacgaggaggagagagaacctcgccgccgcctcgcctcctccacgccgcgcgctgcccgccgtgccacatctcccgccggcccccgcacgccgaccgcccgtccacgcgccgccgatgccgcccactgctcgttcacgcacacccgagagagagaggagaggagagagggaagagtggtaatggcaggtgggcccaatattttattttatttcattttgttgattagatttccacgtcggcgccacgtgtatgccacataggagaaaaaccgctcaggattgagtcaggtggtaattcatccggtatcaatagttcgaggtgtaatatgtttggttttgtggttcaagggggtaattcatactgtcgcaataattcaggggggtaattcgtactttttccttctttttatgcatactattgcttcacacaaatattttgtatgcatacatttaggggaagcaaatcctataccttagttatgcatgtatttgatccaagttattcacttttatttaattcggatctttacagttgagcatatatttgagtatatgacacttatggtgttgattaatactcatgatttattcctatccttttatatgcgcgatcggtaaatcaacatgtagaggttgacaaccggatcattgagactaataatttcattgagttcaatgagaaaaataggtcccaaggattgaaaagatgttgatgctcaagtgatatgattacacctaaaataccaagaataacacagtagagatattgaagatgttggatatgaggtggctactatggcaagacggtgaaggggtcgcgatacaccatgcggcggtgaagggcaagcaaggggcatagcaccgaagaaccaaatccggtggtaaaggggaagtgacggtgttatcatgatggaccgtgcgagaccatttgaagctacaagtaaccgcataaatcatttgaagaatatatggtgaaacggttttggcgttgcggtcccttaagacaaaggaaggaagatggaaagaaggtattcctattagtataattctcttcctatttaaatttgagtacaggaatgtcgtactatcaagagtgatgcaacgtcgatgtgtttgtgtatgtgtcggtgctcaaagtgatctgtcatagtgctaccttgagagaaacccaagatttaacaaatcctttgagtgtttttagacgttttttggttgagttgggtagtcctctgagtcggctttccatagagtccaagattatcaaaaacagactcccaagcgaaatgttatggtcgtattactatgtgcttttcggaaattctgaaaaaactccgaaagtccgaaaaatatttcggaaagcccaaaattttttggaaattccaaaaatgactgcgaaattcatatagacttctgttaattttcgggcttgtccgaacaggcctttcggaaattccgaaagtcatagtcttgtccttcaatggctagttctgagaggctcgtgtatataaactcctccacccctgttgacggtcgttatcgaccaattttgaccatcaatattactcaattaatgaagactagctatgcctgcaatgcataatttccaaataaaatatctacctccactatatactatgctactaacatgtatataggagaagcacatataaatgcaggagaatcaatagaaaataaaagatcaatcaatcaaacattgtcgagatctagacttatggatgaatgggccaagaacacaagattgacacattcctctaggccatttggataagggaggagttaaggggggcacctgccgaaaatggaccagaatggcccaactcatggttcggccaaaccccccatctgcgccgttgattcttggttttggcgtggacgctccagatgatgtcctgatggcggttacggggcacaaaggacatgtcgcacacttataaccgtcataactgccctatataaggacttcactccctccacttcaacacacactcaagaagaagagctctctccctctctcaagtttagtagtatcttagtgctagtggagtaggaattagaatagtattctgaatcctcgggtcttcaggagaagtcgggtatggctctagtagctttccactcttcttttgtaagacttattgaattaacagaatattcttttttatacatttatggtattttattccatttatattatctaagtaccaactttcatttatacttatatcaatatagttctgtagctagcctaccagataggtgcaatggtgtgggtttagtgtccgattactcggttgctctatgtcatctcgggggatatagagtagtatttaataatatagacgtggtgtctagattattaagtatcattatctgggcatatatgctgcgggacagtagaggtgagccactgatagtgacaactcagtacgggtattcctccacgttagtataaattcataagacaaattcctggggagggtactactccatatttaaccccgttggaaggccatgacaggttgtcgtaaggaacttgacaacccagggtggtctctcaaaacaccaggagggcactgttaggggttattggttgcatggttgtgtactagcaagtgtagactaaatatgtatgtatactagaagtataggaatgaattcttttcttattattcctccacttagcttagattatattttagtgagagtatcctagttctttcttccgtgtgtcacataccctttgaattacttaacccttgcatagaccttgatgtatacaagtatataaactattagcatagtattctcttatcatatcttcccttgggattaaataaatacgataccttggaatactcctagatgaaatgctacaatggtatatccgcgcgcttgcggacatatctataaccataagtataccatgaaaatttctacgccattactgggatttatatttctagaaatatcgttaagaaatatcaacaatccctcctttgagtggctgttgttcttgggcattattagacacatccaaagctaaatagccttccccattatcctacctttgtggtgcctatttgtgagtgggatttgagaaggggagagacttggattgaatgattgtgaaattgagaactagtgagcttcacacaatactttgagctctcgagttcatagcaagaaaatcttcgattgagtttgttactcttggggactaaggtctcgtagatggctaggcatcgctggtgagcacccaaggttgaggtgtgtcgcggaaagtttatgaaggcatcgatttcgcctccgcaagggaagagtgaaatcgaggagagcatttgcgcaacctcgtaaggaaaaggttgaaatagacccacctttgtggcccccccaacggagacgtaggatccgcagatccgaacttcggaaaataaatcaacgtgtctgttctcttgggttgctcattcttgccattctcatattgtgcttgagcttgtttttacccaatctacttgtatgcttaattaatatagttggtgaccttatatcttgcttagataccttgtttgtcaccttttgattcatatacattttgtttgttcgagctacaaattcatagatagtgttttattctattaccactgaacttttcggttgagaccggaacttccaatcccataccggaaattccgatttgaaccgaaagttatcatcattataatatgctaatgaagttgtgataacttttaggaatacctattcactccccttctaagcaacatcaaggtcctttcaaacctgaatgacattcgatagtaagcatacattccattggatacgtgaacgttgtcttgctttgatcgtaggaatatatgggaattatatgataaccagaatacccatcaagaaaacaaaagaaggaatgatttgtctgccgctctaacatctcatcaatgtagggcagcagaaaatggtccttttttatagccttgttgagttttctataatcaatgcacatcctccatctaatgacagctcattccgggattaactcgttcttcaagttttcaactactgtcatgcctcccttcttaggcacaacctgaactgggttaacccattcgctatacgacataggatagacctctttttcacaacttctctcatcgtattgtttagcctctgttgtggctcccaagagagtgcgcaagaagggtctagggggatatgatgtgtgtagagagccggactaatccctttgagaacttgaagaaagtagcctagaatagagcaatgctttgctagcatggctatgagtcgggaggtcagatcatcactcagtttgtcacttatgtcgacgggcgactctgagtcaccatgtagaaaagcatgacgaaggcctgaaggaagaggtttgagcacaactatagaggtcgtgaatacggatcggttttgggtaactcaatcacctctccaagatcgtcctctttctcaacaaatgcagtggaaatcatcttcgaggagggattcaggggactcaaaaggagagacagccaacacttccacaattgtctcgaatttgggaatggggttccatcaaagagtttttttatcgtgagatctggacaaaaaacaccattttcccaagcttgatgtcgagaactccggttcttgcacattgaagaagaacttttctatgggatggccgacgtggagtttgaactcatagacttcgaacttgtggaaattaagaattttgttgtgctgaattggcactctggggataaccccgtacccttcgatgataggactagattaatcctgaaaggttttgtccgttggtgtcgtaggctctccggacctctcattatatttgagggatgaagtgaataattcaagccatcaaacaaacataatgaaacatccgacgcctcgagagaaggatattagagacattgatgggcctttagcctgccagtcaacttcagcctgagatgtgcccgtcaaaccacacgaaggcggcgaccagatgtatcacacattcaggagacttgacaaaatggctaaagatctacgatatctcaaatatccttaactcatactcatgtgaatctagttcccaggatgtgtactagattcacactttcatcttaagcatggttatgcatagcaaatacaaataagatgaaagcgattcaaatttacaactactttatagttacataggccgaccgacgaaatatagatagataacagagaacagcagaagcttgactacccaaccacaagcacaccgactaggggtttaccccattaagttcaagtcctagagagagcaaccgaaacccgcaccactcaagaagactaagtctaacatgcaagcaaaaggttattccagtagcaagagtcagtacattaatgtactggcaagccaaaaatcaatcctaacatactacatgtaaggcatatattcaaaggagggcaatatatagtttaatttcagcataaagcagttttggttcacaaatcttttgtaaaggagttgattcaattaacaaaacaaatttgtgagttcatcataattaacatcatatcatcatagataacatcatatcatcataagcatactcttgctggcttcatggcacaactattataatcatatgactcacacaactcaacacaatttttccacaagactatactcatgacaca

SEQ ID NO: 6064 - DNA, 11857 bp, Oryza sativa
accccacaagtcttcattgtgtgttgtattgtggattaatcaccaagtagcagattcttcgttgtgtttttgtgtgtgtggaagtagggattaatcacttcgttcattgtgcttttgtatgtgtgccacttcattgtgtaagcacattttttattcaaatttctgtgttagtttttgtgtgcgcggaacacaatttgaaatttgtgttagttttttctttttgttggttcaaattgtgtgcggaacacaatctgaaaattgttggtctgtttgtggaacacaatttagaatcacggacagagcttgcccagtaacccgatcaagaaaattttttagctacaacttatgtattttcatcatatgtacacccctccaatccaaactcagacactcatatcagcctaaacttggtctaaagtagagtaaataaagtaagtgagagtagcacatctctccatttccttttagctcttggtctaaaatagagtaaagcaaacgagtagcacccctctctatttctagaatcgcaatccaaactcagcctaaacttggtttaaagtagagtgaagtaagcaagaatagcacctttctccatttccttttaactcttggtctaaaatagagtaagcaagcgagtagcacccctctctatttctagaatcgtgttgtagatctttgtattaatcactagtgccaaattattgtgtaacataatttgagaactgcttgacaatactttctaactaggaaaataatagtttcgatatgcctcaaaacaggtcaaattatcaatttgcggtatatcgttgaacattactgcgcgaagatatacttatcggcagatttattatgcatggaagaatacttcaacagatatttatcaacatttgtgcattgaactgacaaaaatctgcaacacactagcaatgtgagatccttgatctccggaagcaactagcaacaagaagtaacgaagtatgcctcaacaagaggcagatgtctgaatctagagtgaatcaagcatgttccataagcaagatgtacatgaataaaatgaatcacgaataaaagttatcaatggtgataaagttcagagacaaatcgcttctcccatgttcccatattacgcaaaaggggtagctatgagcaacaggtatccagcatggcaatggaatacacgattgaacccagcaattaattagagcctttctgagttgtcacttcactgattacaatcaatataaaacctttcactaaataaatgatgttaatgacataatacagctaaacactacattgtttaaaacatgctatctaccagccctgtcttacccaaaagtgggacagtaggctaaaaaagagtaacaaaaattaaatattccgttgtgcagatgctattctgaagccattagcactctcgggaggcggtggcttcttcttatagttcgcgaggctgcagtgggggcagatatattccaacccatctgtcttcgcatagtcctgttacagcagcagcccagatcaatgcacaacctaaataatgaaattattggaagggatataaaacgttagatacagatcaggaaatatttctaccttgaatgtgcctagcccttgccgtctatcacacccaaagtgcgcccattcaccgcacaacccacagttaacccaatcacctggagcactactggaaatagttggaaggaatatgttagattataccgacaggaaacagttgcaacagcaccatactaaaatcgtgtcctcgaacctgtggcagagtaagcagcattccccaccgacatcatcatgtgaaagttcgtattccaacaagtatgtctcgtaatgtctctttaacgtgtttccaacaccctattgcaacacatttagcacatcagaaacaggcaaatgaaatggcagctaacataccgtaaataaaagataacaaaaggaaacaaaaaagaataaatgtgttacagacactatgatttgtggttaaccgctcatagcaactatctgtacattaaccgcagaggctcgtgtacggcacaaaggactccaagatcaaggcttttcgtaacacccctaagccccatcactgcctaataggcccaccttttaattatttaaattaaatagaagaaacgaagatagcaaggtcattttcaaatatttctcattcagcgggcatattatttcagtgggcagagtgtctgctagcaaataccacgaatacatgggttgtgtggtttgaggaataagatggacaattgatgacatggttctaaatatgttatttgtttggaggaatggaatgtgtttgtccatcatcagctcatctctaaaagcacacactaggtagagaaatgaagaatggagtcactccaccaaatttaaggaataaccacatgatggatcaccaatcctagatggtctgaagcccattagagtgcgttctagccaagaccacatttagtgttccatagtgaattttgtcagcaaattattgcaggcaggcccagtggcagagagagggggaggcgcgagcaggagcttggcctacccataatttctgagattttcaatgctaaaagctgtatcttaagtgattttaaaatgaaattagcactcctgacccgtcgcttgacaaataaatcttaggattcctggctccacctgtgcagcaaattttccaggaatagaacgttcaaagctgactatgtgccaaaacatgtccctcttacaggctgacccatatagtagagtaaatctaagtagcataacaactgaagtgtgataaatggtaccacagaaaataaccaattcactgcagcaaatctaacaagattgaaacaaatatcaactacatgcataccgtcattttgtttgtaacagtatggttgctcatctttgaaaagacttgacctttccaatttatgccattgcctacataaaatccgcctctggataccacctgaatgatcaatcatcattttcatcagataaatgattaaatcagcatttctctctccatatttaaccccacaaggcgataagcccataattaatgcatgaaaatagcagcagtgaagaccaacctctttatacaagttatataaatcaaggcgttttgcatttagtactgcatcaggaaattcggctagtcctccttgaggaacaagtcgggtgtgccccctctgaagtagaaattgcatgacatcttttaagaagtcttcctgcaaaggacaaggggaaaatatgtttgaccttaactttagagagcatttcagcataaaaccataaaaaagaataggagagatggtaaatgagagtacttcagagcaaattccaataggcaaccgatcacacccatgtttcttcattggcagaggatttaacggaacagctggttcaacacgtgatgtcccagatgataattttctttgagttgttggagcaacaggtaatgcattatgccttaccggaggtgctggcaagctaggcttaacttgactagcatcatgaataaaggacggagggatacccacaaaagggtgcatctgccgcttcgaagagtgtggaataggcctcatttttgcagatttcagctttggtttgactactagggaagtccctttcattggatgtttctggtactctccaactccatttgcactaaaagtacttgattttgactctggagttcccttcagtctgtccttaacaagggatgctgaccatcttggcagatgagaatatagaccatttacaatagcttcatttttgcaaaagaaaagaagccgatccacatcttgtctatcaaacgaagaaactggagttccatttacacaagcaattccaagtggaaccaggcttttgtaagagatttccggagcaagatatttcaaaacctagacagtagaaaacaatcttcagttagtgatgaatgatccattgaacataaccatgtaaggaaagataattagaatccacaatggtataaaacaccatatggttgagttcacacattgaggtttgacttgtcaagaaagattggtgatacaattaaagagcataggggtcttggtagtcatattatgtattaaaatgtccaaaccacttctgtttcctgatacatgtgtttttagcccattttttttaacaaacaaaaggtgttcccagctttactgatgaaaccaaagtacagacaactgcagaggaagaacgagatacttgacaggatttatcgtccacaaaaggacaacatgatatccaaaaaaaatgacacaaaagaccatggggaaattagtgggtatttttttacacatattaccaagttgtgttcagcacactacttcaactttttgaagaaaacaaacctgtcctgcccacttaggtagggtcatccagacttcaaaagtagaagctccagaagccacagatatcgaagtcaaaggctcaactgaagatggtttgtcgtcctccctaactaagacagcacgaactaactggcccttctcaacaatttcctttttaatatggttctccaaaagctacaaaattccatgaagcagcatatgacactgtaaatatcaaactgaagactaaaaaatgctccataaatacagaaaccataccttgtcatcaaaacatgtttgcggactgccagaaacaagcaatgacacgtgtgaagaactgcatgttgtgatatcacaacgcattgtaaccaccccatgtggaagagtttcagcatgaagaggtggaggagcagcactgaaaagagaaaatgttgagagtagaaaccaactaaacatctctagcaaccaagtaatgacgtggaactacaaaataaggatagcagcatcacttaaaaatatgaccacaaaaagatagtgttaaatactctattgtgactatagtttacaagacaccgatggaagcatttaatctggctaccatttagttttttctttagggaaatatcgccgcagttaacctttaaattataggcagcacaaatcaagattagttaatttattcgatataccaccagtttgagctttattaaatttgtggtaaaagaacatgactcacacatgagctagtatttataagacacaacaggttgccagatattgaatatatattatatatgccacactgcagctgaaggtacctgactctgttctggagtctacaccctcgaatctggaaaaaaaggggaaaaatcaaacattaaacaggcagtatgtgccatattatcttgctacaaaattcatggtgcataaatattaacatacaacggtactagctgaataccagtgtcttgcaataatcaacaaatatatgttctaaactttaaagtcgtatatatttcttggaaaaaaaaacatatacaattcgcaatccaacatcaaccagaaattgaaattgacaaaccagaagatcctaccaactaaataggaggtgatgggatggcagactcaccagtcaccatcaccaccactaagtttttggtggattacccaatctacagctatttttatgtaaattgttttggtggattacccaatctacagctatttttatgtaaattgcgcataaaatacataacacaaagtgtataatgaaagaaaagatgtggaaaggacataaagcaaaaagaagatactaggtgggctgtcaaccagacagcccacttatatctccaaccctgccaatactattccttctccagaaaccatagagaacagtgatgccattcgtgactcaaccattgattgggatgatgaaccagatcaaccatgaaccacaaactgagatgatgaaccagggtcgtgggatgtggcggtgaaccacgaatccggtcaccataggatgtgcaacatactctagaatgcaaattcacaactcagaaaatgagattgcaaccaagctgtatcatcaatctactccatagccatggcactatggagtatggactttgggacccagccccaccagccagtataggttgcctacaagtcacaatacttgttggctgcaataatgcatacttataatccgtaagctaacagactcatagttcattactccaatcaactagcatttccatgaactagattgttggggtatactattcagaactcagcacttctatgcagaaataaagcaacacatggtaagtacaagaatggacccatacttcaatattgagcagagcattcaaaccatcctccagtgagcccaacaaactagcatcctgtaaaagagatggaagtattggttgggataagaaaaatgcaataatatataagaaaatattccaaatttaggcatgaccactaacgcttaccaagatgcatggtgctccacaaataagaagcttcatgttcacatcttcatcatatatctttatggctggaaaatgttcagagctaccttcttcctcaaccatttcattctcaggaaggaagatatttatctttggagcatcccctagtaaacgaggcccaagcttaacactttgcgcatcattatttcttgcacagtacagtcgaaaagaagcttgtgcaagctgaaatgcatcccatgtatggctgcaggagctacataaaggaacactcgattattggatgaaaaaacaaaactaaatgggacttacgatacatacaacaaagacatgatgaatatgatacctctgaacaactgatatcaaggcttggcgaaaatgagatgctgcatacgatgaaaatgaatttctccaatataatacatatggaatcccctgggaatgaaagtgtcaaaaacacaaattccaaaatcacaaataagattctgaagtaataggagagtaggaattgttgttgaaagaaaaaagctcagtaaaactgcaaaaaaaatttgtaaatgttagcaatcatcttgccgaaaaatgaatagcaattgctcatcttacaagcatataatgatataaacattccaacaatagaacaacacctatgctagacaaaataaactaaacaaatgcagtttgagtatagtaattgtttatggaaactaagctcatgctacacatcagagcaattttttttttaaaaaaaagtatgaggaatcatttggatatttacaagtatatatgcatcccaacaagcagattcacaactgtggcaaaaagacatatggaacaatccacaacctgttcacaaatttttttaaaaaaaactaattgaaaatatcacaaaacaaactacctttaactgaagagattgagcaagcttttccccagcaggaacttccaaataaacctgtataaaagcttagacagtaagataaatagatagaaggaagacgaccatggaaaaattggaaaagaaaaccgtttatgaaacaaaacagaaaaacaaggagcataaggttttaaaaaataaaatgttagtagctacaagtcagacaaatataagtggaatatgtaaatcaagttatgggcattaaaaaaacaaaatattggaatatcagttttaagaaccaagttggagctgttgtgttgcgtttgtgttgtgattacatgtttaagctgttgacggaatacgattgttaaattaattgtggagtgtttgaggaatcaaactgaggttagataaatcctactccctccaggttgataatacttgtcgttttggacaaggctattgtcaaactttaaaaactttgactataaataacatctaaaatatttgtcttagaagtatggtgaccatatatatagactgatcttaaaaagtacttcaataaaatcatatatttattgatatttctatatatatatatatatagtaataaaaaatagtggtcaaagttgtttttaaagaccgtgcccttgtccaaagcgacaagtattatcagtccaaagagagtattatacaacttctgattcatccacatttgttcatttttttgcctcttaagtacgtgaccaagcattgcttttgcctcttaagcatgccagcaccagtattgacatgcatctcaacagttaatgcaaggtattagaggaaaagaacccataaaaagtgtttcgggaaatatgtgtgtcccacaaattcttatagaagccctaagaaaattgcccaacattttctacggagggagtataaatgtctgtcacataaataaaatcgaacagcacaatgaaacggaagcttatggtagtatcagttatcatttaattgaaagctaagagcgctgaccaacattgttgctagctaagagtttggtgcttactatggtcggaaaaggtggactaatgagtgaactaaatatctgtggatcagatacatcagcatcgccccagacaagtgtaccaatttcttcctcattctcaagctgctgaccctggaggtacatcaagttgggctgcacagcctgttgcgctttccggaattgatcaactgtgggattgatcagcgtatgcacctgcatcccgagccggttcataacacaacaaaagaaatgcatcaccccagtaaacagcaaaagcctactaacctccaatctcccagacgagatcagctctgggaatggatatgaaagccgtggtcgcttcacctcgggcaccagaccaggtggcttctgctgtttgtctgtaaccttcccacatagcaccgcaagcagcgtgcagttcaccagtgagctgctttggatttgagccatggctgaaccggtaaaatcacatctccccaattcagctcactccaccattgaaccctgcaacaccactagcaacagcaaatcattcatgaaactgagatcacccgaaccagtgcgtggatcaaaaagcaaactgaacagcttaagagattgactgaaaggttaaatatttcgggtgactgagaactagcaattcctggtcgtctagttttcagtcacctgaaaatttaaaatgtgtcagtcacatttgcaacctttggatctgcacatccaatgatagcagtttgtccatgctatgttgaatcaaacaaaatggttacaattccaagtgggcccattacaaaataataaaaaaaaagaacagtttggtaagtagtttggtcttttgcttgtgtccagaggattggcttcctcgttctgtgggctttaaacaccggcttaatgtgtcaggaacatttccgctcttccggcgagatttaattgctgctagtttagcccaggaagaaagaatatatttgtgtaacacttttggttgttactccttcatacttctttcctaaaactgtatgggtaaatctgtgctagctgaacaaacattactttactgtgatagattgccaatcgcaaaatataacatgtgtatgtaattttcaatttacaactccaataccaccgtaaaatttgatacaagaaaaattaacatgcttctgcattcgacaaatgcaaactggaaccatctacaagagaagaatgaacatccaacagtacaataattgcattagcctgcagtggaaatagcactataatgtgcaattcaaaaatatcaacacaatgtgcaattttgaattgattatctttatttaccagggcataaaaaaatttcttttacctatggtttccctaataactgcatttggtttattttaaaattgcacaaacatataaactgcaagacataacgatgagcacttcgcgaagcatacaaactacaaatcgcaatcaactaactgacacctgaaccaaaatcgattcacatacaggcctcaccaacatactgcatggcacaatgggacaagtaaagatgttcatgaagctgagatcactaaaccagtgcacggaccaaaaagcaaaccgaacagcttaaaaaaatgactgaaaaaattgaatatttcaggtgactgaaaactgcaactcccttcacgaaatttccagccaaaatcagaacaaacaagcaccaaatcgaaccaagcgaaccgaaccgaatcgaatcgagcaaccataccaggagacccaaatcgacgagcgcagcccaaaaccccgcgactccgagccgctatgacaccggcggcaggatgcgctcgatttgtgcggcgacggctagggcaaaagcgtggaggcgagagagcatggaaccctaatttagccgccgcacaaatccccctcttcgaatcattaataatacagacagaacgagaggggaataaacgcgtggtgaatcgcacgcgagccgacccccatcccgtcaaaatcaaatccagtcaaccactccggaaaaaaagaatctatctgtctaaccaaaaaaaaggaaaaccactggaattttaacctaaatccaccaaccctcctccccgtcttaatccctccgcggattagcaatgcaaacccctcaaataataaataaccgagcaagtagcaatctccaggaaatattttgattggccgggacgaaccgctcgagccactggagatcgtagtcgtaccgtgcacggaagcggaatccacagctcctgcttgatccctcctgcgcttcctgttcccctcgtggcgaggatgatgatgatgatgatgacggcgacgacgaccgcggcgatgattcatttacctgcggagaggaataaaaacaaagagcacggattaaattagctttttttcttttcgcagcgggatcgcgaggaaaagttgggaggaaattatacgaattctttttctgcggtttttttttcctcttccttctctctgattctctgctgctgcacgagtgctttttagatttttttggcccacagcacagcctagttgcgatcgtatgttgttttggcgatttgggttggtttggttccggtggtgatcgaagaaagaaatttgggtgggggaaatcggggagcgtgcgacgcgacgccatgtggattgatgtggtgagattggtgcgtggagttcgtgctggttcgtcggcctctggataccgggggaagggtcagggcctcaggggacgggctgtccctgacttgtgagcccacagggctttgggagaataaaagcgagtaggctgtcctaaaataagtgcaatgacaagtattcataagtgcaatgacaaatattcgtatccaaagtttgactatcggtcttgtttaaaaaatttatgaaaaaaattaaaaaaaatagtttttatcatctaatgacaaaaaaatattaatcataaaaaaatttaaataagacaaatagtaaatgttgttaatgttgatcataaaaaaacttttaataagataaataataaacgttggatatgaacgtataaaactgtacttgtttttgagatggaaatctcaaaagagtattactatagggagattttttttttggaaaacagtggcgggaatatccccacggtagattttcatttcataaataaaagcataataaaaaatttggggagattatttgctatgtacaccctctgattcttttttacgatggcgtcatagattaaggatgtaggtagtacattgatttgattatattactttcttactcaaagttgtacgtacgatgtaatattgatgtgattcaacgagttcctgtctaatagagaaaaataagagatattcccttctcccaaaatatattcactccgttctaaaatagattatctaaaatataataatctaggggcctcatcggatggctgtttgggccaaggcttttcagccaaagcccatcgtcttacttattgggctgagagctttcagccaaatataggtagggcccgcaaggatgttggagcatacaatactcatcaatccatttaagccaaataagccaatcaatggattttctttagctgaattgaaaaagccaactttggcttatc

SEQ ID NO: 6065 - DNA, 11210 bp, Oryza sativa
cccttccccggcgattctttctccacgctcaccaacgaggtcattgatggctgccattaacatagttactcccggtgtctgttacgcgaaatcatcgtcgtcgttcccttattatgatgtgccttcaatccacaaaagctcagctccttcgttcttctccgccatctttgtttcatccgagttttcgcctctacgagattgtgcgttctcccacggggtccataggtactactcaaaatgcttccagttattatttgattggtagagtgctatagattcttcttagattcattttcatctcttcgttttttatatgtccagaacggtattccttgatgtgtcaccaacggccttcctcttgactgtattttgctgctcctgtcgatattcaatctgcagagataattctggtatgttacacttccagcatttcttacttcccccctttttttttactgttcagtttatattcagttcaagcaatttcctttgtgtgaatatgaataccttatatgtccacctgaatatacactttagttataccccctggatggtcactatatcccctatgtttgctctatcctctttgtctgggaaaaatccaatgattttgtatccctggttatagggattctttgtttgtgctgccgggtagaatggataatgcaccaggtacttctcatcctattgtacgccgtcgtggtcggccacgccgaagtgcctttattactcccatgccacagcctaacccaactgctgctgctgagtctcggcgcaggcataggcaagttatcgatgcaaataggaacagaggttggttagaatatcataattccttgaaattaatttatgcataatggccaagtagctcgcattataaatctcttcctttttatctagcatcaacctctgcagatcaacgtccagtgcgccaacggttcattggagaatcctctatttctaatcttacagagcaaaatgaaccccatattcatattggttccattccatcaaatcaatcattcaatcacagacgtaaggtttttttgggctcctcagatcttactgtcatgaatcattttatctttaaaaaaatcattacatttatgcaaacctttcaggcactatatatgaaccattaaaccttggtggcccacaccattcttgcgtgcactgcggtgccttcttttggtatgaagaacgcatacgtagagagaggcacacttcaaatccttcatgtaatttgtgttgtaagggtggaagtatcttgctgccaccataccaacctcctccacaaccattattgaatttgttgacttcacaggacggaactctttctaaccacttctttgatcatattcgtcaatataatagcatgtttgcaatgacatctatgggagctaaagtaaatgagtccataaatgatggaagggcaccgtatgttttcaagataagtggtcaggtctgtcatagaatgggctctttgctgcctttagagggtcgtcgcccagaatatgcacaattatatatttttgacacggaacatgaggtctcaaaccgaatcaacgttgcttcatcttcctgttctccctttcatgcaaaccaagaaattgttgccaacttgatagaaatgttcaatacaaataatccaattgttcagctattcaggacagcacgtgagcgattatctgtagacacatctaatcagattcagataagattatttggcaaaagggatgcacatggagatatttacagtgctccggttgcttctgaagttgttggtctaattgtgggtgatattggatcaactgatataggacgggatataataatacaagaccgttcttcaaatttgcagcagataaatgaaaaccattgcaagtttatgtcaatgcaatatcctcttttattcccatatggagaggatggttatcatgagaaactgacctacaatacaacagcacgtagtcaagccattaaacgcaccaaaatgaccccattggagtactttgcatataggctacatgatagaccaagagacttcaatactccattaaggtgcaaaaggctaactcaatcttatgtggtagattcttactgttgtgttgaagggagccacatatcacattatcgcaatccaagcttccagtctaaatacatatcatcgccattcaactcattgattaattctgtctcaagaggtcttacatccggttcttctgttggtcaaagggtaatattgccggcttcatttaccggtgggcctcggtatttgtatcaaaattatcaagattccattgctatttgtagaaagtatggttgtcctgatctatttgtcacattcacatcaaatccggcttggcctgaggtcagggaggctttagcacgaattccaggtcagaaaccatctgaccgtgctgatattgtcaatagggttttcaaaatgaagctcaatattttaatagatgatattaaaaaacgtgaattctttggccctattaatgctggtaatacttttctccctttgtttttttccaaacaataattttcccttaaacttccctgtgcaacactaatcatgccttacatgtcccttcaaatttttctttttacacagttatctacacaattgaatttcagaaacgtggtttacctcatgtccacatcatcatatggctggccaaaaaagaacccctagatgcaaaaaaggtcgatagctatattttagctcagtttccggaccctgcagttgacaagattggttatgatgctgtttgtaactttatggtgcatggcccttgtggtcctcacaacccttcctcagtatgcatgtctgaaggaaaatgcaccaaattctaccccaaagaattctgtgaggaaactactatattagaaaatggttttacacagtatgcacggccaaacaatggaataacttttaaaagaaatgaggtagaaattgacaacagatttgtggttcctcataatgtcgacttagttgtcaaatttcaggctcacataaatgtggaaaaagttaattatgatggtatgcataaatatcttttcaagtatgttacaaaaggatttgattgctcaagagttggattccactctaattcatcaaactcagaatcatcaagtgaaactataaatgaaataaataattatttggaatgccgttgtgtcactccaaatgatgctgcttggcgattgcagcaatttgacattcaccacacagatccctctatagaacgcctccctgtacatcttcccttcaagaataatgttgttttcacagaagatgatgatcttgaagaggtcattgatgatccaaacaactctaaatcaaagctgactgcatggttagaagccaatatggagaacccttcagcccgacaactaacatatatagaatttcctgaatattggacatggcacaataaagaaaaatattgggatggccgtcgtggtgcttctcgcagaattggccgcattgctcatgtcagcccttcacaaggagaagcttactacctacagaagctactgcacattgttaggggcccaagatcctttgctgaaatcagaactgtatcaggtgttgaatatcctacattttgagcagcatgtgaagcattaggtctccttggtgatgaccaagaatggtcaaatgctataaaggatgcagctcaatgggccttaccattccaactacgccagctttttgttacaatgttactcttttgtgaggtaacaaatcctactagacttttcaatgaacatatgtcatgtatgagtgaggacatagcatatcgtacaacccgtaacacttctcaggccagcagctccaacaatacttttgttacatcttctctccttcttgagttagacaagctgctaagagacgctgggtatagtttatctcattttaatttgccaatgccagatgatattgcaagtgtgtctgcacagaataggcttctactagatgagcttagctatgatgtttgtaacatgggatacaccatagatgaagaagtgtcatgtttaaataatagccagaaggaagttttcaatgctatctataattctgtggtcaataatgaagggaaaacattttttgtttatggatatggaggaactgggaaaacattcttatggactactttgctcaattctataagaaggcaaggaaagatagcattggctgttgcatcctcaggaattgcatccttgctgcttccaggtggacgcacacctcattcgcgtttcaaaatccctttggagattttacaaaattcaatgtgcagtataaagaaaaatacaaatcttgctgaattgatccaaaaaacatccctcattatttgggatgagtctcctgttaatcataagtactgctttgaagcattagaccggactctacgggatatattatctgataccagcccacattcaacacacaagcaatttggtggtataacagtagttcttggtggagattttcgccaaacacttccagtcatccaaaatgcaacaaagcaaaagattttgaaatcttgcattgttaattcttatttatggaatcagtgcatactacttcatttaactgaaaatatgagacttaactctgcatgtctttctgcatcggaaagagaagacctcaaaaattttgctgaatggcttttgagagtaggcaatggtgcagaaccttatgttgatgtcccagaccaaccaaagggcatgtttatagagatccctcagtctctccttctatctccagattgtaggaatttggatgggttgatttcttttgtgtacgactcaggttgtcaaacaacagatcttagatcgtacttatgcgagcgtgcaattttagcacctacaaatgatgtagtttcagaaataaacaacaaaatgattgctcagctagcaaccactgaaatgtcatactatagctcagattcaattgatgatagctgttccaaccataccactttagaggcactatatccaacagagtttctaaacacaatttcaataaatggacttctagaacatgtgttacacttgaaaattggtgtgcctataatgctcttgcgtaatcttgatgcatcaagaggactttgcaatggaactaggctgattgtcacacagctaacaaatcgtgttattgagggagagataatcacaggaaaggcaaaaggtacaaaagcatatattcctcgcatcattacaacatcagctcagtccaagtggcccttcaaattgagacgccggcaattccaatacgtctttcatatgctatgacaataaacaagagccaagggcagaccttgagcagagttggtctgtatttgccttctcctgttttctcccatggtcaattatatgttgcattctcaagagttacttcccccaagggtttgaaagttctaatagaaaatagccctgcttcttatgaaaactgcacacaaaatgtggtatatgctgaggtattcagccaaatatctagacacaggaactaaatatctaggtatattgtgcatgccctatcttatacaatgttttgtttcattctacttttatctacatattctgctcaataaaaataataacttagttatctaatattatttgttattgtttcagatttatttcgatggcaagctcagctacagcactcaaagatgtaactattggccagcaaaactgcaaggtttttggccgtctaataagattatgggatgctctaaacatgagatcaaaatcagcagatccattgatcagcattgatggaatcctattagatgaacatgtgtgtcaatctcttttgtcttacaccaaatattaaccattcatttacatttcgttggtctactcaatattaaccataacaatcttatgcatcacaatcttgcagggttccatggcacaaatcagtgtaccaaaaaagcttgaaaaacaatttcgccccttgctaaatgaaggatcagtctacctgattactaatactactgctgttgatgctagaagaaagacttatatctatcagcaccaaagctacatgatccagttcaaacacgaaacaaaagtgaatcatctggaatctagaggatcaaccataccaaaattctctttcagcttttgcccatttgatcaaattccaggaaaaaccatcacctctaaacccctcttaggtaatccttgctttttaatttacccctaaacacttcctattatacttgacattcttttaactttttccttcagatttaattggggtagtcagccgtattggtccatatgatttcgcgagcccaacatcagacaaaaaactcagaagaattcaaattcagaaccaagagtatatgtctttttcaaacattaaactgataattcaatatttcactaattgtttttatgctctacctttgtagagaacagactcaagaagtacttctatggggacaatacggagaatcatttaatgaagctgtaacacttgaaaaatcaaaggaaggaattgtagtagtcatctttgctggtcttactgcaggcaattttgcaggttcattccatgaaaagaatatgcctcctcacataacatacctacaaaatttaaacttatcatttaccacatacaattgtaggtaaaacagaagcatcttcaagctccgctactcaaattcatattgacctcgatataccacaggtggaacaatttcgctccaggtaatttcaatttaatcccttaaaactacttaaagttcaagtttcctgttcaatagttttctttttcgtatcaattatgatgccaacctatattgttgcaattttaagctataaactgggatctccaagccttcaacaacagctccctaagattgtacgtttatccccagttcaagcagcaggaaaaatttacaacttagaagaaatatctgttatgcctgtttcagcttttcaggtaaaactgaacacataaacaaccatctatattcttattggaattccatatttttcttcagacaacatataactcttataattttcttcacttaagggaggagttacttatagtgcaattgcaaaagtgtcttcaatactgtcatcaattaagtggtactacataggatgtcatcgttgtgacaaagggtacaacaatagttctgactccccaagatgtgactgtgcggtttcattccccaaaccaatgtcagcttctcaccttacattccaacaattaaaaataatatgatataaataacatatatgccactgactattttacaatgctttaggtataaactccccgtgacaatcacagataaatcagggagtttagatgcagtggcattttcttttgttgctgaagatttagttgagcttgatgcagcccaagcttctcagaacatgaagatagactcagttgaacatccagtaactcttaataaagccattggaaaaacaagactttttactataggaatgaatactgattcatcttctaagttccctatcagctatgtgctcaaaaggagtttctcaattgatgatactatgccaaatcctctgctgacatctgaaaaggttagtaaatatcatctgaagatgctatttatcattggttcaatatttcaactgaattagcttgaactatctaactaattcagttctccaagaacaaagatcaactccaactcccacggtcccaccacctatgacatatacaagtagcccaatgtttactgttctctcaattttttctattcatcatatccatataaaactatacttactaactgctaatggcaaattcatttcagcacaactattgataatacaggattatccaaagatagtacacctccagaatcatctgcagctgtcaacatatccacagaaaagaacatgtcagaattacatattctaactacttaattaaatacatgcatttattcattaaatctattatatatttcagcagcacatctacaaaacgaagcattgatttcagtgaggactccactgacaaaactaaaaggtatacctctactgcacatagctcatttagttatttaaatttctcagttacagtttatcccttgcaataattttcttcttcatggcagtatcaaacaacttgatatacctgctgtcaaacgtcagaaggaagagtacgtacttctaacccaccttccaaattgcaaagttaaactataatgctaattccaatttcttatgaaccatttcaaacagcaaaaagctccaaccagcaaagaaggataagctcacacagaaatctacatgatatgcatggtacttgctctttacagtacttcagatacaatacatcatcatacaagcaaatcttactatgattcattctaatacattgtccaacaaaatttgcaggtcaatacatcgtatacaacttaaagcctgcagatgcttccaaataatcatctctgttggttactatttccgcaatcatcatctattgtaatttgttttcgttgtcagactatatccaaactaaatactctaagtgcttccaaataatcatatacattgattactgctttcttaatattgatccatcccagtttcctttcattctaacaaaactttcgtgtaccctatcatataatcaaagtaatattcacatattgtcttactttaaagtccttttgctttcactacaaactattcttctaaattttttctacaaggttccgcagcaacgtgcggggtaccttctagtaatactatacaagtgatccccacttagtgtagttattaggattttgctgagttctggtgaagccacgtcacccttttaatctcagtcgttcgatcagttgctacagacggtccgatgtattccatccttccctaagcgtcgcctccctcctccaccgagcgcggattctccgccgccgccgccgggcgcgctcctctccccgcgtgcgctcctctcctttccccaccagcccccgcgcgcaactcctcccttccccacatcgcgcgcgcgccaggcgcgggcccggcgccgactgctcttgctcctttccccaatcgcgcgcacgcgtcaggcgcgggcccgccgccggccgctctcgcatccccgcgccgcttctcctccaaccctctccccccggcgcttcttctccaatccacccccctctagcgcttctcctccccctccccccccaatctttgtttcatccgagctttcacttctgcgaggttgtgtgttcttctacgggattctctccccggcgattctctggccgcttctcctccctccgtatatctattgagtcgagtgatggatgccacaggcgatttgtgttcttgcttcctatcttcagtccctgcatgtatcgatcaaaattgaggagtttctatcaggctgtctgctcctgctgctgcagaaacgagtgtaaggtaaatttctccatccaatacgtatctctgtttgataaaatgcccacatgtatcctgtatttcaggtagacaagtagcatcagccactaggcatcatgattcacttttgagtttccatttttatggtgatcttctgcaaacgacttttgaatatatatagttgtccaaagatgcagcctatggatacatgttaagacattaaggtaacaagtgatatgagcaatgtttgtctccctaaatcagtattcatgcatcgttctagggtgggggatatttgccaataatttctttgtaacataaaacctcaggattataagttttagcctgtattttcctaacattgctactaatattggatgcaagatatagtatgattcaacacgtcaaatttgagtcaattcatggtatttatttggtttccactaaccctgttcatggtatataaatcaaatttacaactttgctgtagctataatttgttgtgtttataaatttatattgcagttcattcccattcctattgtctactatcattgtagcagcagctatgggctatcactgaggtcagtctccataacattcccatccaaagcagcggcttatctggtttctccatatgagttctctatcaagaaaatatcccaatatatttggtaccacatattcgttcatggtcaccgactttccagatattataatacaaccatcctatgatatcttctttgtaagaggtactaagcaattttctcctttgctgtgccattatcctctcacttcaggtagccgatatcatcttttatattttactcattcattcatttatttgttctttttatctcttgctagattgttagctcaggttaatctttgttctcccccctccccctcctataaacaaataaccaaaagtttgtttggaagattcagtatcttcggtaagcagaggtggtcaaagttacattctacctggatggccactcgaggaaaattggcctcccctttgatgctaaataatatatccttacaagtttgtgatcccctacctctctaccttcccatttcatctgtttgtcactaatgaaaattatgatggtgatttcagaacattcaagggatttgatctatttcacatttctttcagatcaatataactccttttcatcgtaatgatataatggcatcaagtgatttgatcaagcacaagaaagagtgctactgctacagtgcggagttacatatttgatttttggcatgttcagaacttcttttgaccaatttctatgttctcagaattttgttaccatcattcacttagtatggttactgttcttgatgaataccttgtgaaaaaaaaaccatggattaagccttttaccttacggatttcatgcatcaaatattgcataatttttttatttcatcgaaaagatataagctctactacgataaattcgtcagttcagccgatgaagtttgcaatattgcagtatgaggtaaaatggatgtttcagtggattcagtcactgaatttcacttccttttgctaaaaagtaatttgaatacaacattttttaaaccatataatacaatattaatgttttccttgcctcataaatattagaattatcatatatttgtttatctattttcatatcattttgcagtgccacgtcctatataggttggctttgcgcaaccttttacatcgttgctcgattcgtcatcacattgttagctgggggagctagactaatcttatg

SEQ ID NO: 6066 - DNA, 8401 bp, Oryza sativa
gggggcttttgcggcgaatacaagattttgcattggacggttccggatagcctcaccagtagggtaagtcattgtggacttttaaaatgggagggggagggggctcgccggggggcctcgctgacgccgttaactctttccgattagccggcgaggcgggcagcggcgcggtggggtggtggcggcggtggatcacgcgtgggacgggaggaggagggtggcgacgtgatctggaatggggggaggaggagaggagttaggttaagtggtctgcatgaatcttgaagcatatccaatggtctaaaattcgaatgataggaggtgggattttctgtcacaagatgtatagacaaccccttttcaaaatgtagaatttcagcatgcaccatgattgttcattttgcatttggatgcttcacaaggggaaaatacaggatctgaagagagttaaatacaacaatttttttataagttccaatacgatgtcagaattcttaatatatatattaacatattggatttgatgaagaataggaatttaatggttagtcataaactttatagtgctatgagagagtgtgcaaaaggtattatagaagaaattacaacataaaaaataaactagggaactgaagtccaactcatctcatctatactttctatatagttggtacccactaacaattattagaagctaaagctcaacatacatgcatgctacatcatcacccactagcaattatattattctagcccatttaaaatcccatgcaagtatgccacatcttctctcactagcaattactattctatcatattttaaatcctatgtaagcattgacacatcatctataatactccctccgtttctaaatatttgacaccgttgactttttagcatatgtttgaccgttcgtcttattcaaaaacttttgtgaaatatgtaaaactatatatatacatataagtatgtttaacaatgaatcaaatgatagaaaaagaattaataattacttaaattttttgaataagacgaacggtcaaacatatttaaaaaagtcaacggcgtcaaatatttagaaacggagtattatattatagagatcaacaagtatgtgtcaaatcatcttcctcacattattttctcaacattttaactttcatcatttcgataatatttatcatattcatgaatcccgcagcaaagcgtggggcatcacctagtttagagaatgcatgtccgccgaaaaaagatttaaaagcatactgcttgttataaatataaaatgcctacgaaatcatgtgcacaacccattatttcacattttttttactaaatatattcatattttatgacaaaatagagaatattatctttaccatatacgcaggtgaccaaattgccatacgaggtaaaaaagaatataccatatggaataatatgatttggtctttaatctgccagaaaccttatagggtttcaatttaaatagatcaaaggctattacccacaagtcaaggataagttaacccataaaaatggtcgatacatcatcccgtacttgttgtactgccaacttaattaaccccttaatatggtcaaacactaatgcaaggtctgttaaataggttacttgtttgtcacgcccagaaattcacgaaccagaatttctaagctgaatatgtattaaacccctgtccaggaccagccagggtacacaaacgacaattgttgacatacagatccacgtcttacaaaaatataaaggattacaaatgcagcggaaaaggtaaaagcgagctaagcctgaagacttgactcctgcagcgggcgattccattcctcaggcaacccttgacggcagcgacgaaaccaatctcttcaagacatctccaactgagaagaacttcaactctggtgtgtgggaaaagagcaagactgagtactacccactgtaatcagcaagtcataccggaggaggaggtatgatgcaggatataaccaacggaggctacggggttcatttgcataaagcaggcatttaaaaccagtagttgaaaacagaaaaaaacagttgtagtaattaagcaatattaaccagtcactgtccaacgctacgccacgttgcaacaggcccaaccaaccacctgaactacaccagttcattaagctaaactaggggtgagactaatcacggtgaatctggtcgaccgcccataaccgcgggcacggctattcgaatagttttactctgatcagaggtgtacaactgtacccacaagacatagccccacgacacgttcccgtgcgccgacatgccaccacgacataccggaaagaggccgtgacaggacccttcgcataaccctctctaacgatcgcaccacaccttagggtccgcccccgtccccagcaggcaacgggcagcccccctttcatgccgcggtgaatccggaagccgatcaaccggacaccccggccgacccaactccatcacgcccaccctcgcctgggtacgtcggttagagaaaagctacactacaagcccagctgttgcccacgctggcttgtggtaagtacaataagttcttccagggcatcccgcgaaccggtccttaatcgccatgggcacgactagcaaaaccatgcacccacagcccaccatgtagtgtattttaattaaccaaccctattgcggtggcactattccaaaactattgctaataatcaaagcctatgctttagtgtgatccccttttgtgcactagttgaactaagcatggctaagcatctcctaaaccaacatctagtcattttaatacccaagttatcaatggcgtaagggaaacaacatatagctgagtaataggaccaatcccacatgatattgtaaaacagtgcaatatttaatagaaatgcgggacatttgtaaattgggtacaatatgatcaattgcaatgtatgacttgccttgctctcgcactgatggaaccacagcaacgtcttcgagaaaccacgaatcgacgaaacgggcgaaatctacgcgacaaacaaagcacacaagcaaaacatgctataagactactgaaacaggaaacaaaaccattttttatggattctatacatttttatgaatttactgagacttgaatggacttaatcggagctcggatgaattagttatgatttttagaagattatctgtgtttttactaataaagaaaaagccttaatgcatttattgcgcaatattgccccagggctgacgtcagcacaaggaggggtggcgctgacacgcgggacccgcgggtcagtgactcaaggagagagaggggcggctggcaagcgggccccaccgagcggcggctcaaggggaggaggagacgcccggtcggctcggctcggcctcaaaccggccgaccggttatggcgagggcggtggcgcgcacgcacggtcgccggcgacggcaaccggaggcgcgggaagcggcggcggatgacggcggcgcgaaggcggcgacacacagccgaagcggcggctcggcccggcacggcgctaggagggagagaaaggggaaaagagggggaggggcgcctcaccgcgagttggccggcgtgggggaaagacgacggcgaacggcgacggcgagcgaccggggaacggcgacgataggcggacgagctccgagacctcatagggaacaagatgggagggattagagggagaggggtggttaacggcgagcggattcgccggtcgaaggcggcgtccatgggggtactcaccggcacgcgaggagaagcaagctccggcggcgagattgaccggggaaacggcggacggggtggcgcacaagcttgcgaacccggcggcgtcgacggcgcggtgcggcgacggctctagcggtggcggagtgcggccggagcttggcggcgagcggcggatggcgggatgagaggcgcgggagcgatggagagctcgggagggctcggccgagaaaggaaaaagagagaggaaggtgcgggcgtgcttaaataggaggggggcggcgagttgtggccgggaacggcgcaattttgccggagtagtggaggaggtggaggaggagagagagagagaggcgggattcaaatttgaatcccggccatctcgcgggcgcggggtgattggagtggggcgtgggcgcggggagggcggggcgcgcgggggagtgggcgacgtggcccggggcgcggagtggggcgcggaaggcgggcggcgatgggtggtggtttcggcggcggttggcgcgggcgtgggcggccggaggttagggaaagggctgacaggtgggccccacctgtcagtgcccgagagggagaaagaggccaggtgaacttcgggagtaggagggaggagcgggccggcgcgggaggaaatgggccggcggcccaagaaaaggaaaaaggagggaaaagaaaagataaaaaggaaaaaggattttcccagggatttaatattgcactttgcttattttaattgattaaaattatttccaaggctctgaaaattccactaaaaatcctgttagtgaattttgacatgtagaactcaagaaaaattccacatgccaattccgattattatttgcatttattaattagggattcatctctaggttaaattaaacaatttcttcggatgatttattttatgaatttagagcaagggaggggaacttcagggcgtgacattgttgaacacaaaatctgagttaatttatcatatttggtttaagctggttattctaaccccaaactgaactcatcttagatctttggtacaaagtggaggcaaatagtataacgacaaatctacaatcatcacaactgataaaggtagtttgagaaataaataaaatgttacagttctttcttttgcttctaaaggtaatactctatccatttctttatatttatcacagttgactggtactgttacaactttaaccactaaaaaaatttaaatgaaatcttaatatttatgtttattatgctatacattttgacaatatgacatctatttaagtatgtagaatttctttttgcaaaaagaaagatggtcaaagtttaaatgtgaatattgcttggtgataaatataagggaacggaggaagtagtatcaagagttagtatttgatgaggacttaattgggtttagatgatatttttatgagagaatctactcaaagacattgagtttgttctaatttaataatttttcattgacattatcttttcctataattaccattattttaaaatgtaccactggggtcggtcttttttttttctaacagacctattacccgtaagatgcaaggctaatatttatctcattagaagtttcaaaataatatatgaattttttatgtagcctccttatacaatatagaaatttgcatataagttccatttttcatttttattttttaaaagttatttttgtgcggtatatgaaattgtttacgcaaaagataatgtcacacaaatattttgtgtacaatataaaagatgatttacattaaaaacaacaactggaaaattctatttatatatatatatatatatagcatctaacaaataaattacattttaaaaaagaaatgcaaaaatcttttatacatatcaccctatgctaatgtttagcctaccaattcatgactaaacattagctctcaaaattagccatgggctaatcttttaaacatggccttattcatgtatgaaagatacacaaaacaattatttgttcatgaaaggaaatgaaaggaaaccatgatcattctagaatgattgaaagaaatccagaaggcatcaaatatgctcatacgctttaaaaagttgtaacaacatcaataaaaagaatgtagaataaatatgttttgacaaaattaatcgattggagctcatgtcctcgagctacatcacctggtgagtggcgactgcaacacaaaattatagtctgcttacgacaatgaagcatacgcaaagatatcctatctaaaccaacgtactgaaatttgtctcctttttataaaaaggattatcaaaatttacttctttaaagggaaaacatcaataaatcgtgacaacgaagtcgatgaaagaaaatcgtgaaagaaaaccacccaagcgtctctttcacacgcctgtgagatgaggtagccggaggcggcaagaaaaaaaaagaagcaaataaccaaaaagccgaggaaaagaacagaaacaaacaacacccaatcaagaaaaatgaaaatgaaaagaaagaagaaaaaacaaaagaattatctgcctgaaaaaagatttgaaaaaacccggagacgcgttggtttaatccatctccccccctccccttttctatccctctcctcgtgaatcctcgcctctccagccgtcccgtgctccgctccactggcgcccttctggaaccctcaccccctcctaaatccaaccaaatttccctcttctcttagcccaaatcacttccccttgttccaaatcccgcttcgatccagcagccgcggtcgggttcgtggcgaggttggagtgctcctgccgaattcgggcggttttgctgggggcaccgagagttgctgccatctgtggtgatctgatccggcggcgcgcggcgggagtggtggtggtctccgttggttctggaagtggtggtaagagctatgtggattgaggcgtcgccggattgagcatgaggggtggggttgctggtggtggtggtggtggtggcgcgccgccggtgtgcgtggcttggatgatggatcaccgagggcggttagtggagctgtttggcgcggtgaagtcgtggatgccgcggcggggagatcactctccgcctccgccgctgccgccgccgccggcgtcgcaggtgggtgctgggggtggtggtggcgcggcatcgccgcagccgcatgatttgtcgagggacttctggatgccggaccagagctgccgcgtgtgctacgactgcgacgcgcagttcaccatcctgaaccggcgccaccactgccgccactgcggccgcgtgttctgtgcccggtgcacggccaactccgtgccgcgcgcgccgggggacgccgcgcgtgaggacggcgagcggatcagggtctgcaattactgcttcaggcgctggctggaggaggaggcggcggctcggagggacgtggcgcagccatcgagcccggtgctgagcccgtcggcgtctgccgtgagcatcgggagcgacaagtccagttcgactgcgcgtagcagcgccgggacgaacggccagatgtcgtcttacacgaatgttagctacactgacttcccatctatggcagtcgagggccagggtgagtgctgcgagagggaaggttgtgcagagaagcagctgcctgcaatggagccggctgggggcgtggagcctgcgacttatgtggacaacacatcggatccatacaattttggcataaataggtatgcctttatgagctttttgctttgctcaataagaaaatgaagcctaactagttgtactgccatctaggaagtaagatcacatatatgcatggttgtctgatattctgataggaacttgcattcagcttctgagaacattgctgcatatcatgttggattttgttaaaaggcattggacaaaaggtagctgctaatttgttcaaaatatttttgttttccttctggatgcttggacttgaaaatccatgtagttgcgctttgatattttatattggagagcttgcccgctgacattgcttttgatacatgcgcacaaatgctatctcaaacttagagtatactcgttgctttcatttggtgttcattatagggtgccatcaaattagtctcaaatctatgccttatggtgctcatttatgtttgttcatggtagtgtaatataagcaattaaaattaagcataggttatgggctggctggtggttagccaacaagtgtgattggaactagttacacgattttgctcttaatcatcagcattgaaacagttgtctggaaggtgcagacgggaaagtatggtcacatgctattttccatttttcaatactccaattgtgtggtactacctccatttcaggttataagactttctagcattgcccacattaatatagatgtgaatgaatctaggcacacatatatttttagattcattaatatattttttgaatgggggcaatgctataaagttttttaacatgaaatggaggaagttttctttttttaattcatagcataaaggattactcagctttttttagaaggcttagtgccttattacttttaattgcaaatcgttaactcaatatggtgaaattacgttttg

SEQ ID NO: 6067 - DNA, 34719 bp, Oryza sativa
  unsure (1)..(34719): unsure at all n locations
cgtcgtgctatccgaatataagagccaggtggtgtttttaaggccattttgtcagggaaagaaaatacccaagtttcgcttattaaaaaataagattgtggggaggaacgtaaaaagttttgaatgagaacttctggatgatagatcctaagtaggtaaattgatgtagataaacttgttaatgtataagacaaaattttaacttcaaaaatgatttattttgacatggaggaaatgccaggaagcataggatatatgtcacatcgaatccggtggggtagagaccaaatcatttctaattggagtatgataggcagaaatcagaaataatgtggacggttgtcagttggtcgttacacaacaataaaatgattcctgggcttatcccctaaaaagtaacgcaagaaattagttgggtgcgctgcagtactaccctagatattgggttgattgctgctgcatatatcatggtgtgggcaatgctagaaagtcttataatatgaaacggaggaagtattttttttttcaattcatagacataaagatttacccagctttatttagtaagcttagtgccttataacttccaactgacaattgtttaactcattatggtgacattctgttttgcttttcctgctgatatcaacatgtttcacactctgtgccaatttttattgtctaattggcatagctgccaatctgttattgctcatctgtgccaaaaaccatgtcaaattgttgcatattctgtagtccttttttttaatgagatgccacaaagttacttgataatcagtaacccagtttttgcactagtttagcattagcacttaatttcatgataattagtaccccagtttttgcactagtttagcattagtacttaatttcatgctttattctctggaaatatcttgcacatgaatcaacaaatgaaaggaagatatgcattattaaggttcaaggagcattattttgacaatccaacacctgttttgtgccaggagtgatgatgaggatgatgattatgcagttttccactcagattcaaaaacacaacacttgcaaaattctgatgagtacttcaaaactgtgtgttttgatgctcatcaagttgattgtagtcatgtaaaagaatctgtttctccgatgcaagatacggaaaattttattggttctgtgggagtagataagactggagatcacatcatggataatactgaggaatgcaatactcgatcttcttccttgtatagcatggaaatgctagaaaatgagcctgtagattttgaaaacaatagctcactctggctgcctcctgaacctgaggatgaagaggacgaccatgatggtgctttatgtgatgaggatgatggggaggatgccacaggagagtggggatatctacgctcaaacagttttggcagcggacattgtcgaagtagagataagtcagctgaggaacacaagagagccatgaaagacattgttgatgggcattttcgggcattggttgctcaacttcttcaggcggaaaaggtacagttggttgataaatctggcaaacagagttggctagatatagttacttctctgtcttgggaagctgcatctattctaaaaccagataccagcaaagggggacggatggaccctggtggctatgtgaaggtgaaatgcttggcttgtggtcgtccaagtgataggtaaacaaatttacccttctgcagattatggtcaaactgttatgattttatatctgtctgctttggagtattcattttccttatagttaaaaaaatatgaatacgacagtgactcagccttttgtaattcaaattcatgatgcaaacttgctggcaattttgttttatcaagttattggcctttgaaatttcacactttattactttttcgtatcttattagtgctccatgtaagagcttcattttggttctttatttccagttttgttgtaaaaggagttgtttgtaagaagaatgttgctcatcggcgcatggcgtcacggaaagaaaagccacgcatcctgatccttggtggtgcacttgaatatcagcgcatatcgaatttgctttcaagttttgatactttactgcagcaggtattgccattaatatctttttatgcatatgttgtaaagccgaagttcattttaagggcggtatagattgaatgttatgttgctattggtgatgcgttgtcatgtcctttttgctccaggaaacagattatttgaaaatggcagttgcaaagatcaaagcccaccaaccaagtgtagtgttggtagagaaatctgtgtctcgatatgctcaggatttattcttggagaaaaacatttcacttgttctgaatatcaaaaggccacttctggaaaggatatcacgttgcactggtgctcatatagttccgtcaattgattacgtgtcatcccaaaagcttgggcattgtgatctattccatgtggagaaatatgttgaagagcatgggactgctggagaaggtggaaagaaaatgctgaagacccttatgttttttgaaggctgcccaaagcccttgggttgtacagtaagtattcagttgctaactcagtatctcagttataacacttaccatttgtcatatgttgcagctcctttgctttatctatttaatccttagtctgtgaagcattcctttaaaccataccgtactttattttttcctccctaaaccctaatatgagtattcagctgaaatataacaatggaaagggggaaaaaacaaatcaatgcatttcaaggatacagtgaaggttgaggttgaatcaaatcaatacattgaaaaataacctgcaagtgatcatgtattaatttctgtgcaatatgatttgttaagaacctattccttcacaaacaactaatatcatttggtattaccctggcgtggatgtttgctccttgaagagtgtagcgcttcacgatcaacgttaatacttactctagtactttacgaaagaattgaataataaaattgaagtcaatttcatgtgctaactattcctaatctgtagatattgctcaaaggagctaatggcgatgagctgaaaaaagtgaagcatgttgtgcaatatggagtctttgcagcctatcacttggctctggaaacatcttttcttgtggatgaaggtgcaacacttccagaactccctcttaagtcaccaattattgttgctttgccagataagccttctagtgccgatagatccatttcaactatacctattttacaaatgcctactgcttcatcaccaaacgatagcttgcaagcatttgatgtgcaaacggatggttcaacatttaatggttttcaaacaatggaccaaacaatggtaatgtgctctcctgagtataaaagctgcaaaaaactgggagctggttctgcccaaaccgaatctgcccatttcaatggccaggataaaaatattgcctgtttgcatggtatggttccttggtcatctactgatcccttggttcagcaatcggccagttcactttgtcattgtccttcttgttctagagatgtagttaataaaaagcattttgaagaacgtcaacctgaaacatctggacataccctggataatgatttcaatgcgttgtctgcacatcgaacaaatttggagtctgttgagagcggtcacttatttgcctataattctgagaatggtgacaagataagagctaaactgtctgttcctctcaatgtgcaaatttctcttgatgatgacagttcaaaggatgattcagtaataaaaaaagatgaaattccggcatctcctgctgacaaccagagtatattggtttctctgtcttcccgttgtgtttggaaagaaactgtttgtcagcggccacaccttctccgcataaagtattatggcaactttgacaagcctttaggaagatttctgcgtgaccagctctttgatcaggttagattgtcattctcgaattcaatttatagaaactttatatactgcttaactttgacattttgtttcagaacaataattgtatctcttgtgagttgccaccggaggcccatgtttattgctatgtccacccgcaaggcagcttaacaatttcagtgaggaaacttgcagtgaagttgcctggtgaacatgatggtaaaatatggatgtggcatagatgcttacgatgtcctcgtgttattgggctccctccagcgactaaaagagtagtgatgtctgatgctgcctggggcttgtcctttggaaaatttctggaacttagcttctcaaatcatgcggcagctagtagggtagccagttgtggccattctcttcacagggattgccttcgtttttacgggtatcccctcactcctcttcaatttcattaaattggtaaatactatggcttacatgtttgtattttagctttggtgaaatggttgcttgcttccgatatgcatcgatcaaggttcattcagtgtatttgccaccaccgaaacttgatttcacttctcagcaccaggaatgggtagagcaagaagcaaatgaggtaggctgtttaattttgtgagcaattatgtgataatttctggttgacgctaattgtctatgattcaggtggttgactcagctgaacttctgttcactgaagtactgaatgcactccaccaaatttcagagggaaggccaattacaggttcttttgatggcaacatgaaaatcctcgagttaagaaggaacatcatggagctggaagagatcctgcaaatagagaaagcagattttacggtaaattattatttttatttatgttttgttatggagccatggctccatttggctctgttcaaaaaaatgacacattattaaagttgtatgctaattattggagcattcacctttaggaatcattgaagaatctactgaacaaggagatcagaaaggggaagccattcattgatattcttgaggttaacaaactaaggaggcagctactgtttctgtgttacctgtgggatcagcggctaatctttatagcaaattcaggtggcaagtactgtgacacactaggaggtttacgggttgggagtaggagttctgactctaacgataaatcagttgataccaatgcaactacaaaactagagaagagctcaaagggctccgaagttctttcaaatgctaaggaaggatccttgaagcagagccaaagtccacttcatgctaatgacaaggagcccaaccaacctgatcaatctaatggaaatagttcaaggattggtgcagggttgaatggcatggaagatgcgattgccaaaatcaatcattctaacagcgcagatgttaaggataacctggatcatcaagaatccagtattggtgttcgtagggttctttctgatggtcagtttccagtaaatgctgatatttcagacacattggatgcaaaatggagaggtgaaaatggaacagttcctgatacaagtatcctgaaaccattagctctgctagaaggttcagctgatcttaaaaaccaagctaaggcagtgccaaccaatgcttctttatctgtcaggtctggagatacagtagaagacttatcaagctggctcaaaatgccatacatgacattctatgactccttaaacacaaattctgggacagcaccgagatttggggccctggctgactacaatcctgtgtacattacattgttccgtgagttatcacagcaaggtggagcaagactttttctgccaactggagctaatgatgttgttattccagtatttgatgatgaaccgaccagtataatttcttatgcacttgtttcacccatgtactgtcaccaaatgttggatgagaacagcaagaacaaagatggtccagattcttcacttccattgcctgtatatgattctggaaattttaatccttttcatttatttgaggatttcggatccgctgatgatcttgcttcgtcaatatctggaaccagagggtcatttgttcccgatctagttcacctaagagttccctttgaggatggtggcccactcgggaaggtgaaatacacagtgacgtgctactatgcgaaaagctttgaagctcttagaaggtcttgctgtccatctgaacttgactttttaagatctatcagtcgatgcaagaaatggggagcacaaggtggcaaaagcaatgtgttttttgcaaaatctctggatgatagatttataataaagcaggtcacaaaaacagaacttgaatcattccttaagtttggactagattattttaaatatttatcagagtctataagcaccggaagccctacatcccttgcaaagattctgggaatctatcaggtatatccctttgaccttctgttttctgttttattgatcactttggttctaagaagaaacttaattcttttgattcaagagaaaaatagctaggggcatttggctatcaagcagagcctcgattttaaatgtagctctgtctgtcactcatgagtagtgacaaatctttgggccacagccaaattgtacagcaggtggaagaaataataaaatgtttctttccatccaagcaacttatgtgatactcatatgttgttaacttacttgtgggttaacttatgtactagttcctattttacagggaaaaagcaaaacctgacttttctagaaaaaaaaaccacatttatgtgatactattcgagttatcagattaaaatagtagcatttgtaggaaatctcactaaagttctatgttttatgtgtctgatattttctggtgtttaggagcacagtttttatttcttatccaattatccactttacaatcatattttaagtttaacatggtacaagttgtaactggaagggatatgtatttattctgtttacatttgcttgtttaagttacattcagctctatttctttatctttaaacatgatcaattgcaaatttcattaaatatatgtaagaactgcgatctatacaggttttggaggtctatttttttcgtacaacttgttaggcgactacctgcaattgcttaatttgatctagtatgtgttccattaaacgctccttcagaaatctcaacccataacccagtatttggaggaagtattgcaactttggaccgatggacctatttttctctctctcagaagctcctggattaatcaagagcaataatccatgatttatatagtcatagcattatgcatgctgtattgatgatagatgctcacatttattggctggaatggccttgctgaagtatctgataggtagattttccactatgaagcttacttatactaaaaggtctatgtttttgcttaggttacaattaagcatgtgaagggtggcaaggagtcaaaaatggatttacttgtgatggaaaatcttttatttggacggaatattacaaggctctatgatctcaagggatcttcgaggtcaaggtataatgctgattccagcagcaacaaggttcttcttgaccagaacttgattgaggcaatgccaacgtcaccaattttcgttgggaacaaggcaaagaggcttctggaaagagctgtttggaatgatacttcctttctggcagtaagttcagattctgatagtgagaattatctcattcatacatgaatccttgagctaagacttaaaaattattcaatattttcaaatcttcacctttaactttggcctcttacagtcactacctaaggtgctctttttttttttttcagtcttcatcttgatttatgtctaaaagttgcttacaatttataagagggtagggaatgttgcacagtttccttaaagatctttatttttcactcacaaaaaaaatctttatttccttgcaaattattcgttttcccttactagtatgaaaataatcaggagaggagccactgcccgggctcagtggcaaaaacaccattaaatttatatgttgttgaatgaatttaatgttcattcaacaataatcttgtgttgttttgtcagacaatatatttaggatttagtgttctcatgcttgaagccttgaagatcatcctgtcttcaggcctgttcactttgatgtcattttcaacattactaaattttggtaaaattgtcaaaaaaagtggctgcatttagtttgctgccaaattttggtaactatataagaaatcctgcaaaaattttggcaacttgccaaaattttggcaactaactatgccaaaatttcggcaatgccaaaatttggtaaggttttttttggcatcaaagtgaacaggcctttcgatgttttggctgtagcacctgaagctaaggtttataagttcctagcagaggcatatagaatgtttttttttttttttcaagaaagaggcatatacaatgttaacttcatacttgccgctgttgtctatttccttaatgtttttcattctcttcaattttggtagggtttatgagacaggctgataagatttattgcaggccagtagcagcattcgatatatcttctcatatgactcattaatgaagtcttgtcctcttgtagggaattgatgtgatggattactcattgcttgtgggagttgacgaggagaaacatgaattggttctgggaataattgattttatgaggcagtatacatgggacaagcacctcgagacatgggtcaaatcgtccggtattctcggcgggccgaagaatgcccctccaactgtgatttcacccatgcagtataagaagcggtttagaaaagctatgtctgcttattttattgtaattccggagcaatggatgcctgcaataatcaatccgagcaaatcatcatcaaatctttgccaagaagatcctcaaaatgcttcacaagagtagtacaatattcagttcattatgccaggcagagagcacctggttttttgtcttgatccaatcaaaagcgccaaacgatcagtctggatgctgcggcatcaatgtggtattacgactgcaattatcaaaatgcttggactctcatttgcacagatccgattgcagtggagtcgtcttggctcaagaatcatcgggtgtatatatccttgaaactgtaattatgcattagtttttttattttctttttgatttattatgtaataatataatgtcgtcgcttctctctagttcccattccattttggttggatgtaaacaatagaagtggggcattttttttttgtaagtgctcgttgtatattattatatatatatgccatgttatttatttgggggggctattgccgtctgtaataacaaaaataagagtagttcatgcaaatgtcctgcgtccaaactcttctggcaggagaatgttgaggtctggaataagaaacagaaactgccataaaagagaggccagaaagctccttctgtgtgcataacagctactgttccgcttatgtgcatatgtttggaaacaatggctatatggcttgcctaatttcgcgctctgaagaataataacttcttttgcaagacaaacgatactgaattggctagactggtcgaatcagaggtttgaagacttcagatatagtattccacaaaaataaggtttggataatttcactatcctccaccgactttatagtacaattatacatgatgggattgaggttgaaagacaatatgaacattttcatgtgtgttaccggaaaagttcatttcaattccacctgcctccatattgattcgaattgaaatttggaagtaagctattcatttttctctagcaaccagtaaccctctcccgatccttctttatgccattagataggccggtagtgccatatattggaaatccatccggttttgggttgatttatttcctccaattatcccatccactttctttctatcaagatttcaatccactttctttctatacatttctctgattcgtgtagtttatactatattaacagcagcttttgtgtttccaaaaaaaaaaaaagtagtattgggttcagcttaaccccatgcctccacacgttaactccgcccctgccgggatagtttgagcaagatggcggcggacggcggcgacggcagcggcggcggcaggaagacgccgtggacgcaggaggaggacgaggcgctgcgtcgcgcggtgcgcgagcaccggcggcagaactgggcggagatcgcgctggcgctgccccggcgcgggcccaagtcgtgccggctgcggtggtgccagcacctgtcgccggagctggacagccgggtcttcaccgccgaggaggacgcgatcatcctcgcgcagcagcgcgtgcacggcaacaagtgggccaccatcgcgcgctgcctccccggccgctacgacaacgccgtcaagaaccggtggaactcggcgctccgcaagctgctgcaagtgcaacacgccagcggcgccggctccccgccggccgctgccgccgccgccgccggagacgaccgggacgatgccccagtctgcctccagctgttccccgcgagggccgggggcgtgaaggaggctggcttattcgccggtgagaaggatgtggaggaggaggacgtggcgaccagcctgacgctggggttgccggtgctgtgcgaggcggagctggagctcaggctggggcctgcgtggccggccaccgcgtgaacccgtttcgtggctggccattgcgaccggcgtcgaaccgtgcatctagctagaagtttaaaggtttactatggttcaatttggggacatttgtgcgagtgcaattcatttttaattcccaaagctaggagaaatcccaaaattagctcttccaccgtgccacgtcaactactttctggaaaatgtcaccggatccacctcctgattcggccggggtaaaattctagcgtcgcaccaaggctaaaatgcagcccagtagcccaccaaggccatgtttagtatgggccaaaccatgtcgatcctcccgagagaaggcccggaattttgaactaaataattcggcctatgccaaacaaggccgaagtgaagcctcaggtccattatggaagcccataatctttagtccactcctattacaggccgaaatctaaaaccacaatgggccgaagatgtgggctgccgaaacaggccttacaaactggtatggtaagcccataaatgtaagcccgtacgtggcccacacaacacgtgaagttgggcccaagtcccaaaattccatttgacacaaccaaaacaggccctacgtttctcgctcttccagtctttctcctctttctctctctctcgcaagtctcgattactaccgggaaggccattcccagtgctccgaccgccgcgccaatcaaccgccgtcagccaccggacagccggccgccgccgccgcgcgtcccacttggcccgcatcgcaacgccaccaggggacgcgaccgccgcctccccacccctccggcaacgcccgcccggggccgcggccgcatcagccgcccgccgccggggacgcccatggcgacgacgccggagacgctgcccaactcggaggccgtctcccacgcctacaagttcgcctccacctgggagaaggtcggtttcctcgcttcgctgcgcgtcgggtgggtgtgtgatccagtggtagcactggtggatctgatctgatggacttgggctttcgctgctgcagaacgcgccgctcacggagcagcagaatgccgcgatcgccgcgctctcccgcgccgtgtccgagcggccgttcccggccaacctggtgaggcgccacatctcgggattgtgtgcgatggtttgatccataggccctgttgcttgcgatgactaaatgttgtgatctgatgctaccatggtttggtttagtttagtttgccgtgctatgctcgggatagactagcccgtcaattgtacttgaaggatttgagatatttcattagttgcaacacagcatacatactccatttggtagttcagcggtagcggttagtttggtttataattgacagtacatgagtcaggtgaatttgcagttctgtttcgttggtgatgtttctgtgccactattagctcactctccacaattcaatactctagctagtgctggatttgtgatgatgtttgatgtttcaattgggtatcaaatgggtttataagtgcgttgtttttatggtcttgttatgttatttcattggagggttgctttttttaatttgatagaaggctgtattttgaggtctatttcccttccggctttatattattgcttgacattaaaacatattgctgggtgttacatcaggagaaaagtttagtgaaggatgggggtgtggttgtgccagaaaaagaggctgcattagaggagggtgcaatggatgcagtcttggtgaatacgcatcaggttagtttcataatcttgttgatatatcacttgtatgattgatcagagaatttcggtattctatctattcaaccttaagttgtgtcaggatagaaggtaaactatttctgcaggttgagctaatacctttattacctcctgtagttctacaaatggttttctgaactggaatcagctatgaaatctgaggtttgtgcatgttcatttcttttgttagtgatggcaacttgtggtaaaacaatgattttacccctctagtttatttgacagacggaagaaaagtatcgtctctacgagagtacattagaggaacgtgttaaaacatgtgatggtattcttcaacaagtaggtttatgaacccttttgtttgttaatatttgcaaaatcttttaaggaacatggatgctcttatccttttcaatataacatatttaaaatatgtccattcaggtggatgacacactgaacttatttgaagaactgcaatcgttgcatttgagtgttgccacaaagacaaaaactttgcacgatgcttgcgaccaacttgtatgcacccttttctctaagattctaaatacttgcacttttgctattctttctgttatttttttggcattttgtcagattagttatttatagtgaaacttccactctaaaggactgttactctgccatgtgcacataaaccacttttaagaatgtattcaatattagtgaaacttaacagatcgcctgccttgtattgtgcagctttggtaaatttacaatatggcattttaggtgcccaaaggaaaaactcattggcctgtttgtcatcttggacctcatgttaatgatcttattagtgatatattttgtatagctcttatctactcttttagtttgaacagaattacaaaattctttgatgcagtttcaacacatatagatttaacattacaaaactgttgcattaataaaaacaaatcattctagtaatcttttgtttgtaggaactgtattatgatctacaagcatgcttcatttcatatacccctgtttgagataattttttgaccagattattgctaaggattatctactttaaaagcagggaaaaaggaaatattttgagaaataaacttaacaaacagcttagaacaagtgatctaagcaatgcagtagttttttttttggaaaacgtatttttcgaagcatgaagcaaataatccgtttcaacaatctggtgaataatctgaaaagaacagggcctaaatgaacacatgagttaccttttaactacccttttttgtgtagtattctcttagtttattcatgtcgtaaatgcaaatatatattctcattttgccatattgctggtccctcttccgtttttttaatgaagtgtttcagtcaatggactatcatttctaaattcgaatgtaatgcagttgttggagaaacaaaggctgattgagtttgcagaagcacttcgaagtaggttgaactactttgatgaattggaaaatgtaaggtttggcatccctagtttgtctattgagcattagattaataaatttgattaaattaatgcctctcctacaagttctacatctcacacaagcataatgaattctgccatacatctactttgaaatttaattgttgaacttatgtgaaaccttattcaaaatttccaacgttatctactacatcctaatgcttgcatccttgatcattttgttagttggagaggtcagcatggtctccgtggttcatttgttccagaaaatgtttattccatgtttcggaggatatatactttagatttgatcccaatggatgtcttagatctgaattttgagctgattcgtattgtcaccttgtggttagtgctaacttgtacatgatgatgagtggcttgtatttttgaagatcccactgtttgctactgttctagtatattctgtagctgcataatcttgaacatttctggccactaaccacacttattcaattctaccatccaagtacacaatgtatcctgatgatctcattcatacattatctgtaatgttgattacacaatctgttttttttaaaatcctattttttctctggttaacctgcttcatatggtttaaaatactgtctccattttgcaggtctctactagcttttattctcaaactatgaacatcggaaatgaacaatttcttccacttttgaaacggctcgatgattgtatttcgtaagtagtaatagacaatgctctgtgtgtagttttagggtgctgagatttaaggagttcatgctgtatcctgtttgggtgcttataggtatgttgaaaataatccacaatatgctgaatctgcggtgtacttggttaagtttcgccaacttcaggtaaaggtctacttgaattgaactacatggatagtcatcacaggttagatactttgacctgataattatatgcttcttttattgcagtctcgtgcattaggtatgattcggtcacatgtcctgtcaatacttaaagccgcttcatcccaggtgattttcagttgaactttggtaggtaaatgcgatatgactactaaataccagataatagcttgattttatttcaggttcaagcggcgattcgaggtaatggttcagcaaaaaatgttgttacagagggtgtggaagcatcccttatctatgttcgcttcaaggcagctgctagtgaggtataccttttcatcaaatgatctacagttatatagaaaggcttaaacaaactgtagctatgtgatctatataccagtaacacctcaaagttataactctgctgcctctggttcttgttttccagcttaaaccaatcttaggtgagattgaaagtagatcttctaggaaagaatacacgcagattctttcagaatgtcacagcttgttctgcgaacagaggttatacttggtaagatcaaacaattattggttttatattttccttttttggcatggacctgattatttcttatcacttgttatgcaactaaagatacgaggcatggtgcagcaacgaatttctgaatttgctagaaaagaagctttgccttctctaacaagatctggatgtgcctatctgatggaggtaactgcatgtttaatactttctagttttcttattttcatctgtgttgtaggtttctctttccatattcagaaagttacatcttacagttgtacacgatagcattctgtaatgtagaagaattgagcaacacattgtatatttagtttcctaatattacgtgctctgcttactcctcatgctgagtatgatgcacttatcattattatttttggcatatttattctaaagcattgaaagttcttgatttttagttttatacaactgaaagtctcggggttcacttattagtatctcaaggtcacccaattcctcattttaccatttccatccttttgaggccaatagaagttagttatgatggcttcccctcaacctgggactttcaatgtcataaaactgaattctgagcctttgacggcacataaccaattttatctaatctccagtattcatgcttttatttttctctcctcttataatattcagctgattttgactgcaagacatattttactacttttcctgttgcttctcaggcatgccaatttgagcaccagctttttgctcactttttcccggcatctgcatcagatgtttcaagtattgctcctttaatggacccactgtaagcttttagtccctctggttcttatactgcaatgtaagcatctgtaatttgttctgcaaattcgctaaaacctgactttagacttgcataagtttttttattagctaaccaacaatcaaggaataggctttagaataaataggattttcaggaactagaaattatctggatcttaatataagaccccccaaaaattcctcaggcctataccagcttcctattagtgggctagtcaagtataaatgtgtaatcgaaccttaaattcctatgttaagatgagtttacagaagatttcatcaacttaagaaatagatagaagttcctttcctaaacaagagagatgattattgaagttctgtcatacaaaaagtttagaacctatagatatgttgacattgtaaatatattttcttgttaaaacatatggaacacagattatttggttagtttctgcaacacccttgttgtatgattcaaatttatattgacgtgtgtattgtgtagcgttcatacttttatgttatcaacttttcatctaaggtgattaactgaatatctgatatgcctttgtattcaggtgcacgtacttgtatgatactctgaggcctagactgatttatgagggaagcattgattctctgtgtgaactcgttgacattctgaaggtcgaagtgctaggggaacaactaagtagacgaggagaatcagtagctgggcttcgacccatattgcaaaggatacttgcagacgttcatgagcggttggccttttgtgctcggactcatattcgtgaggaggtactatttaaaatatgccccttattggtgacttcatgtttttttttcagtcagcatgttctcgtttgagtacgtggtgcatatttcgttcatttgttcgcaaataatgtatggttccaatgttgagaacagctgtcatgtggacttatgtcaagtttgttgtagaaccggcaatgcttttggggaaaacttgatggttaaatggcacttaaaataatatattagttatttgaagtgcttgacgttcttcactggtgatctgaatgagattcttttatgagcattgctggatgttgcatgccaattacaagggaaatggttgattattgtgtcatttgaagtttttgatagtgaacatattgttagcaatgtctgcagaactagaatgaactagccatgaattgaaaactgaacttgaagatcccctgacttttagttattatttagacaatcttgagctcaggaatgaaggagacttttcttatatattgtttaatctatttcatctttttttttttgttaattttgttttcttactattgttcagattgcaaacttccgcccttctgatgaagatctggattatcctggaaagcttgagagatccgtagatgcaactacaagttctaatgttagttttgttcttagtttaatgaaagttcatttcaatttaactcttcatggtcctagtcattcaataaaaatctgtcctaacagttggttcacacacagttttactggctcagatgtgtgcttaagatggtactatcagttttatagattttgtaatttcttcactcccttatgtgctaacatcatttttctccatgctgtcatctgatgttaaacaaagcacatgttgcttataactgaatccagttttaatcacgagcattatgaattatcagtgtagttaaagcattaatctaatttcttatgtttcaatctgtaggttagtggcaactcggacatatatgtgacatggtatagaccactggagaaaacagtgtcttgtctgtcaaagctatatcaccgcttagaacctacagtttttactggattagcccaggtattggacctcttaaagcttaagatattttctgttgttcattgttcatttcttgatcgaggccatggcatcgaacttgacatataatttcgattttcaccaggaagctgtagaagtttgctccacatctcttcaagtctgtattctccttcccttattgttcatgtcttaacaagatctaaagaacatgttttatgtgttgaactgcactctttgatattcagagcgtatctgtttgatcctgtgaacagaatgcaagcaaggtcattgcaaaaaaagcaactgcaatggatggacagcttttcctaattaagcaccttcttattttaagagaacaggtgatacaatttgtacagtatgtcaagtcaaaattttatagcatgcataagtccatcgggcaactcatgtggtactatacatgttttcagattgctccatttgatattgagttttctgtcacgcataaggagctggatttctcccatttgctggtatgtgcaactttgttcttttcattttgagtatgaactgcttacccgttgcataaccatgtgtaccattttttacatgaagcttgatgtttgaggaagttatggattggttttgcttgtattacatgtatactgttcatgctttttacggaaactgtttcacatgttcacctttttttataagaaaaggagtattcacttgttacatgcatggaaagatgtcgttaaaactattttactgatatataaaaaatgccagtatatttgataactcttgtcgccatgaaaccagacttctaatagaccatctggcaacaaacaaattacttgcgttttttattgctttcatcagctgtttcatatttgtggtaagaacacaaagaatcattagtactagatgtctccgtagacaaattcttattgttattttctcttgcgcccatataacaaatggcatttgctttcttttctcttgcccattcaccagatgaataagttgagagatttctttttgcctgtagtaagatataaagtaggaaaaaaagtaaaatgacctccctggctcatcagctgagacaaagatattaatgtctattgcattctatcaaattaaactcatgggttggtcagctgaacttagcaaacataaggtgctatccctgaaatataggtgtcaagtactggtgtgcggtcttgtcctcataaatgatacgttgacaagatcaactgttacattctagactttatttagagaactttctaattgtattgatgtttgtcagaaatctttgtaaaatgtctgaagattctaattaggttgccttgtttcgtgatgaaccatttgaactatctaatattctttgaattaattacctgaaaatcctcagtagaaaggttatgttttatttgctagttacacttgtgctcccataaaaatgcataccgtgcacatggtttgtatccaattaactaattgctgcatataacaatgtttctttttacaggatcacttaagaaggatcctcagggggcaggtctcgttatttgattggtcaaggtcaacatcacttgctaggacgttttctccccgtgttctggagaaccaaattgatgccagaaaagtaaccatcttgaactgatagctgatagttatttctttttggcctaaaagtaaaaaaaaatgtttatgttaatttctcattagttgatctcataaattcagtccacattgtgaaaattaaaataagtccaaacgtgatgcggctgttcatacataggacttgcacgtgcaacttcacatgcataaaataaggcagcagtctaatgtgattgctttgtagatgcccatatcctcgattttttaatattttttcagctaattttgttactactattttttcaggaattggaaaaaagcctcaaatctacctgtgaagagtttataatgtccattacaaaattagtagtggatccaatgctttcttttgttactaaggtatggaattgacctcttttcaagtgagaaagggggaagcctttgcagtagttgactcacttctcaatccattttttcttttttctctttttctgggaaaggctcagttctcactttaaggcctcacttgccattggcagttggcaccctttccccgtgaatggataataagggttttagttcaaaataccagtccacgtatggggattggctgggatttggcccatgccaaatgaggccaaaacctcttttgattctttcagtttgtccatgcagtattagggttcaattccttaatgcaatgtttcacagttctcctgcgatttcgagaacagaagtattagggtccaattctaacatccctttttgggatttcgaaaatttcagattatgaacctgcattctagtattcttttcaaaaccgaaaagtagtttattctaatggagatgaacatgattgtctgggccaggtaacggctgtcaaagttgtactgtcctcgggtagccagggtcagaaattggattctgttctggctaaaccccttaagactcaagcatttgcttctcctgataaggttgcggagctggttcaaaaggtattttccaagatgatgcaagtcagatcatgcttctttttccatgtatttcataaaaatccctttttgtaggttgggactgctattcagcaagatttacccaaagtaatgaccatgatgaggttgtatttgcaaaatccatctacgcggttgattttattcaaaccaatcaagtaagtatttacatctccacagcatctacaaacctatcttttgttcacgtctgctttttacataatatcctggtgtgatggcttaataaataatgttatttcaaaaacaatatctcaaattaagttcattttgccagagtgatcaatcagtacaatttgttgcctataagaaatcttatacataaataattcatgtaaccctatcccttaaaccatacgaggtgaaagagaaagctatcatgggcaagctatcaccagttggtcactaataattttttaacctagagtgcattatgatgaatgtgtatacatagcatgtctgatttctctagttgacttcttgaaggatggacttaaatatcactgggggcattttcatcttttaactaccacaaactttttccctctcaagtccttttagttgagcaagctttaaccttttagttgagcaagctttaaacttaaaatcccactacttttacaaattaatgtagttctatatttcagccttgtcaattcttttggtacattttatgtgtaagttatgtttagcgtcagaatcttttatctgagttcctcattgatcaatttatcaattcagtgaacgtataactatcatttggtgttattcttctttacttctaatgatttggggtgtaaaaaattgaactttgtacttttgaagaaacattaatccctctgaaatggattagaactaagctgtacttagatgtgtgcggaactaaagaaaatgttcaggcatttctgtacttgcaaaaatattgctcttctctgtatttgttctaattccatgtttgtctcaggacaaatatagttgaggctcatatacagctacactcccttctgaagtcagaatacacagctgacgaaatccaatcaattggtatgttgcctatacccgacctccagtctcagctcgacgctcttttgtaaccgttatcaagatgcaaatgcgaccctacgttttgttcgttgagacggtaaatggtatcctgaagtacagtaaccccgttgtaccagagtgatcagtgatgttgtaaaaatgtactatgttactgtggaatggagcatcattcttgtgtggaggtcagtgtgcacaatgccatgcttgacgtgatgttcccactgggccagcaatggcgggtccgtgattgcgtcttttcagctaacaagttactgtacacaagtggttccgtttggccgaggataaagtgctggaccaccacccccaacccctgcagttgtatcgtgtgatcacactttaatttcttcccttttaatacacctgagattgctctgtcttgtgattttgtgaggcctgccgattagcgttgcagttcgcgaatttctccggccagaacacctacggcggccggcggcgtcggccattttcgccggtgtgggcgagcaccggcgagccggccggagaagaagcagaagcaggggcatgggtattctagccgctgcaacggaccagcctcgaacccatccgttaccacgcaatcgggaccctacctcttggctcttgtcgcaatccagctcgctctcttttcagcgcgacgcacgctgggttgctccctcttgctgtcaaccgagctggccaggatatgcgatagaactgagcacgttacatgctcgatatatcagcttcgagggcagcaaaactaatcgcatcacatcacatcgcattcattatgtgtgatctgtgtgccagcttagatgctaagccctctgttctaaaaaaaaaactcaacttaggacaactcaacatagaacaacgaatcctccatcccatagaaaaccatctttcgaggatgaatctaaagaagtatctgtctaagttcttctctgaaagttgattctttttggaacggagggtgtaagcgtacaaccattagcttcatctctgaaagttgattctttttggaacagagggtgtaagcgtacaaccattagctaatcattcccgataagacatctttcattttgagcaatggcttgctcactaatccctcatattaaaatatacatttcaaaccttttgttttttaaatgttaaggatgaaagaaataaggggtgtctaaagaacgggaggataatagggggtaagattaagtgaaaattaaataaaggatgattggtatagactgggcagtaacaagttagatttggacacattttagcatggtgttgtgatggtgctaggttgctatattctggaacggagagattagttgttagcaagttggtgttgtaagctttcttcagttggcgctgtttgaagtgctcggcgaggtttctgttgttgatgtggtggtttgttttttctttttcttgtcactggtctcggtttttacttttacttattaaaatataattggtagttcccttccggtttattatattatgggacggatggagtagtaaaagcaatttgttgtaaaaacttgtccgcaccaacagtagatggatgtatttgcagaaatggaactttactctttgccacggtcacttgcttcgagattaatagctcacttgttaacaacttatcataaataggttccgtttcattagcatacttttcaaactgctaaacggtatatttagtgaaaaaattcctatatgattttttttaaaaatcaaataaatccatttttcaagtttaaaataactaaaactaaattaattatgcgctaataagtttctcgttttgtgtgtcagtacttgatagtcttcgaacggggccatatacgttataagcccataaatattaccaaaataaaaatttataccttcatctgatctccggtatctgaggggagttcagaggaagggtggtaattgatcggattaaacgtacgtagcatggtgacttgtgtggctcgtatggatttgaatatacgatagatatttttccggtgaggacagagagtgacaagctcagagaattcgctagctggaccaccctatatgttaatgcatcgatcgcatgagatgaaatgattaaatgaaatagtttgaaaactttcgtcgttcaaaacttaaaaaggcaaaatagccccatggatggatactgctgggaaggtgactggcttgtggccccacgtaaccagcgactagtgtgccctacaggagaaaaacgaaatgctggcacggtcgacgtagcaaatcgaagctttgcttggctaagaacgcatcaaccatctaatccaagtcgccctcgatccgtttaataagagtattgagaccaaggaaaaatttttgtttcggaaaagtttatagattttaccttgatatatagattagtatatgttgaatttgatggtgcatattcaggcgcatattcattttagcctggaaaaagaaacttagcctgcaggtcagattctatttaattttgtatgggtttgtgtacattttcaccaatttattgtgattctatatgggatcgggatttaaagggaagtctgaggcctgtcttaattaatctatgattagtatgtagtgtgacatgaaaagtatcacaatgtcggctttaatatacagggtgattgtgttagcgattcttatgtccaacaaaaaagagatcagcaaatgtacatatatgggtgaatttttttacttaggaatattctaaagtattgaatccatgagaaacgcaagtgcacttctccgatcaatccttcggtattttgaagttttcttaaacaaggtaagagatagttttgtaaaaatacaggtttaacatcaatttagtccaaaacttgaacgttaataactcaaacataacatgaggatttgaatcccaaaatctatagttttataataattttattattagatttgtagttttgcgatacttagtcttaaacctatagttttatgataaatttattattaaatctatacttttataattcatcaccttaaatatatagtttgtgataatttgatcaaattatctgtagtctttttaggaaaaaaactacaaataatttactcccttatttatgaaatattttgtgaaagttaccggagttttgtgaaatttactttcttatttatgatctaactttacaaaacatgttaaattaacaaaactcctgaaaatacgagtttaaggaaagaatgtcaggataacatgttgtcttctctttatttattaaaattttgacagacgaattaggatttaacacaaccgccaacacacaccatgttgaaccaaggttgtcagtatcccgattcgtattctagtatcttacgatactacgatcctatcaagccgaaacgataccgatcccacctagtatcctaattttcatagtatctcgatcctactattaattactacacgatcctacggaatcttaggtggtatcccgattctacgatccctacgatactacaaaatattatttaaaataacatggtttgaaaataatgtaactaaatatgctcaaatttatatgaaaatcagttaaatatatcaaaatcaacgtggtttctctttaataaatgtctctatttgcatgacatataccattactacattattttatatagaatggctatatataattaatataaatattaattaaacttaaaaaaagaaaaatctcatagtatcccgatactacgatacgatcctacgatacgatattactttgagcaaaacgatactacctagtatcccgatcctgataaccttgcactgaacattgcttgtcccgagcaaagctaaatgacaagggtaaaataatattaatacattcatagggataagatgtgaatcttacctcctatcaaatgattaccgaaataaattatttcttgttttttgcatttgttctccacttattgtttgatcacgttgactaatccagagaactactgacactgtaacctgaactttaaattggtggacaaaagtacatgttcacctgtaaatcatggtcttgccgtttgcagccattggctcaacaggtgaagattattgaagagtggcatccacttggggggcacgacacgaggttcttgagtttgcttactgctgagcacagaaccaaatcaaccaaaaagaaaggaagatattgaaaatgcttgtttgtacgacttttttgacctagcttggtgtcaaaagcactaagctaggcaagagagaatcagataactaatacacaaaggacctttttttcttatcacctacttgcattaagcatgtaagagtactaaccagtagccagtagaccttgctcaaggcttgtttggggagcttaagattctgagaagtagctggttggtagtcaacttttaaaaatctagaaaagctgggtttcccagcttttagcttcgagtgatcattagaagctccccaaacatgccctcaacagctgaagcggcatcactgatcaagaattggtttgccaatttggcttcttgtatgcacttactactactgctgtgtacgactgtacgattgaatatgcatgtctttttttggcttcgcgtattggaattatttactcatgatctaatagcttagtttaacacaatatcaccaattctaagattaatgtggaatttcgatgattaaaactgactggttgaattgaagccatgatcaacttattttgtttttccttcttgattcacctgcgcggaagtgaattgcattacgaaccccttccagtgctatgagatcaatcaggctctctttagagtttcgggatttagcataggaattagtcatcacttgttctcaacgccttctccttcttttatatgcgctggtgagggcttgggggcaatccggataggattatgatttgttaccatctatgattgtaacattttatctcttatctcttatttcttatttgtttcttccctgttagagatgaaaacattggaattatctcctccctaattatatcagtagggaccgataaaatcaaccaacatcatgtagaacatgttgttggcttgtttgacaaggctggcagcacttcacacttatcaacacatatataatacttaatcaacaagctataaaaaatgtacatgcatagggttatatatttaccatatagtataggctaatttacataattcttccactccgttatttctctctactcatcgacatgtaaaatagggacaacatgtaccacattcaacaggaaatcccccccttctgccccaatttcaatcaggttttggatggctcggaccattttaagattcgtgttgctctagtaaaccctttcttctcaccctaatgcctctcctccccgatgtgtgcgtgcttgtgtaaaatgtcgttgccacctcctcctttcaccccagcatccaccttgttagtgacctaaaggcacaaatgacaccgatgagacccgccataccggccacctctctttcctctttctccccctccccacctttcctcctcaagctagacgtcggtgagatgcctccgccctaccatacttcccgtttccaatggctcccttgccgtccccgccttataattcctttcttttccttcgtccccgcttgtgatgctagcccgctaccctccttcattccagtggcttcagtgttgctaccggcgcctcgctgacgcccattgccaggccggcgtctttcttaggcgccatccctttaagtctagggaaactccctgttccccctccttctacctacattccaccctcacctcaacttaagaccctaactagctagcgttatcgtcgccgatcatcggagttggaggagaaacctgccgaagcaagaatcgtgaagcggatctaaaggctagaaatttataaaactttattttcatttttctgtcgagtatgatttagcaattcagtataaaatatgcacagagacccctctctcgttccctccgcgtgttaacatcgtcctcaacgactgtacaacttttctttagcaaggctagctattatcactttatccgtgttcaactgttcatgcatagagcatcatcatcagcagtggccagttgcatgtgctgcaggtacaaagcatcttcgtgttctacagtggccagtgtacttacaggaaataataagacagacgtgttttctcatcattgtacctatgtgttgcgcatgcatagattgcatgacatgcatgtgaatggatcgatgcttcacatatgtgcatatggcacgtccactgttaatttctagctaggctataaaaataacaacacaaattggaacagtcgccatggaatcaatttatgaatcgcgtgtactgcttgatcgagcgcatcttaatttcctttagtttgatctttcctacactttacaccagatctggtacttccaatattcccttgagaatatatggaggccaatatataaaaaaagagtagtctaattaacacatgcaaaaattaagctacattgagaatgattgaaactataagataaggtctagcaactatataataaattaaaaagtaattaatcgtagctcgatcaactagttagatatctagtagaggaacctattcatttgggttgaagttctagacatgatacgagtgctcgtatttataattaattgttctttcagtacccatcgacacgacatcgaggcgtctacgatgactttacaaatctcaatatatcactagtacataaccccctgtagctgccgtttgggaactggctataggggtgtcggtttcccagtcggtacctttgcctcattcttatcggtgccggttctaaaaccggcacatatactattaaaaaataaaaaaaaacgatggcacctacactaccggcgggcttttncaccggcgccaccaccaccttgttcggccttcacgccaccacctagccgtgcccgccttcgcactgccacctcgccacgtcggcctccgtgccggcggccgccacccaacgccgcactggaagaggggggaggtcccctgggagagaaggggccggcgagatccagcgaccgcgccgctacctcgccgcgtcggccatcaccccacgccgtgctagagggggagaagggaaagggggcgaggtccctcgggagaggaggccggcgagatccaggcctactccaccaccaccgtcgtcaccgccacctcgccacaccagcctttgcggcggcctccaccttacccacgccaccgcgaggagaggaaggcaagaggggcgagcctccgggatggatggatagagctctcgatggtaaaaatagccggctcggttctattaaaaaaccggcacctataatataataatataggtgccggtttttttaatagaaccgtcacctatagtgtttaaattttttttttatcgtgcggaggtgagaaaagactcataggtgtcggttttaaattatccgacacctataagattggtccctatgaggtttttttagtagtgtatgttggtctttagaggtgctttcataggagtagagtgtgcgtgtgtatgtttatagaggtaagtgtgcatgtgtttatgtgagtgtatgtatgtgtatcgtgttttgaaaaaacaacttataattgattagtttgttttgttgacggcacgtattaccagcgatggttcatgctcatgcatgcaaacacgatcgatatattgttgattcgtgcaaacaatcataaggaactttgtctgcccgtttcggaacatatcctgagagcttttccatatatatctctgaatgccaattcaagatattgctttgcatgggcagcaacagcaaggatgccctccttgtgagtttccccctagaaaacgacatttcgtatctttacatttgtcatatattgctctaaagtgaaaaatatatatataatattgtctccatctctcacatacgtagagatagttttttttttatttttgaaaaaaaaagatcttagagataagttggaaatatgtagtaacaaacaaaataactccattttgaaagggaaaagcgtacgcacgatgctttttgtgcaaccatgtctccatttttcatggtgaaaaagacatccacaattattgagattccctcttttatgtattgtacacgagcaggaaacacgttgcttgaggacaaaatattatcgttgctgaaatattttactaagcttgggccctcttggaccactttgatctgacctcaatattttcatctactcctatctcacactcaacacacggttttattcatagggtctcttttcatgtgcacttttgctttggttgaactttttcccttggtaataacccattttttctctgttttcaaaaaggtttcacttgtgatttaataaataatagttcagagaggtgaacctaacacatcaaattgtgaaccaattaactaaatatatgcacatctgatagagttaaatcctctatacaaaaaataatgttaccatcgtatcaaaggaaaaaaaaacttgataggttttagagagttgagagatatccgctaccgcgaaagcgattttcgtagatcccctccccttaatttcgctggtggcataaattggcaatgtatgcagtacatatcatttgtacctttcaccatattttcagaaaagataatcagttaataaatgttgagagcataaactaactactactaacctaagtagcaaaactatagacaaagagtatttaatagaatcgcaaattgtttctgtccaagattcaagtttgtgcgtttagctttcttttaaatgtcaggtcaatgaataatttgtttccaaaaaaatcacgcgaatagagctgatcagtttctgaaatttacccaaattaattaactcagtcaattcaatgcaattatgcaaatcattactgtgggtatgttgggtctactagaggtaaacagcataaaaaaaatcaatatgtaatcatttttcctacaagaagacacaatggtcctcatttttcttgtacacgtcaatctttatcagtagtacgaactccaatttagacattctttgcaatatatacaacatttttataggatattcataattcaattcaattacaataggaatatatcaagaaaatttctcacgttccaaagaagccccgaagaggataaggattccaatgaatgacataatatgttcatccaaaagtgttcgacatattttattatttggtttcttcaaaaattaagatggtcatatttgtagtttctatgtgcaaattagttgttgaccgaaacccaaaattttttttatacccattgattacaatgcatacgtaaagtttctttgttttattaattcctccttaaactttttttttaaaattacacagtacaacgcagacactcacaacgcacgcgcactcacccctatgaacgcacgcacgtaaaccctacccctatgagcatcttcgaagactggaccggcaaatcttggagagattgacgaagtcaccacaggcgcctcgctatcgacgggtacatcgcctaccactgaaagcacaacatcgttaaatcctggaaaattcctccttaaacttgatgactccttatatggacagttttagagagagcatattacaaccttataccatatattgggccccaatctcaatagaagattcttcttctatagatcagctactattgagtcatatggaagcagtgaacacaaaataaaaaaaaaacatattttgtggacatggggtggttttaaatatccatcactcctctccccttcacttcccctcatccttccctctcatctcctaccgccacaaggggcgcctagctattcggctccaagcgtggtggtctcaccgcctcacctgaggtgaggtgattccacccgccgccgccggcagccatgcttccaagaagccagagcatcttccacctcggcgaggagggtggcgtcgtccactgccaccgcggcggtaaccacctcgtcgcggcgtccatggggatgggcggcgccggtggacactacggctccggcacgcgcggcggcggccgccgcgcgcgcgagcgcgagcgcctcgtcgtcgggctccagatcatcgtgcacagccagcaccaccacggtcggcacgcgcacgcgcacgcggcgagcgtagtgctcaagcagatggtccggccgcgcgccgctgccgccgccgccgcagggcgccacggcgccgtctcgtgcagcttcctcaaggcctgctccctgtgccggcgtgagctcagccctaccaaggatgtctacatgtataggtaccaaaaacctaacaaacctcaagaagacatttatcatgcatatgcatccatgcatgaacatgagaaaaatgttttcatcctcgagaaaatatcccttcgatttttacatgtcatctaaatagttattaatttttttttaaaaaaataagataggttaatataaaatatatcactctcatgtacatatatgataatctcgtgtacatgtagaggtgaccaagggttctgcagcgaggagtgccggtggcagcagatcgccgtcgacgaggcgcgggagcgggaggcggtggcggccgcgggccggccggagcggcgaggtctggctcgccaccacagccctcaccgtgcggcggcgcccgtccgtggcaggccaaggaagacactagccgtagcctagagttattactatgtagtgttaaagtacttactgagaagaggagcacgtactactactgttcatggagaactttgagaggaagttattagccaggtatgtcaataacagaaggactttgcatatgtgtatgcatgcataagaagaagaagatgtgataagagagttaatttgagtggtaatgaagagaggttaatcatggagtagtagaaaggggttgatcagaatattgggtcagtattttttgtttctattttttgcgtgttgtaatcctagaagggatatgcaacttgttgttagatctgtgtgtttgtttgttatacacgtacgatccgatatggttgattaattatattctggaaggttgcatgcaagaaagttaagtggagaacaataagagattctgtgtgcttgactgcttgttgctgtgtgattcgttaggtttcagttgtgtccaacgtgtaggttctccctgtaaacactagtggttaaaaagggtgccgaatttgatgcctcgctatggaattggggaacaaaggatggacaattctgtggcatccaaacaacttgatgggaagaatcaatgtgcaggcgaaaatgggtttctttttcagatagtacaaactacaaaatgtgagcagaatatcacatatatgcgttcgtggaagtgaattgttcggaatgttggaagaaactagaacgacgattaggcccattgttatatttcatcaaatacctatacaatcgagactcggccaaacatctttagcggtgtgcatagtaagatgaaattggggaacaaggatcgatggacgattcggtggcatatccaaacaacttgatgtgaagaatctccgaaaatggccgggtttctttttcagatagttaaaaaactacaaaatgtgagcaagatagcacatgtgcgttcatgaaaagcgaattattctgaattggaagaaactagagacgattaggcccattgttatatttcgtcaaatatctttagcggtgcagtaaaatatgcaaatatttttcattgggattaccaaactatatccctactggaattagatttattatcatcgatctatcgcggttcttaaattataaacacggatcattaatatacgacttgctaaaaacgtcatatgttaatgacctaagggagtataagcgtataacttagagcatctccaacgtacatatcgatttatctcacagacaaccatactcaaattaatactatataatggtgggacccgtgaaacccacactcagcaaccatgagtattttccggtggaatccaacagtgagctcctttgcatttgtatttaagtaatggatccatgattttttttatctcttctgttcgaatcaagaagcctgttcgattttatgtgtcagcatgattagcatgttgcagtgttatggttcgattttttagcacactgtagatgcttttagccccatttccctcttaaaattggactaagagcatctgcggtgtgtcagaaagggattttatcatcttccatatcactgcccactcccaactacattcctttgtgccacttctttttcccatcttgttggcacctataatattgtatatgtgtatcctcttgttgtcctgtactaacattggtttgggcttgcaatccaatccactagtggttccaagttccaacaccatatgcttggctgcttgcttggccatccccaccaacattgtagtaggattttacctcaacaccaaaacaaaataagctgatgaggtcaccaccatgtcattgtcgccaaacaataaaatttgccaagcatgagttttggagcaaattcaaagcgagtacatgttatcaattaccattttttaaaaaatctttccagaccatctagcattttttttcaaacttttacaaaacattatattatactcccttcgtctcgaaatataagccgtataagatttttatatggtcttcacgattatattttgaccattagttcctttcataatatatcaacaagtattataactatgcaaagcactttcaaaatcgaatctaatgataccttatgcatctattagtaaggcccaattcacaatccaaggcccacctcgagtttagccggccctttgtgcttgaatgcttgtgctccaagtcgattcggatgatgcgccgcattgttcgtctccgactcg

SEQ ID NO: 6068 - DNA, 62010 bp, Oryza sativa
gggagtggaagggtgtggggtggaggagaagcggcgctggcagaggtggaggagaagcggcgccggtagagtgcgccagagattggggaaacgcggcgcggcgatgacgcgatctcgatccaggagaggaagcgagggcgtcagcggcgggcccgcgcctggcacgcgcgcgatggaggaagcaagggcgttcggcggcgggcccgcgctggcgcgcgcgcgatggggagagggggagaggaagcgagcacgcgcgatggggagaggaagcagcacgcgcgcgcgatggggagacccggcggcggcggggacaacaaatcggtggcggagggatgtgcgtgatggattgcgatccaacggctgatgaggattcgatcgaacggctgaaaaaaaaagagtgacgtggcttaaccacagctcaggaaaatccctaataactacactaagtggggatcaattgtatagtattataggataggataagttgtgtaactacttggaaaagaggattttaaaggtattgggtgtttatccattcgcatactgtaaaaataaatatggtgacacgtggcaggccacacccagaaatatgggttataaatgcctaatgggcctcagcccaaagagagctattcaacgaaacccgtaaaataatcaccaaaaccgcttcatcatcttcctcgccgctttagcttccaaattttccctttcacgctcctgttcaccgtcgtcgccgccagaacttgggcaaagcttcccctcacatccagccatcaaagcgctccagattctgcgaaaatccaagtgctctagattccgcgaaaatccaacgcgggcttcctcctttcatctcccatccccaagttcagagccaaaaaattctattccaagttctcctccatttcattcatggcggaagagagagaattccccttcgatcaatagggcatctctgtgaaggaatcaactctgaaggatatggtgaaggaaggcgtgatcccagcgaaggaaattatcgggtggtgcccagccttcggctatgagttcccaacattgaacactggcaaaatcgtggtatttactcctttcttctacaacggttttggtcttcccacttctaaattcttccgaggtcttctggatttttatgggatttagatttatcatctgaacttaactccatcttgcaccttgccatcatcattcatctttgtgaagctttccatggaatacgacctcatttcaatttactttgtcgaatgctttatcttaaagcccaactgactaaagaaaatccttgtgccatcagcaactctggtttctagctgtacggagctctccgcaaggattatttttcacttcctttaaaatcttcaaataaaagttggcactcagattggttttacatctcgaatctagctcctagccttcccgactttatcggtcttgcacccatccaccagtctcactggaattcctcgcctgaggaccaagagctgactaaggtcaatatcttgttataaaaaatcctcgatttgaataaaaccggtttgctaggtgaacaagtcactcggcatttcctcaaatgctgactgcctcctataaaagagatgtccaagccaacctttgagtatgaagaccaaactgatcccaatcgtgaagatcccaggtcgttagattacaaaatcatgtgctcgaggttgttcaaggtcttctcttctaggatagttatcgattactcccacaagttgccagttactccatacaatctgcatggaccacacttgcagcaagtagatctaagctctgctgattcctttttgtttactggatttagctaataactacatgcttgcgaattttctattgtgaaataggataaatgcttttcttgtctcgaacccgcatgctgttgttctattaacataacacacggatatggcctacctcctatctttagtcggaaaaactgtctgtgcgagtatatggtatgcatagtctccacggtgcgtctttgcttgatgatactgctgccgcctgccggatatggatttcagcgagccagcgaagcacaggcgctagtgcgtacaagatgaaatcttacgctgacagatattctacacgaatcattactgacccatctgatatgggttctaatataagcctgattgtgagctgacttttttttctgtcttgaggttgaattgcattggaatactgagaattgtgtggctcattaaaataatgtgatctattgacttcaggcataatgcatagatctatgatgacatcttttcctacattttcatataagattgaaaatctaggttgaaacaaattgaagctcaaaacaataattgtgagatgcatggtacaaaattgacgccttccaattgacttatgggcctaatgtaaatgtttgcagagggatgatacacaaaatccttcctcctgtgaatttctctcgcagcttattttcttcatgggttcccttacattttcgtttaactcacattttgctcgcttagttgcatcccttacatttctgtgttatttttttttcgtgtcaacgttttgcaaaggacatagcgctgcgtttcaggaaagggtgttttgattccaaaatgcagagggcgaggcagagcataaacaccctggcaaactactattacgatatactctcagcataaaagttgctgctgcaaggagatcatatcactaaacaacctaaaccatctaattaacaagttgtcaacctgctaagggtgcaaccttagcagagagatcatccgcagaacgtacaaaacatcatgttctctctttcaggagcaagagcaaatccgaccaaggtagaaaaataaatacatatcttaaaatacagatccttaatgttctaatttgacaatttacaaatgaaaaaaggaaaaatgtgaaagtaaatatcacatgttgttatatgtggtttattaatcctcggatgttgattcattcttgcgcaaattaggcacaacccacacgcagttaagtggctctatgacaccatagaaagatggagagtacgtcttcttgttcatatcatagaacaccggctttccatccttcgaatatctaggaaagtatatcctatttccattgccaccatctggcgatgctacaccatatgatgatctgtaatcaagaaacaaggcaccgccaccaatgtcctctacttcaacccatgaaatctctgtacggttaagtttgaacactcgaggcaactcattagcattacgcaagaatacagatatcaactccccatccatatcaaccaaatagcagaactctcttcctatgtggtcttcttcaaagagatccatctctacatggataggctctggcttatcaagaattctccaagtattgcttgttggatcaaagacaccaaggttgcccttcctcccgagacaatagaacttcccatcgaacatgacaggattattgtaccctactgggaacgacacattgtactcgaactcttgctcaatccaatgaggctctccatgctgccatgtaaaagtactgagaaatttaccactgtcactgctgttgattccaaaaaaggcacaatctaaacacattggatttgacgatgagaacgacacaccgttgtagttatataaaaacgcaagcatagggggctccacaatctcctctgtgaaaggatttatgatgaatatatcgttgccatagatcccggctgatgctagtacccaaccatccttggaggagcgaaaaatgtgtcgatcttcatttgtgtcaaatattgtaacttgtatgttgtaattctcactgcgtagaggatcgaacaacttgcatgtcccatcctgctttgagatgtgcattagccaaggccaaacttttgcttgctctattgggttcaacacctcactccatgccttacaaacagttggaaatcgtatgcgatctaccaaggataagtttgagacaattaactctagcaattccacagggaggtgatcccatggccgcagtgaattttcttgtccgtcctctttgtgttcatcaaaatcattgggtggattatcctttgatggctagaaaagaagtaaaaacaagaggtttagttacaatttgctagctagtacaacgtgaataatattttggattgtaacatgctttgcatggatttacaaacctttctccatagaagattattaggaatggttgattcttgtggcattgaaattgattgggtgctgtaattggatattaggaacaattatacatgaatcagtaaagcatggttcgctggaaacaaaaattaactactgcaagcttgaatgctaaaaattagcaatgtgagcatagattggaaataaaattagcgatgcaagcatatattagaaatataactcaccttgccggaatagcccaaaatgctcgggaccaggattttgtaggttgaggaagaatttgatggaagctaatggtcatgtcatccaagcagaacttataaagcctctcactgtcgcagcttgaccatacaagataaacacagtttccttgcaatacaccttctattgaaggacatgagaaggcataagttccagagatgagaaatgcacggtcgttgccaataccctccaccctctcccatgacaatgtctcaagattcaagcaaaacacacggatggcggtgagtaagccgtcatcataaaagcacccgagatcatctatccacaatagaaataactttccacaggactcgatgatatggtaacggccacatctacggctatcttcttcttcgtccttgatggtacccaactgttgtagctcgatcttgccatcaatcacgtctatcgctatgagattagaagcgaaatcataaatctttcctccatagttgcgcataagagatgagaaactgatgtcgtcatacggggacacagatttggtccacatctcatcgccagggtggcagtgaagaaggtagcattcttcttctgcctctgtcgagctggcaactagtattgtgcagttcgcgctctccggagactcgagcatctcgtatgtggataggaacagcggaggctggtgcaacggcggcaactgaatcttggtccgcgggttggtggtgatgcggaggaggaagcagtcggcggtagactcgtccagcatcagcagccagtcgccgtgcatgcagcccaagcacgtcttccctcgaacctcaggaacaacggtctcgtgcaggctgaggtctgacacatcgacgaaagtcagcgtgtcgccgcgtgatccctgcaccagccatggcctcgtgccgaagcccggcggcagcgaattgtcgtcggatttcgcggccatatgtgtttgtttttctggttttcttttactctccaggtgtattgatccttctgtcttggtggttggctggttgcgttttatgcagcagggagccaagagatctagcaatcgctagtccctttcagtttcaggaatcagagtcgtggtctatcgtgattgcgctttatacagcagggatttcgctcgatctggaaacggatttgattcagaaatccgagttggtttcgtccgtttgctgatcagaagcgtgtgctggccggaggctttgatcgggcgctgggactgggtgggacggcggctgacgtccacgtcgccgcctcagatcgcaaaggcctctcccgcgtcgctgccgccggattactgcctctgccgcgagccttgagctgtctcgtttgggagtccgaattgaagtagaattgtaccctctctttttttttttgtctatagatcgactgaatcggagtccaatcaggatttgtacacaaaatttgactgcttaaatttgagtatggtaattccccctcctatctaattgtccgatcagaattgtacctcttttgcctagcaaactttattactgcatctgaatccaatcagtatttgtgcacaagatttggctaggcttatttttctacaaagtagtgctgctctaagttttgctcgcggctgggcgccgacgtcgcgatcggaagagctagcgcggtcgtgcactgtgtccttcgtatgtttgcctctcaggtgtattctactttggactcctgttcggttcgataataagctataagcagaagaaatccttaagaaaaaaggataaaacaaacagaagatattaggagaatacacggttgatccctcggatataggagtatttgccttcgacgttcattggcaagctcgagattgggagtctatcgtgtgctaaaagtcctatggagtgcaacaacggaggaaaatattgctatgcggtggaaaccacgtatatgtagtgaaaacttagaaactaccgttggatcgaaaaatggacggccgagattcatccacgttattttacctgtgatgacgtggacaaatctcgtacgtctatttttcaatccaacagtactttccaaatttccaccacatatttccctgaacaacggtgttgcaggtgaagagtcctcgttgtcacgtggctaattcggcacgaggaatttggcccaggaaaggtttttccttcttttctaaaacgttattcttttttttcctactatacagttcaagaaatgcacagaataaaccaatttttttgaaaatttatatacaaataggttatatagatatcatactatttatattattttatttgatttttccttttttataaattctaatttgaatttggatgaaacctatcgaaattccaaacggcttctcttttgagccacgtcgaaacctcggttttccgtggaattcaaccagtttttgtcggaattgtgaaccctactctgaactcccgaagcctgctgctggactcccgagtcccaatgcccactacccctccttgcacgcccgacatctggtttcacccttcacgatgccgatcaacgttcgacgcccctccgccgctgcgatgactactcaactaaggttgtgttcttcccccagttttcccgactcatctctcgttttctgcacgcacgattttcaaactgctaaacggtgtgttttttgcaaaataaatttctatacgaagttgttttagaaaaatcatattaatccattttagtacttaattaatcatgtaataataagtgttttgttttccgtgccggggtcctgctgaacatagcctaagggcacccacaatggttatctataggctctctacaagagatccatgtcagcatattttcctacttggaaggtattaaatgaagagagagagcaaagctatctactaacttagagatagtctatagagaaaaacgaggcaatgcatgagagagctatagataccaatgtagacatactattaaggtggtttactattaatcaagtctattgctgagatgtacatgttttatagatagcaccttactttaccattgcgggtgctctaagagcaagtataatagtgagctataagcctactataagtttaggtggaggagagagatagtgaaaaatcaaaggtgttgactctcatgcaagagctagattatcacaaacttcaagacaaatacattaaatgtataagtgaaaaataaaaagaagagaagaaaattatagccaaccttatagctaatctattatatattatatatgttgacttttaagataagctaataataggaaagtgagctaagcaatcatctatcttgtgggctgtgtccatataacaagccgctgttgtcgcgcctaataatcagcagctcgccatgcatctctcccttctccctattggctctcgcagtcacatcttagagcaggtacaatagcaggctattagccagctataaatatattttaatgagataaacgatgagagagaagagcagcgggctacagatttgtagccagctgcagcacgggcttcaagacgcaatatgtatatgacaggtgggaccatatattaaagtatagtaagcaactattgtatgaattggctattagattgactatagatgaattggagctagtagtgggctatactattgaacttgctcttatagctcggcaccttgcagtccgaaatgactatttagcgactatatatataggacgtccgaatgggactccatggagtatgggctccaaagttgagatccgttggatgtagctggtcagtttgatcatttgagtgtatgagcttaatgggtatagacctgtttagagtgcgggatttaatagtgaatggattccatatatttgaatagattaaaaaaatgaattaatacatttatatgcatgcatgcagtgcggatgagagaatttccataattgtgtgtgcatttcaaaaatagaaacattaaatgctcatgaaattggaaataatatcttgtatggaaacttacgtgattgcacggtgaggtttgaataaatggtaatataatggtgaaaaatggaaactaagtatatggagaaatggactttttttaaaaaaaaaactaggtatgtaatactaaatactgatcattcgtatttggaaacatggaaactaattatttggaaatatatttggaaacatggatactatatattgcagcgcatttatatggtaatgtaactgtacctaatcattacattcatgacaccattaatttagctatttgagtcacaaaatatttaagtttagggtttagagtttagggtttaaggtttccggttgcctaaatccgaatccaaataaaacagcggtttgattcatccctacaacttataattcaaatcaaacaagaaaatccaaatagattttttggcaaccactttctgcattgatgcaatccatcagatcacacacattcatagttcatactgcatttatagttcacacacattcatccatcatatcatactgcatcacacacacatttttttgctgttcttaagtaaaaaccaatggttgatcatttgcaaaatcagaacaaggtgaaaaggcagaaaggggatggatggattgcaatcacgtactccctccgtcccaaaaaaaagacaaaccctagtttccgtgtccaatgtttgaccgtctgtcttatttgaaaaaataatgaaaaaaattaaaaagagaagtcacgtacaaagtattaatcatgttttatcatctaacaacaataaaaatacgaattataaaaaaaattcatataagacggacagtcaaagttggacacgtaaactcagggtttgcctttttttgggacggagggagtacgtagttaacgcacacgtctcctccactgccgccatagtcccttggccacccggctctatcgccgtcccctcccttggccaccgccgccaacccaccccgaccagatctacacggcaccggtgggagcctgatggagagggagaggaagaggtcgcccgtgggtagattgcccaccgcctcccttggccaccgttgccaccgccaacccaactaccccctccccagatttggctgcccccagtgagaccaacggagagggagaggaagagggggtcggatctgcgcctccccgtcacccgtggggaggtcaccggtcgcatgcgtcactgctcgccgaagggaaatggccgcctggctaggagaggggtggagggggagggaagtgcaacccgcccggctagaaaaggggggtcggaggggaaggaaagtagccgcccggctggctgggagaggggtcgaagaggaaggaaagtgggtaaaggggctgcaggtatgggggaggaaacagccgtctgagagagggcaaggggccgccgactgaagaggaaggaaaagaggaaggtggtggctggatggatcgagatcgatccttatctcctcacatgggccccgctagcttgatccgattggctcgttttgttgccggctcggctcgactattaggcgtcggttttttaagaaaaccggtacctgtaatatattattggtgtcggttattctttttaaaacatgtaccaatagtattggtgtcggttttttcttaaaaccgacacctatagttgtttaaaggtgttggttctttattttttaaaccgtgggaggtgggaaaaggttaataggtgtcggttttaaataaaccggtcctatgagggtttttgtagtagtgtttcatccaagttacctcttttttacataggtataataaagtcttcacatactttcttggactgccacaaatgttggatgctcgccggagacacctagttggctaggaggatgacctccaagattatcagctcaatgacgaagattggatgttgatccccaaatgctcaagatcaaaccctagatctcataagcacaaatccccaaacttcattcaaatttcacaagtgtagcactagatcctatgtgggttgagtgaaacaaccctagaaatgaataatatttgaaattaaactgttgaagtttttttttctcaggatttaaaaaataaaccgtcaccgcagttcgacagtgcgaaatcacgacgaaatagcaagactaacgcgcgatactgacgaaagcgtgatgaaactagcaaggcgaaaatgtgagacgaccggcctcggtgtcgctatttggctgagcgagaggactattgagcctcaggtctcgcttgtggcccagcgagatggccacactggctgctaataacgcaattaatcgtactaaatagtgagattaactaattactaatgatattaattaaagaaaattaattaatgaaagtaattggtgactccgctaatctcatgcatgaagcctgtcggcgcgaactcaccgaattttttttgggactgtctatgtaacaagcagctgaaaattttgggtttgtcagccgtttttttggctgaccgtgcgatccgcgcatagatgagcgatgcacgtgaaaaaaaaagtagcgtgactcgtgactctgtttctgttttttttgttgggccatagcccacctctttttgtgaagaaacaaaaggcccatcacaatttgtacacaaaaatacaacaaaaagcccactaagttcacatagcccatagcccgcaacacaccacatgagaaaaggaagtccactggttcgcgtgaccagagcccagagcccacatcccatcacgggaaaaaaaagcccaaatacaaagaaatcatgtacagcacgcaatgtcacctcaccaatcctgcgtgcctgccaaaaatagaaaaaatcgatcaacaacatcagcacaaagaattggtagtgtgtaaaaaaagattaaaatataacagtgaactaaaatggagaaggtaacattgaaccagtgtgtggcatacatgttcaatcctatgtaacaagagcttgccaagtcaatgagcttagctgaacttgacaaaaaatttctaacaaaagaaacacaaaacatgtactactagttggaatttggaattgtcgtttctcaaagtattttaaagctgaatacacagttacacttgccttttggttgcattgtcggccatggcccctatgctcctctttctctgaactcctactgagaaaaacaaatcagaaacttgagcaagaaagcggcacaaattggggaatggttccgagaaaggagatacagcagcaggaagtttgaggcgtacctggccgaggtggtggaggaggcccttgaggaggatggaggcgactacaatgaggacacagacggctgccatgacagggataaaaaactgtagatctttagattaaaatttgaggaaaatttgattttatagttgctatcatttagatagcacaccagcttgattaatatgtaggaaaattttaaaatctgacaaagacaaagacaaagacaaaatacaaacacaaatatgacaaaattttaaaattgtgagatgctgacaaaatatatataaaaaaatgacaaaatgcttaaaaatccgttcgccgccatcgatagcatcatggccacgtcgacgctagttactattatgaagatagagcattaatttgattaatatgtaggaaaattataaaagttgacaaagacaaatatgatagacaaaaacaaaataacaaaggaaaaacctacaaaattgacaaaactacatctacatatatatgaatgtgggtaatgatagaaagtcttataatatgtaacggatgaagtagctaacaaaattgacagaattaggtactgttagtagcataattagttttattgctggtaaaactaaataatgtaagtatatgacaaaaaaaaacttagaaaatttactactgatagaaattttaattcaaaactattttagtagaaattgtacttaattgaaccagagtaaataatctttcgtaaaatgtcaattaattgcaaatctaagacttaattgaactactcatcacaaaaactaaatgattgaaatttactttaaaaaactactcatttatagtgagaacaaaacaatttctctaatagtttcccccacatctggcaaagagtaattactagaagaaggaggccaaaaatacacacactagtatacaaactcgcacgctcaatagttgagagtcagaatttctccaaggataatgaaaaaagaagacaattttcctcatgtcaataaggagaagctggagcacatgattgtaccagctaaacactacactgctcagtgagccatctcctccctggcatatggtgggcaccccctaacactacttttgcgtgaagaaaagcaaagctttgcaaatcaaagagtacttcctagctagagagtctcctctcctctcctcctcgaccataaaaaagtaggtactcaggatcacatatctatgtaataacaaaacaaaatgcggttaaatagtagtatcagactagttgctcttacagtagcatgctaagaaaacttgctactcagatatggagtcactaagctctccttgtgaaaaaacataatgtattacaaaacttcaaaagttctgaagatttatgtaggtttgcgaagttctcttaacagaaagcatatatagatcaatacgtgtctatcaaaatttataagaaaaatccacaattattccttaaatctaatccaaaataaaacaaacaagccaccatcaattccagctgcataatcatgcactgcctccaccaccaattcccgactccaacttcttgcttttcatctacaactactgctattcactgaaaacataattctacccccctatacataagaccttttagctttggataactaaattgataacaatgcaagaaatatggatctacatggccacaaaatttttagaaatgcaaaatattattcacatattgaaccagatcagggcaccaaaaaaccagctatctgaaaaggcacacatatcataaaaactttctactcctccatggctccatccgttcatctactaccaaaattacaataaattgtttctagacaaaatatgcaacatattcaaaatagggaacaaatacaaaaatcatatagcatcgtgctaaaggtaagctcaccgtgtggagctgtgtggccttcgagttgctcgctgggtgagccattgcaggattccatgccgagatccaacagattggtcctattcggctctcctagtgacacaggaagcgttgaggctccatcgccattcccgacaaaaagctttgtagaaacacgctgacgaccatcggagctgtcgagattgcctcccctaccgccatccctgcctcgcagataagcgcaaccgcaggcggcgcgcgcgtccgttggagccgacaccaagctctagagctccacccgccggaggagacgacgatagcatcacacccacgatgcggcatcgccgccggtgagtacccccgcgttatccaatccccactctctctctgctcttcttgcgtgagtgaatgaggaaaaaaaatcgagtctgagtttcgcatggggtccacggtgaagacatgcaacgagccagtgagagcgacgggtccagcgcccggatgaatgtgtgggcctaaaactcctagcacgaatcttggaaacaaatccaacgccctcaaattcagctgatagaacaaaaattctcagcaggcagttgtctagcaattcccattttttatttataataataattaataatatttaaattaaataactagtactccatccatactcataaaggaagtcatttaggacaaagtttaagtcaaaccttgggaatataaatcatgaatctcaaattgttgagtttgaaaatgtaaaaattatatgaatagatttgtcttgaaaaatactttcataaaagtatgcatatatcattttacaataaatatttttatagaaacaagaagtcaaaattgcgttttggataccgtgtcgctatccaaaacgacttcctttacgagtacggagagagtaattctgtgggagaattaaccaaaatagaatggacgttgtttctaacagcgtccagagatggacactctttcaaacagtgtccagatctggatactagtagaaacagcgtccaccttccaggtgcagccagaccatcaatacgccaccaataagttaagagaagtattgaaacaagagttgttcgacctaactagggttagggatcaccgccgtcgtcgcatgcgcctgttcgccttcgatcgggggctgtaatccgtacgcttcaccctgcaaaccacatcgtcgctgtcaacgccggcgccttggatttgtccgttactcagcgccatcaatccagccacggcgtcttcagcgcggcaagttcgttttggctgctcgctggcaacaggtgaactgcaagagacatgtatgtctttcacattgatctgcatatgtctttcggtgggaggcaacaggtgcccatgcatacgtttaactaataattagcattgatcagctgctgtatacattgtgttcatacgtactttatatatcgtcaggctcaggtgcaccctgaccgtagcctgaggccgtcagcgtgctgcggttcgtggcgccgctgccgagcctcccggcaaagatgttagtttacacccaaatttagcatctatgaacgaaataggggaaaattgccaaagtttgaaaagtatctggttttcttcacaggaccggtcagaccgcaggtatgtgggcggtcagaccggctagtagggccggtcagaccgcaggtatgtggacggtcagactgttagggcctgagttcaagtttgttttcgtcgggtctcgggtttccttgctcaggaaggcatgttttgtgtttcctttagtttctatctcgagttggacgtggagaaggacctgtagagggcaagaccaacccctatttaaaggacaagaccggttcattgtaataccccgaatacaatatacttgaatcgttcttttaccatgttttctactttaccctagttttagtccatctttgtcgatttgcgctgtaaatcgtccgctgcagctacgagagtgcgacacctctttgtaggtttgtcctgaaaaccttccgttttgcctatgagactggtagttatcctcatatcgatctaaatcggcctagaggctgattttgatctctaaatcggctccgctagccggtttagctattttttctacaaaacccatcttgatttggctgtttggctagatcgaggtggttggcgactccatatcaccgcaagacgtttaggtgttgtgatcgtacttgtcaacttgtcaaaaaaattgccaacagatgccggtggcgagttcaggctgccggtgtccacagcgccggcggccagcagcattgatacctccacaggcgctacgatttccatggccgctgcaggccggctcaccgcatcagctactgtccaggtagctcgttcatattgatgaaatggcaaaccatggatgcaaatctcaatcgaattcactggtggataaaccatctttggtcggtccggcaaaatccacaatagtcccgaatccaaatagaaccgggagtaaagattatttttagtcctggttataaaaattttgatctttagtcccggttggtaacatggttcatcccctgtcagatgtatgtcagggggccgaggatctttagtcccggttggtgtaaataatcgggactaaagatcaccactttagtcacggttggtactaccaaccgggactaaagatcaagatgtaccaaccgggactaaaattaaacacatagtatataatccatatcccttatcctctcctccacagttacaacttaacagatcgaatctcaccccctctcctcatatctatcctctaactctccaactcctccccttcctcctctcctcccccttctctccccttcctcctccccttcccggccggcctccccttcccatccggcaggccggccgacggcggggccgcgcactacggcggcgggcggcggggccgcgcggcggcggtgggcgtggcggccgcagcggcggcgggcggtgggcggcggggctacgcccggcgaccggcagccggcggccagtggggccgcgcccgtagttcgtggcgaccggcgggcggcagcggcattctttttttttttaatttgtgatgattcactgagatgtatttgactgagaagttacaaatttgtgattcattgtttggatctgtgatgtatttgagtaatttcttaggatattgtgatgtatttgatttgtgatgtatttatttgtgtgtataagtaactttgatttgtgatatagatttgagatgttacttcgatttgtggattgggggtttgatttgggatatgtatcccacttgatttgggagaaaataaaaaagaaaaaaaaagaaaaaagggatcctctcactgccgcaaccctctctttagtcccggttggtactctctttaaacaccaaccgggactaaagattgatttttagtcccggttatttgaaccgggactaaagataacgatctttagtcccagattcgtagtcccggttggaaaaccgggactaaggggggttacgaaccgggactaaaaagcatttctccaccagtgattagcttattattcagttgtctcgaatctcgatgaatgcgtttgagtattagagatccagagttgtcttgggctcttggccgatgcgaaatttgaactcgaaggaatagttggataaaaacgtctgaatagaacgtactgaaaaatgagtttattccaggtgattaataccatatcatgagttggcaatgctgaaaatcttgtcatgttcttcggatattctgaattcagcatccgttcacctagttcgtgttacaaagctgcaaccatcgtgtaatcaacatgttttgtgtctgaatttctgtcatcaagtttcgatcgagatggaacacgagctgctagtgtcgtcgttgccgccggtagaatgaattagccgccagcgccgtacgtgggcgcgctcggatgacattcgcacggatcggacgcacggcggcctccagccgtccagcgccggcagtgccagctggatatcctccatccgccgccccacgtccccgctccctgccgcccgtcggtcgttgcgcctggagagagagagagaggaggggaaagagataaaaagaggggagatgagagagagagaggaggaagagaagagtgagaatgacatgtgaggcacacatgggcccccaccatttttaaattattcattttaagtataattggcatgtgggcctacgatttctattatttccaaatcaaattgccccactatttttaaattattctttttagtataattgacatgtgggcccacgatttctattatttccaaatcaaattgtcacataagcgtcatgtcaatgccacgtcagatgatgaccgagtcaaattagccacgtagacgccacatcagctgaaaccgacgtccaaactgtatactttgttttaaactgatttttatagttgatggacccattgtatttggtttttcagttaaagaacgaaaatcaaatcggatttgttgagaagttaaaaaggacctgagatgaacttaactctttgaaatacgttgaatgagctagcctggcctggcaggctctaactgcgcgaattccctcctctgatgggccacatggcgagtcaggtcccatccaagtcagtccggaccgggtacacgcagcccagcccgtatggcccgacgagagctcgcagttcaggacgtcatcggcgagaaaccctttcccccacacacacacaagccacccagagaagcagagctcgacgacgccgccgccgccgccaccgccctcctccagactccagtcctccccccgtcctccatcctcgtccgtctgaggtcagatctgatctccagcgatcagggcgtttccatagcaccttatatctgattgaatcggaagcgtaggactgaaaccctgaacactatgcttttgttttgcagcggagcaatggcgggaggcgacgcgccgcagcataagccaatcgagtgcccgaaatgccacggggtgttcaacacccggcgcgagttcgtgaatcataagtgctccaacactcgtctattcatgctcgcccaggccaagaaggccgctaagaaagcagtcctgaagcaggtaaaccatcccccaccctaaatcccctctcctatccaaacggtctttactgcccctccaaatcgtctgacgattaagatgtccaatcgatcgatgaaacaatttgcgatctaacgttgtgaactatggatgctggcatccacctgcatttacaaccccctttcatgcattttattaacttgctgtaagcatcatggaggctattactgtaacatagatcggccgtcgattggattctttatatattcgcttgaatgcagcaataataagtaaatagttataacattgaagatttgaagctgtcacataaacattatactacccgtgatgtcaaataaacattataatacccgtgatgtcaaaaatcaaaaagcattactttttcaagcaattaggatcctgaatttattgtgtacaccgagtttggattgggatcgaatggaactggaaggattcatctgcatttcaaatcaacctgcctgcatgtttgtactttgcactttagatatatgtgttggaagaaatgtttcggaaatgtgtatagaatatacaatgaaaatgtatggtagtgatatactggttacacgacagggatttgatgatacttgtgagatagtgatataccgattacactaaagggattttcggttcataaaatcccttgtgcttttgcactttacttgaatttgatttgcgtaaggatatgtttacatggaatgtgtaattgaggtttagtcaatgaagtttacagatcttgttctggttgggtagagaaaaggcaacactggaatatttattacaactaaaattgtaaggggcgctttctttcatggtagttcattgtggtaatttgcaaggatactcattgtacactaaattactaaataatacataaactgcaacatgtttcaatagataaaatgtactccctccggtttcattgtaattgacgttttggacaatgacacggtctacaagatatatctttgaccttattcttctattataatacatataataaataaatgcatgtttacttttattatagtactttaaaagacaaatctatatgttgttctagttcctttaaactaaatatttttaaagttattgatggtcaaagttataaaagtttgacctcaaccttgtccaaaacatcaattaatatggaaccggcgggagtagtggtacagcaaaaagacttccaacaatatatctgagtgggtgatttgcgcatgaaatggttaagtctctactactcaagtataaaacagttaggttagggaaaagtgttatacatattttatgttccttcttttacacacgaattaaggcttcaatatatacctgttgttatgcagccttcacagcttgtttttcttctccctcttcatctgtattgttattcctgaagcagaaatagacatgtatttattcaattagttgaattcgtgcaaagcatcaacatacctaccagaagaatgttgcattagctacaaagtcattctcatattgagcaatttcaaaaaaggagaatttaaaacacacacataatggtttccttactaaaaggaatgcttgtatccctaggtgtggttttacaccatgcagcaatgagaacgatgcattcatgtggattaaatataatttgcaaagaagaaacagagaatagcaataaactatctgcaatgacaccataggtcaaaatatccattgatgtgggcaataaactttagtatctgtgcatcttaaggttccgttgtgattttgagacaacatacttgcttaatattattctgattttttttgtttgaacagatccgcaacaagggcaacaagtttaactaaggtggtctacgtaaagagaagttctgatgataaggtattgttcttttctgattctgtgttttggatttttgtttgcacactacccaagctcctaaacagtgtgtttcgtgcaaaaagaatatatgtgtgatctaaaattttgttatataatttaataaagtaacttttgaactttatagtagttaatccattcatttatatcttcaaaaggctatcacataaatgacaagttctttaaataattgtctagtacttactgatggtattagtgtttactgatatatatttttatgacagatggaaaaatgcaagggtatctgaaagataactggacctgaaacgttaccttgtttgagagtatatgtgaacttctattatatatgtacctcttacttctattatataacctcctatgattttggggatttagatgggaatcatgacagtctgttttgtttggttcccttgcccaccattatagcattgctatccttttctacgattagtaatggtctgttttctttgcatgattcgatttttatcaaagactgagatcacttagtctatccagcaagtttaaaaggctggcactgctagcataagaaaacaatttgcatgcttttgacagggtcccaaagtagacctcctatcctagtagaggttttcgttgcccaaaccggtacaatgcctaatctttgagcttacaaaatcagaaaaacccaaattatctaacaaaaaccagaaactgaccagatgttgtatcacctggatttttttttaatataaatggcgcctattgcggtggtgagtacactaaggatattgatgggctacaactttcgaagttttcatggcatagcgtgtccaagtccaaccattaacgcaatacagatagtcgaggcaaacgatacagagatgatgagctgcaaatacgtacctgtgattggaaatgggtacttgaaatggcaacaggaaagattgggttaagaacatgtattgaatgaataactttgtccaaggcttgcagaggcgatatgtctctccactccagtgggtaactgggtatagcactcatctcgtttacttcacactcccctatagactattcaccttcaagcgatatatcataattgatttattaaaccaagtagaagaagcaagaccacaacaggcaaataaccagtagcaaaatcattttcaccatgtgctcggaacgctgtagtgattctaatcgttctagtagaagaagatccgagtagaagaggcaataggagaaaaaccagtagcataatcatatatatttccccatgtgctccgaatgcttgtggacgatctgggcaacacaaagaaaatacaaagtgggcaaatcaatggcaacacaaagaaaatacagactggacaaatcgaagcctacaaacgaattcattctttccgtataaactcgtacactgctaccagatcaggtagcacctgacaaaaatttcatagataattgtatcaccagcgtctgaatcctcaccatgcaaattcaagtgacggatcaaccaccaaataatcaggtcggtggcatctcgcatctctcggtcatccagagatcaaaagaaggacctagctcaagctcgtgctcctcgtcctgtctcagagaaacccaaacaccgccacgacgccgcggtcctcaagctcgtgctccccgtcatgtctcagagaaacccaaactccgccacgatgcgatgacagcttacgtgaaagagcgatatgacgaaatagaaacagcggtatgtcagatcctgtcagatctgaaaagctaccggtagaaacaagtatattggctaagtggctaacctcgttctgatgagaaaacccgcaaagacctcatcgccggaggataacctcgccggcatcggagctatttgccccctatatagcgacgctcgcgatgtgccggaccccttccggctgaacacaggtggcatcagccacggcggcgccatgatttcagccgacgaagttcggcggcgaaccataaccttcgcctttcctgacagaaaagggacgacgctagactaaagcctcggcttccttcgtccgtgcgccgacaaaggaggcgacggagcccggccccaggcagctcaagcctcgccggatagtgccagatctgtgcggcggcgccgtcgttgagaacgggaggttagggttggggaatcgattttggagataagagataaggatgggtgccaactatagaagtaactaattacagggagaggggtagacgaggctttctcacgtatagagagagaaaccgcatgcgaggcgttggaataggaataggaaccgccggtccggtgcgtcacgcgttttttttttcgttttcttttcctttcaatttatttatttattattatattacttgcaacaccgggtgcgtgtccagatctagcattggaaaaaagaaagggaatattaaaagttgtaccgtgcgaatattaaaagtcccatctcatcagtataaaggggaaatacacatactgtactaccgaaaaggccccagctcacacatggaataaaacaggttgacctaggggtaagctagtaaatttaagtgaagtaagcttgcttgctacagagcggccgcatggctgtcggtggctcactggctcggtggccgcaggaccactcgctcaacactcatcttttttaagctgtgagtgacatcacgtctagtagagggagtttggatccatcgctggtcctcgacatatcagatatttgatataaagtattaaacatcgactacttatataaaaactaattatataaaagagagctaattcatgagataattttttaagcctaattaatccataattagtacatatttactgtagcatcacataaaccaatcatggattaattaggctcaatagattcgtctcgcgaattagaccagggtatggaataggttttgttattaatctatgtttaatacatttaattaatgtccaaacatccgatgtgatagggattaaaaaattttagccccatctaaacagcccctaagagcaagtttaataatatagtccactatactagctctaaaatttaaaacatcatatatataatcaatctaatagctcgcttatataatagttagctgtagaaatattgggagtacgtcattaatgcataagggcatccacaatgtactttaaaaccagtccatagtcaataaaataatacattcagctacctaaccacattgaggaagtagtccataggagagaaatagcaaaagtcatccataagcatatgggctgcccatatagaataaaatatgtcatttgtctctatttcctctctcctcctcctactacttactaactatatacattgtgaatgttgcaatagttaaagtccacaaatataggtcccatctatatggactactttagctatatacattggtgttgccctaacctacccatctctctcacataggagtagtttattggaactcgtgctgcagctggctacgaatctatactagcccgcttttgttatctctcctccacacaagcacaaatctgatgtgtcaacttctatagcatgcttatgttaccttattgtactcgctctatattttaaaatgtacgacaccattgactttttgacccgcgtttaatcattcgtcttattcaaaaattttgtacaaatataaaaatatttatgtcatgcttaaagaaaatttaaggataaatcaggtcacaataaaataaatgataattacataaattttcttgaataagacgaatagtcaaacgttcatcaaaaagtcaatggcgtcatatattaaaatacggggggattagtaacttttaatatatttttaatactcaagctaagagtaaaaattataatagttattaacaacaaataaaattgatttttcaaactatgtttggagataaataaatttagtagacgttatacgagattgtagatgaaatatgatatcccgcactttgattatatatatgaatatatgttactccctgtcacaccctgaagttctccccccaagcctaaattgaatttataaatggtcccaagaaaatatcggtgtaaaagcgagagtaaaccctaatagatcaatgcaaataataatcggaattggcatgtggaatttttcttgagttctacatgtcgaaatttgctaacaagatttttagtgaaattttcagagccctagaaataattttaaccaattaaaatcgagcacatgcaattttaaatcccaggaaaaatcctttcttccttttctttttcttttccctcctttttcctcttcttgggccgtcggcccagtccgcccgccgccgcgcgcgcccttttcctccttgtgggtcggcccaagccgcccctccctctctctccgggacgccgacaggtgggccccacctgtcagggtcgtccccttcctccggccgcccgccccacgtcggcaaccgccgccgaaaccgccgcgcccacctcctccgcttctcccgcgcccacgccgcgccgccccgcgtcctccccacgtcgccgccctctttccccccccccccccgagtctcccgggccgcgcgcgcgctcgcaaggggcgggattcgcattttgaattccccccattctctctctctctcctccccacgtcactggcggaatcggaggccttcccggccacgttctcctctctcgagcctataaaatcgcttccccgagcctcctcttcccctttccgctctcgccgctccctcccgtgcttcctaccgagctcgcgccgctcgccgcccgcgccgccgcttgccaccgcactccggccgcgtgccgccgccgcgctaagccgccgccaccactagcttcgccgccgcaagatctttctcggccgccaccttgcgtcgccggaatcccaccgagaccccatttcccttgcgtcgccggtgagttccctctcccctccgactccggccggcatggatggccgccgtggggtttttcctccgccctaattcctctcctctcctcccctaggtgtcgccgtcgctcgtccgcacctcggcatcgccggtcttcgccgcctccctcgttttccgccgccggtcgtcgccgccccctccggtgaggactccctcacccttcctttccttccccttcccgcacgcgccgtcgctttaggccgcgccgctgcttcggctgtgcgccgccgccggtcgccgccggtggtcgtgcgcgccgccgcctctagccatggccggccggccggctttgaagccgagccgagcccggcggttgctccctgcaccgtccgatcggcccgaggccaatccggaccgtcggtcccgtggaccggcggtggaccacccgcgtcgtcccggtccacggtggaccggccgctttgtgccgctgatccatggggcccacgtgccagcgccccctccctctccccttgcgccgctgacatgcgggccccgcatgtcggcgctgcccgctccctttgatgacgtcagccctgggcatttattgcgcaataattcaattaaggatttttctgtttatagtaaaaacacagtgaatcttctaaaattcataactaattcatccgagctccgtttaagcccattcaagtctcagtaaatcaagaaaaatgtgtagaatccattaaaaatggttttgttctctgtttcagtagtcttatagcctgtttgtattgtttgctttgtatgtcgcttagattccggctcttccgacgctccggtgtacttcgagatagtcgccgaggttcctccagcagtagagcaaggcaagtcatggctgttacttgaacatgttgatcctatattgcaaatgttctaatgtttttcttcaaatactgcattgttttacaataatactatgggatgtttacctactgttacagccatgctattttggtaccatgctcctttgttagcttgggttataacatgactagacattggactagggattgcttagccatgcttagttcaactagcacacaatggggaaaatcctattaatgtatggactgtaggttctaatggtaatgttggattggtgccaccgcttcggtgttggttaattaaaataaatcacatggtgggctgtgggtgcatggttttgttggtcgcgcccatggcagttaaggaccggttcgcgggatgccctggaagaacttatcgtacttaccacaagccagcgtgggcaacggctgggcttgtagtgtagctttcctctagctgacgcatccaggcaagggtgggcgtgatggagtttggatgggccctgcgacggcctatgcggcttccggattcacctaggtacgagagaggactgtccgctgccttgcgaggagtggggggtgaaaccttaggtgtggtgtgcttggttagagggggttatgcgacgggtcctgtcacggcctctttccggtatgtcgtggtggcatgccggcgcacggaaacgtgtcgtggggctgtgtcttgtgggtacagttgtacacctctgatcagagtaaaactattcgaatagccgtgcccgcggttatgggcggtcaaccagattcaccgtgattagtctcaccctagtttagtctaatgaaattggatagtataggtggatggttgggcctgttgcaacgtggtatagcgttggacagtggatgattaatattgattaattgttacaactgttttacttctctgaatttctgtttataaatgcccgttttatgcaaatgaaccgttatagctatcccttgataattccctgcatcataccccttttccggtatgacttgctgagtatagtggttagtactcagtcttgctctattttccccaaaccccagaatttgagtatgcgtcatatggtgatttctccgaggagtaggcttcgtccgtgccgtcgaggatgcctgtggagtggtgttcccgctgcagatcaagtcaaggcttagctccagttatcttttgtttttccgctgcatttatgtaagacttttataatgtttgtaagacgtggatctgtatatcaactttgtcgtttgtgtaccccggcctgtcctggatggggattttaatgcacattctgcttggaattctattcgggaatttctgagcgtgacactccctctgtcccaaaatataacaactcttagcccttcggatttgtcccaaaatataacaacttctccaccaacattctcttcccaaccaatcacaaccctccaccattcacttttctcacctacctccgctacttatccaatctcaaccctccaccatttacttctacctactttcttaataaccgtgtccaacaataaaacttcttatattctgggattgagggagtaagtatcataaaaatgaaggtagatgattatatattgatttgtataattcaatgaattgtaaatggtgttgtatgcttggatgagttttgtatgtaactattgctagtagatgagatgatatgtttgcacgttaagctttagaattagtgggttgtaactttataaatagtatagattgtggaggcaagtagagtagtagaagaagaggaaaggggcatattagtcctaaaaatcttcagccttgttaggttgagatgatttttgtaagaaaaaaatgtttcattagttcatttgaatgtgttgtaggctaagggagtgtttggatccaggactaaactttagtccctgtcacatcggatgtttggacataaatgagagctaattcatgtgacaatttttttaagcctaattaatccataattagcacatatttattgtagcatcacataggctaatcatggataaatgatgctcaatagattcgtctcgcgaattcgttcaaggttatggaatgggttttatcaatagtctaagcttaatacttctaattagtgtccaaacattcgatgtgacagggactaacaatttttagtcccatccaaatagctcctaaagattatcaccgatgtataaaacgagacaagttgttggcatatgattaattgagtattaactataataaacttaaagaatgtatttatttgattttttaagcctaattaatctataattaacacatatttattgtagcatcacataggctaatcatggattaattatgctcaatagattcgtctcgcgaattagttcaaggttatggaatgggttttatcagtaatctacgtttaatacttctaattagtgtccaaacattcgatgtgacagggactaacaatttttagtcccatccaaataacccctaaagattatcaccgatgtataaaacgagacaagttgttggcgtatgattaattgagtattaactataataaacttaaagaatgtatttatttgattttttaagtaacttttatacaaaaactttttgcacggaacatatcgtttgacagtttagaaacgtgataaaagaaaaacgatgaagatgccagaaaacaaacagcacattcaaactacccaaagtatagaataagtaataagaggtacaaagtctaaattgttctctatatagtggtggttcggtttacacctaaagtataaatccaggcatcatacccctttaaattctaaaattattttccaaaatataatgcaagccgaccgccgctgccctcctccctcatctacgctaacaaagacggcggcagggggctccttctccccctatgatgcagctatggttgggcaccaaggcaacctggatggtggtggtcgcgctgctcagatcctaacctccacgatcagattcggtgaggccagcgagcggcgcgccaacgatgtaggcgacagccggctgcaggcagctgtgggcgacggccaactacaggtgtggtgatggaggcggcagctgggtgacctcctgtgggggtgatggagatggtcatgaggcagggaagcgacaacggtgtggatcaggcgtcatgtggccaaattcagcgaagggagaactagtggcgtcccagacggtagtagatggaggtggggaggtggcggcaaggtggatctagcgtcccatggccaaatccgttggatctggtgagcgcgggccagctggcgtcccgtacgcgaacgttggcgcgagctgtccacatgtggtggcgatgacgcgagcagcgaggctttggcgcgagctccacgcaaccagaggtgtcgtggtgacaaggagctgacggtggggtttaggcgtaggcaaagctgcggtagttgagtgcgtgagcttgctacctttggcggtgtgcggggagatggtgacgacgatgtatggtcggctcgccggaggtcattgggctgccaaacttcgacacaaccgagagccgaggtgacggctctcgtgctggtcggttggcggtggggcgtcggtacgatggacacatgacgaaggtgttcaaaggatggcggctgacggagacaatggggatgcgacgcgttgtgagggtaggatgtgctttcggacgaaaactcggcctggtttccatgtcgacaacaacaatgtttcgaacaccgtttccccgttggtggcgttttcgtggcatcctcccctccttagtggaatccttcggtgaaaaaccaaaggcggtggcatctttggcgtggtgacctccttggaggcgtcgatttaaagttgcatttcctcctaaatctcttctacatgcgctttgtacttttgcagtgacacttgtatccagtacaagttggccacatccacagcactgtgcgggggaaagcagatcctttttctgtcgacctctctccctccaatccaaagacgtgaatggagatgagtgtgttcaggatgtcatactcttgtctgctagtcagtaaggtcttttgttgtaggcgcgtggtgtgacttggttttctttttccttgaccatagccttccagggttgtggtttgtaattttttttcctaccatatcatataaaacctcatactatcttatgttttttattaaatcttatgcaacatgatttggatggaagaaatattaacaaaagaaaacagtaagtttgggacattgcaacgttcaataataataatccctccatcccattttgatcatcccctaaagtttttgaggttttcccaaaaacaacatcatctaaatgtgcaatgagtaaatgtgcatcattgaatgtgtggtatgcaaccaatcaagattacttttcattggtgcaatatttaaaacatgagcagtccacgagacacgaagcgatgaagcatcataactgatgaggattaatttgagaatgctgaaaattttagtgtccttgatcttggtgtcatttagttaggagatgatcaaactagcacggagggagtatctactatctagcacaacagctatctagcacagttatattacagcctccttgcgaatggcgctcccacaacaattcagagtcgtgtgttcgttcgccgcgctatccacgtcaccccgaaagccacaagcagccggaatttgcgagtgagcgtacgtggggagcatcggctctggtcattttgcaaaaaaaaaaaaaagccattgatgtaactaataatttgtataggtccctcatcattcgttcctcacttttgtattcttacgcaccgaccttctaaaatgtaaaatattttatggtaagaagggaaaattaggaaaatataaccgcgctttggaaaacataaatattttatgtcagatgtgcgtcaatcgtgccaatactgaggcctgggagatctacttagctccagtataggaccgtagatcttaatttgatgaggtacgggcataccagttagtttgatcctacaagatgttgatatatcagcgattagccgataggttgaatgatcggttgttggagacttggagactcgaatgctgacgacgatcgcaggctcgaatctcaagtgttttggcatgccgatagctaatagccgatggcttggtgtagaatcggctgaaggatccagtgctagtactaatgctgaacgcctttggttgttgacatgaaaaaaaaattaacacagtaatgtaagggatgcaactaagcgaacaaaatgtgagttgttaaacgaaaatgtaagggaacccatgagaaaataagttgcgagagcaattgacaggacgcagggctttctgtatcatccctctgcaaacatttacattaggcccttaagtcaattggaaggcgtcaattttgtaccatgcatctcacaattattgttttgagcttcgatttgtttcaacctagattttcaatcttatatggaaatgtaggaaaagatatcatcatagatctatgcattatgcctgaagtcaatagatcacattattttaatgagccacacaattctcagtattccaatgcaattcagcctcaagacaaaaaaaaagtcagctcacagtcaggcttatattaaaacccatatcagatggatcagtaatgatttgtgtagaatatctgtcagcgtaagatttcatctcgtacgcacgagcgcctgtgtcgctggctggctaaaatccatctccagcaagcggcagcagtaccatcacgcaaagacgcaccttggagattatgtataccatacatccatacaaacaatttatccgactaaaaataggaggaggtgcgccatatccatgtgttacgttaatagaataacagcatgtggggttcgagacaagaaaagcattttcctatgtcacaatataaaatttgcaagcatgtaatatttctataagcgaacaaactttaaaaaccgatccaaacgcggatggcgtaccacaatactggtaaaaacatatttaattttaaaatcattagtagagattacgacgaaaacgttttgttctttttgtttttttaaggcattttttcttttttttatttttcttggtttttcgccctttttattttttggatggacttttttcacggatttttttggttttttcgactgccttttttaaacctttttacgtattttaggcctttttttttactttttatataaatcattgcatacaaatcccgattttttttccttacgaacgacttgttttcatcgttttaggggaatcagacttttcttttggtggacttttttcaccttttttttcattttttatggacggttttttcaccctttttacggggaatcggaatcggatttgttcgcccttttttttaattacgggcgacaaacacgttcccaattaattcgcgtggatgaaaatataaaattaaaaccgatttaaacatggatgacgtaccaaaattctaacaaaaacatctttaatttttatctctacctctatctctactacttaaaaaattgaagatgtttccttcatctgtccaaataaaaaaaaagcgaaaaaacaacctaaaataaaaaagtatgattctcctaagaagtggcagaaaaaaaaccgtagatccgattcccctataatttttgtccattttattttctttttgcgtttcttactcttttttttttctttcaccgttttttccttttccttttctctttcaccatttttttatttgcctccccatatgtttcctcctccaattcattgtaaaaaccgattcctcactactcattattttccccttgaattcccctttcaatttggctttaattcaccgaattgaatctccatttcatcgtcattattttttatctcgagttttgtggattgcttcaattttgataaaaaacggaaaaaagagatcgattagatcaaaatctctcaacaattttgatttgatggagaggatcaactccattatcatacgtgcacaggttatgcgagaacaattttggagatggagaaagattcaactggatttgaaggagaggatcggctccatcatcgtacgggcacgggactatgcgagattgagtggattaccagattttatgggaggatcggctccgtcatggtacgggactatgtgagctcgagcggattaccggatttgatgggaggatcagctccgtaatggtatgggtacgagactgttcgagctgggcctatagctccacttatgggttgagccgaagagaggtagaccaagcagagggaaggaatgagcgttcggtccaaaaccaagaaagcatctggtccaaaaccaaggaaccaagggagtataatgtataggataataaacgtttttacccgttgcaactcacgggcattttttctattatactctccgtttctaaatatttgacgccgttaacttttttaaatatgtttgaccgttcgtcttattcaataaatttaagtaattattaattcttttcctatcatttgattcattgttaaatatacttatatgtatacatatagttttacatatttcacaaaagtttttgaataagacgaacagtgaaatatgtgttaaaaagtcaacggtatcaaatatttagaaacggagggagtaatataatagtagagataagccagccaaaacttgtgcactaacttactgattggattcagatgcagtaacaaagtttactaggcaaaagagtagcacaattctgatcggacaaatacaaatttaccggacttaaaattaagaagtcaaattttgtgcacaaatcctgattggactccgattcattccgacaaaaaaaagctacaattctactccaattcggactcccaaacgagacagctcaaggctggcggcagaggcagtaatccggcggcagcgacgcgggagagaccttcgcgatctgaggcggcgacggggacgtcagccgccgtccctcccagacgtcccagcgcccgatcaaagcctccggccagcacacgcttctgatcagcaaacggacgaaaccaactctgatttctgaatcaaatctatttccagatcgagcgaaatccctgctgtataaagcgcaatgacaccacgactctgattcctgaaactgaaagggactagccgattgctagatctcttggttccctgctgcacaaaacccagccaccaagacagaaggatcaatacacctggagagtaaaagaaaaccagaaaaacaaacacatatggccgcgaaatccgacgaccactcgctgccgccgggcttcggcacgaggccatggctggtgcagggatcacgcggcgacacgctgactttcgtcgatgtgtcagacctcagcctgcacgagaccgttgttcctgaggttcgagggaagacgtgcttgggcggcatgcacggtgactggctgctgatgctgcacgagtctactgccgattgcttcctcctacgcatcagcaccaatccacggaccaagattcagttgccgccgttgcatcagcctctgaattttctatcaacaatcaagatgctcgagtcaccggatagcccgaagtgcaccatcttaattgccagctcaccggaggtggaagaagagagctaccttctatactgccgccccggtgaagacgagtggaccaaactggtttccccgttcaatgacatccatctctctgcttttatgtgcaactacgaaggaaagatctgttctgcttgttctaatctcgtagtgatagatatggtggatggtaagatacaactacagcgagtgggtaccatcaaggatgaagaaaaatatgcccgtggaagtggttgttaccatgttgtcgagtcatgtggaaagttgtttctcttgtggatagaagagctcgggtgctttgggaacgatggattgctcaccgccattgatgttttttgcttggatcttgagttgatgtcatgggagagggtggagagcattggcagcgaccgtacctttcttatctctgaaaattacactttctcatgtccttcaatagaaggtgtattgcaaggaaactgtgtttatcttgtatggtcaagctgcgacagtgagaggctttataagttctgcttggacgacatgaccattagcttccaacagattctttctcaacctacaaaaccctggtgtagagcattttggactgttccagcaaggtgagttgattcagcacacacgactattttttagcattgtctgcaatagttttttttttccaaaaagaccacattttactgaatcatgtatgagtatgactattgttaatatgcaactacagcatcgaatcaatcttgcccatggaaatatcagacaagccaaatagtcttctatcgacaaaggtttgtaaatccgtgcaagtatgttgcagtgaaaaactaattccctttatactagtaaatacggagtagtaactaaaactattcttttttcttctttttagctgtcaaaggatattctactcaatgaccttgatgagcacgatggactggggaattctttatgtctatgggaacatctaccagtagacttgctagagttaattgtctcaaacttatccttggtagaccgcatacgatttccaactgtttgcatggcatggagcaaggtgtcgaatccaatagagcaagcaaaagtttggccttggctaatgcacatctctaagcaagatgggatgtgtaggttgtttgaccctctacgcggtgaggtgtacaacatgcaagtctcaatatttgacactaatgaagatcgacacatttttcgctcctccaaagatggttgggtgttcacatcagctgggatctatggtcacgatatattcatcataaatcctttcactgaggatattgtggagcctcctatgttcgaacgtagataccactacaacggtgtatccttttcttcaccaaatccaatgtgtccaaactgttatttttttgggatcaacagtagtctcagcgggaagtttctcaacattcatacgtggcggcatgaagaaactgaatggatcgagcaacgctttgagtacgatgtgccattcccagtaggttacaataaccccgtcatgttttgtgggaagttctactgcctcggaaggaagggcaaccttggtgcctttgatccaacaagcaatacttgggagattcttgacaagccagagccgatccatgttgagatggatctcttacaaaatgatcataggggaagagagttctgctacttggttgatttagaaggagaactgatatctgtactcttgcataatgccagtgaggcgcctcgagtgttcaaacttgatttgacaaaaatgtcctgggttgaagtagaggacattggtggtggtgccttgtttcttgatcacaggacatcgcatggtgtaggatctcccgatggtggtcatggaaataggatatacttccctagatattctgtggatagaaaaccagtgttctatgatatggataacaagatgtactacccatcattttatggtcacattgagccattgaactgtgtgtgggttgtgcctaatctgcacaaaaatgaatcaacatccgaagattgacccaagcgtgtgtaattgagcatatagtgcttcttttttttcttttttttttttgcaaattgtcaaatatggaaccacgagtacctctatttgcctcaatcgtattgctccacaaatatggtttttacctgtttttacatgatctctgctagactgctacagtaagttgcaggttttacaattcatgtacggggtcaagtgtggtataattcttccttgatgatatgctataattggatctcgttgcagcagctatttttgtgctgttagagatattggagttactttaattattgtgtgcatggtgccacacgctgcacatattcaggcgttcttgaatggcgccacacgtttaggcgtagttgaatgatatgaagatttagcaaaactatcgatatcctacgatatttggatagtgataacttgctagttcttgtgggaatcaagcaatccatggtatgaaaattttgcttgaaccatcaagcaattaggaaaaactggggcaagatttcacaggttgtgaaatatattttgtcaaatcaggttttagagcaggaaatatatgagataaatctgtaggggcttgaaattgaaatgttgattgttcgccgtgattttacagcataagaaatataatgctgctagaaatttgatgaaaagtcagggattataactaccaagcaatcagaacaaggtcttgcaaattacatgcttgcttctcataaagtgtccatgattctcagatgggttatcacaaagagatttgctccggtccggcaaaaagtatctcaagatactggtacctcattgtactaaatcattttcggtcgttggatctagctgggtagaatgagaattgttaaatctaacagtcggaaacgaggtaccataaggtaccggtatttcgagatattttttttgttggaccggatcggagcaaacctctatcacgaaacatatactgttcaggtgaaccattgatgcactgcttttcttgaaaggaaactcccattttttttaactgaacttctcatcgatgcacaattatacttactcccgtttattacccgaacttgtcaatataccaactgagccataatccataaatataccggcgcccaattgatgcatatttttctccgttgcaatgcaccaacatccaagtagtaattcagtattccttgcagaaaaaatagtactccctctgtttcaggttataaaacgttttgactttagtccaagtcaaactactctaagtttgactaattttataaaaaaaaatataatatttttaacccaagataaatatattatgaacatttatttttattcaattatagatttaatgaaactatactggtgttgtaaatattactatttttttctataaaattagtcaaacttagagtagccatcttataacctgaaacggatggagtaattcagtattaaatatgaaggggatttttggagtacattaaagtggacactagctatttattgggttagatccaacggagatgctgtcctactgcacccggtagtagtgcagtagaattggtggaggggtaaatttgtactccatgtggtatgggtatgtttgtgttagattgatctctggccatcgagtcagagaattgctctaatgggcttggcccaccccaagcccacgcgcacctaacgttaaggaccgattccctcggtcccgaatacacgtcgctctttctagcgctatgatcggaagcgtttttttcctcaagaagaaatcgcccccgatccccttaatacgcatataaagggaaccttgactcacgggtacgagggtctactcacacactctaagccttcccaaaacccctaagattaccctcagactatcgatcttaaggcgtattggaggggagcgaagggcgaattcccatcgccgccaccgcacggtgatctccatcaccggctcctcacggcgactacaccaacgcatctaaggcgatcaatggcttcttcatccggttagtataccaccaaattccgcatatgagatattaggtgatcatgcatagcctaggtttatgaatttaagatttaagtacaatattgtggtatcagagccttcttaggcctttgcatgttccatcactccggtggtgaagccactaagccgcatcaagtctccctaagcgccggcttgttaaagttttagggtttatgttctgttaggttttgttcatgtcgcaattaagttcaattttgtgattcatgttctgttgatcgatattagactaagttttatgtttagattgctatccctactcagtttatggcttgggcagcaattggaaggaggggactcagatcggggttgagattaagaaaatccccaatttttttccccaagttcctaaaacccgaaaccctaatttctgaaatttccccaaattaagaacaaagcatgatgaattctcgaattagattgatcccgattggcaatttcccaaatcatgagaaaaccctaaggaattgggactcaccgatttggggctcaggtcgtcggagtctcgccgcgcgtggcatgagcaccgccgtgcgcgtgtgtctccgagctcctcactgtcttcatgcgaatggcgcatggcttcacgcgtcgccgtgcatccccttagccgccatctcggaccggcctcacgctcgcatcagtccatcgccgcgtgaggtcgaggctcgcctcggtgtggctccggccgcacctaggaggaggaccgaggcgggaggatgagacgacgtgcggcatcagcgtcgccgcacgtcgccatcaagcacgccgccgactggggcctccgcatcgccgctccaccggtgacccaccgccgttagcttgcacggattttgctccgccggtgcgccgtggttttgaccgccgcctaagccgtgcgtggcattagcttgccgcgcatgcgggggcctcagcgacgccgctccgccggcgagccacccgccgcccgtctcttcccaccagagccgtgcacggcattagagcgccgtgcacgggggcctcggcgtcgccgctctgccggtgagccgccgccccgctctcgcctcttcccaccggtgttcgtagatgtctcgacatcaccggaacagcatgtgggttgattcgtgttgccgcgaatcgcgtggaacggcggcgctactaccaaccactgccgcgacgccgtcaccgccgccgctgccccaacccaccccaccaccgtgccgccaccgccgccgccgccgtccccaccgttgtgctaccgtagagagttaggtttggggatggatccttttgaatcggggtcctgtgctgttgaacaatttgagggctgagatgctaaagtttgtcactaggcggggtgtttcctgaacatttcaacatggggtgacgtggacttatctggaacctacattttccatccaagtgtggtttctatgtttgcactggagatggtgtttccactatatatcttctcgaccaacgtggcctaaatcataaaggaagttggttggtgcgcatactcaaccgatgcatgcatccgaacctagctcggtcaactcgacaactcgacgctgggctgcggtgcgcgcgaccgaacatggcattaatggtcaggatttatttcacgcggcgagcggtagatgatcgagcggcttggcccgctcgtcagctgcacgcatatcatgcaccgtccacacgaatggaatcactagtacgagtcggcggccacgctcgcctgtgcagtttaaaaaaaaatgaacggaaaacagcactagagtgccttttcatctaagagcaggagaaaatacaaacccctaggggtaaaaggaaaacgaagaaccactatagctgtacactatacagagtgcgggattaactcacgcaaccgcttagctcctgctaaagcccaaaggctcgcctcctctttgattttcattagtaggaaattcgttgccacctctttgtgatcaaaaatccgccgatttctctctttccaaatttcctagacgactaacagaatgagcgatcgaagtccttttttcgggacactaggcgtgtttgcaatgttctcccaccactgtatgactgactgggcttcctcccattccgttgggtccatctgctgatagcccacccatgcagagacgaggtgccagatcctcttggtgtatctacaagtagcaacgaggtgcaatgccgtctcagtctcgcggcggcaaagagggcaacaaccattgttctgccatcccctggtcgcaagctggtctgaagtccagactctgttctgaatgatgagctaagcatgaaatttgcatttccccggcgcgcaggctttccaaatcaaggaattgagtactcggcgccccgcagcactgcgcatggtaggccgaggaggaggccgtgtaggcctgtgcagtttacagttacagttgggtggggggagcttttaattggctcacccaacacatcacatgcacgacgcgcacatgcgcgggcgcgtgatttttcggtgcttctctcctcgcccttccgatcgcgacgtcggcccagacgagctagacggacacgggggacgagccactgtgcgccgcagagatgcaaactgtcgcgtcggcgtcgaaccatatgcgccgcgtgtttaccgccgtctaccgcgaggggcctgtgcggctgtgcctgtacgcacgtgtcggtggtaagctgcagtgcaccgtacacgtacatactccatgacgtgccagatctgtttcatattataatagatttttaaccttttttaaatcaaagttcttaaaagtttaatcagattttaaaaaaacatagtaccatttacaatatcaattttatgttattaaatctaataccgaatatattttaatagtctctttgttacgttgaaaatagtattatattttcctctaaatttggttctaaacttgaagaaatttggctttaaaaaaatcaaaacgatttataatatgaaacgaatatagttacttttcgtaactttagctttttttttaacctcttgataggtttggtgagtgcaataaatcacaagtagatcggcccaaacaaatgggttttcaattagaataaatttaggctttaatcgcgccaaaatgtgtgtatacttccatcattaatgtgtcatgcgactcggcgaggggtgtgctagcacgaaattttttatttaaatttcaaaataaactttttaaaaacttaaataaaattttgaagtttttagtcatgtcaaaacaatattgtcacgccggtctaactagtgtggcaatattaatcacgttgtttctagttggcatggtagtggtcttattacatcattgtagctggtgtattaggataaaactgacatacccgttgcgggtggcgtgtcagtgttattttgtcacgctaagcgagttgcgcatgctaaaaattcagattttagaaatgagttttggaatggtttgtttttaaattaaaattaaaaaggttcgaaaaagaattctgccggcactaagaacatgcccagcagatcttccatccggccatccatcctatatttagcgtatggaggtgaaaaaataaggtccaccaaagtctccatcacacacgccatctttagatgtcatccaaaccgagctctctccatgccaaatttggtgtttctctcttctcacgctatcctccctctgacgaactcgcgccaccatccagactgtaccgtggggaatggagaggatggacataccgagtatgccgttggagtttgctgaagaggaggccccgccgtctgtgccgcccccatcgggactccacccatgccgctgctcctccgccgcgctgtcgcgatgcacgcggccaccataggcgtcctccgcctctcgcacgtctgtcggcggctgcctcatctccggccatccgcggccctcgcctgcccagttgctcgcctccacggccgccgcgtgcatcctcactgccagtcgcctatccggtcgtcgtccgccgctgcacctcgcccgcctagccaccgccgcccctcagctgcacgcccgccgccgcctatcgaccgccccgctacaaaccctgcagagaaaagtagtactagcagagaaggcataaaaggtagagaagaagcagttaaatgaggagagaaaatatagttatgttaattccttgggttatcattttaatatattaattaaaaactacccattaaaaatatatccattaaaatttactcatttcaaaatattatcgcaataaataacaccgttaaaatcaagtcgttcaaaatatatcccttaaaatacaaatgtaagattagttggaagatattactaaaatataggatgatgtaatatggatgatctgttggagctagaagggatatggatgatgaatttttttggatgataatctataagggtattcggaggatctgagctccaggggatgctctaagcaactgggctttactgaaaacagactctgatagcgcgctctccgctttaaagtctttttgcataagtacttgaagcacatggtggcacacaggcttgctgatcctgacttggataaaggacacctttcgatgggcctcaatcgattattccatgccgctgccattactgccttgactaccaggaaaagcagatttaatccatttagtgttttggttgtgagagtgagtgtcggtctggcatgaacaacttgtactatatccaatctactccagctcgaacaatgatgtgcattactgatgtttaatttggtcaattcacactcatgtgagtggatcagcgtatgtgtgttccaatgcaaagttgaagtagctaattgcactggtggatatatcttcgtttggttacctgacgaatactgtattccaaaacaactaacgccaatataaacacgaaaataactgacgaaacaatgaaacatcttggagacaatgagctgcattctgaaactgtgaggtgagcctgagccaggagcatcgatctccagttggtccatgtccaccgccggagagaatcctgagcacgaggcgcgtgtaccacagaaaagcagcgagcttcccgtgctttacacgaagaacgcagctatcacgtatgcataatttgcatatgcgtccaacgagccgcgtcggcgtcgctggcttggcccggtgctcgatcggtcgatgcttcatggctaagatcgaacatgagaacgttcagaaagagcaaaaacgcgttagtatcgactcgtagcacatggcagccacaacccttttgtatgaaagaacactttggcgttcccacacaaaaattttacaccatgtcacatcgaacgtttgaacacatgcatgaaatattaaatatagacttaaaaaataactaattgcacagattgtgactaatttgcgagacaaatcttttaagtctaattgctctatgatttgacaatgtggtgctgcagtaaatatttactaataatggattaattaagcttaataaattcatctcgttgtttactgacggatcatgtaattagttttttattagtgcctaaacatcacatgcgacaccttatataatacccgatatgacacgctaaaactttacaccctggatctaaaaacacccctttgtgttagctgatgcgcacacaataggatgcctgcctgctgcggcagagattctcgaagaatatgtcctgattagttctggtctactggtatgctgtttgcaaaagctaggatggatctgtgtataatgccggtcatttccttgtcccaaactggacggagctgcagtgccagcaaccgacgcccggcctcacgtgaaaaagcagatgttttgtgagttgtgagtttcattcctgtccaaactcttgaccttgcctgacccatctagcagcgagacgcaccaaactgtggttaccaactttactccacagtacctaccatagacaccacagaagcagaggccatcacgcatcactttcttctatcacatctaaagatcagagtctcccggagatctctctatgtccctgaccctcctgagacactctttttacaggccaaaagttccggtactatttgaattttatcaaatttgaaaagccattcaaaatacaaatgtgttattcaaaaaggtgtcggcccccctcagaattttccccgaacctgattatgactgtcagtgcatgagttcaaaaagagtgtcatgtgaaaccgatcaacttctctgtatataaacccttcagtccacggcccaaagcaaagcacacgtacagctacactttgtcactagctaagctagcaagtgcaactgtgcaagccatggcgtcgatgtgttcgaggtcgataccccagctcatcctcctcctctccctgaccgtcttcctcctcgccaatgcgcatcccatggccccgccatcgccgccgcggaaggcggccgcgcctccgacggcggcgaagggggtgaccggcatttcgccggtgctcgtctccacgctgcgcgagacgctggacgcgatcaagaacgtcgcgtccatcatctcgtcgttccccatcggcggcatcctcggtggcggcgacctccgcctctcctccgccatcgccgactgcctcgacctgctcgacctgtcctccgacgagctgtcctggtcgatgtccaccacgtcgtcgtcgtcctaccagcccaccaacgccggcgccgccacgtcgtcccacgtcggcaccggtgacgctcgctccgacctccggtcgtggctgggcggcgcgctgagcaaccaggacacctgcaaggagggcctcgacgacaccggctccgtgctcggctcgctcgtcggcaccgccctccagaccgtcacgtcgctcctcaccgacggcctcggccaggtggccgccggcgaggcctcgatcgcgtggtcgtcgtcccgccgcggcctcgccgagggcggcggcgccccgcactggctgggagcccgggaacgccggctgctgcagatgccgttgggccccggtggcatgccggtggacgccgtggtcgccaaggacgggagcggcaactacacgacggtgagcgcggccgtggacgcggcgccgacggagagcgcgagccggtacgtgatctacgtgaaaaagggcgtgtacaaggagacggtggacatcaagaagaagaagtggaacctgatgctggtcggcgacggcatgggcgtgaccgtcatctccggccaccggaactacgtcgacggctacaccaccttccgcagcgccacagtcggtgagtgcatccacgcctccaaactagcttacaccaacatatcctgttcgatcatgaactagaagttcattacgtatgctaattagttaggttaattaaacttaaacggtttgatcgatcgtaatgtcgtcgcgtgcttattataggagtatagatcaacgagctctcaagtgcatgggtcaatgccatgcatgctagttttagtagctgcattgcacctcgcgttgtacctgtatgcgtgaggcttgggcaagctaagactcatgcctaggattagctcatcatcagaaccacgatgagacggtcgtgtcactgggagtacttacgtaagatggtcaatataccatcattggaactgtgctccgtggggccgtgacaacgtagggtccagtccgtatcttgctctgctgggcgagatacataggagtacaccgtacccaaaaccccaagggcagcagagcacatggcattaaacatggacaagctagcaacgtgccaacatgtttcatgtttggatgtactaccagacttgctatggtagacggaactcggaagcctccgagaagtagtagtagaactgaagaagggtgtactgttcctttcatcttagccgcgtaagtacattcaagtccgaccggtttaccaccttcccagccttaaatacacacatgctgcattaacgcaactccccagtggttgccgtgcaccagcaacgaattcaatgaactagctgagctgagccagcggcgatctgcctgggccgccgggccggctatcccaaactacaaagtcctccttgtttttactactacatgtcaatgccacttgccacatgctgcggtgcatttttcatctggtccggtccacaaaattcgtgcatgtggtgcaccgtgcacggtgtgggatttcgtttaatagtttccctttgcaacgacgaccctatagtggattagtggtacagtgatgttggtgctggtgccgccaggactgacaactgacaagtgacaggagtactatcaagccaaatgcatccattagtactgtagctatgagagtaataaaggtaggagtggacatagatcaccgacacagatgatcttcggctctggtctcaaagctgctgcgtagtactccgtatgctgctaatcttttttacttcgtctcgtcatatccgggtgccatatatgaaaccgcgttgtttcgctgcttgtcagcaacttgtgtgccaaaacaatgatccaactcgtggttccatcagccacctgcaccctcatttacgaggttgttaacaaagtcttgtagtttcaactaaagtagcggtatgatctgcgggcccttgtgttttcctaaacaagtcacgagacctcacctccctgtctcacactctcctgcacggcatgtactcaagcaacagttgcagatcacatgcatgaagtcatcaatccctctgaccattcactcgattcaatcatttgattgcatttttaacagcagtaattaatgatgtcagactgttaattactagtagtgcctgacattgcatgattgcatccacctcctctgcagctgtgaacgggaaggggttcatggcgcgggacgtgacgttcgagaacacggcggggccgtcgaagcaccaggcggtggcgctccggtgcgactccgacctctccgtcttctaccgctgcgggttcgagggctaccaggacacgctgtacgcgcactcgctccgccagttctaccgcgactgccgcgtctccggcaccgtcgacttcgtcttcggcaacgccgccgccgtgttccagaactgcaccctcgccgcgcgcctcccgctccccgaccagaagaactccgtcaccgcgcagggccgcctcgacggcaacatgaccaccggcttcgccttccagttctgcaacgtcaccgccgacgacgacctccagcgcgcgctcgccggcggcggcaaccagagctccgccgcggcggtgacgcagacgtacctcggccggccgtggaagcagtactccagggtggtgttcatgcagtcgtacatcggcgccgtggtgcgccccgaggggtggctggcgtgggacggacagttcgcgctcgacacgctctactacggcgagtacatgaacaccgggcccggcgccggcgtcggcggcagggtcaagtggccggggttccacgtcatgacgagccccgcccaggccggcaacttcaccgtcgctcagttcatcgagggcaacatgtggctgccgccaaccggcgtcaagtacaccgccggcctcacgtcttgatcaccaattcaccatcgagtacgtgcttcttgtgtgcgacagtagtacagcacatgatcatactacactttacactacgttggagggaggtttaattaaggatctggtgtataaaatctttaggaattatggcattctgggagctatttagctgtttaattggtggttaatggaacaagtttgccttttgtttttgttccatgcttctctggtggtggtgctctgtttttggcacaacgaatggttgaaatgtgcatgcacggcgcacaagtaaaaatcacacagaatgtacatgaaacaggcaggtatcagatattcacattggaccgtctcctctcgaaagcatatgtacatggcgcacgcatgcaggtgcccgggtgtctgcacaaatatttttcacgcccacatgccgtacttcaccggcgtgccggtcggcttgatccatggctcggcgtgcaagaagttctgcacggtgaacttggtggcctccttcttgctgatcaccttcttgtaccccggccagctgacgcggccggcggtggcggcgccggcgcccttgttcccgtactccgcgtaccagagcgtcttgagcccgaagtcgccgctccacgggaggtagccggccttgtctacgaaggcggggatgtcggagttcatgatgagcgtgcgcgagtactcgcgccacgggcgtgcgaggtagctgcggacggcggggcgggaggcgtcgccgagcgccgactcggcggcgaagcggtagtgctggagcacgaagccggtggcctcgcggcggtcggcgcggccctgcgccgtggcgatgttctgctggttgtcgagcgggcggcggagcacgatgacgcagttctggaacaccgccgcggcgtcgccgaagatgaagtcgacggtgccggagatgacgcagttgcggtagaactgcgccttggagtgcgcgtagagcgtgtcctggtgcccctccatgcggcagttgaggaagatggacttgtccgactgcaccagcagcgccaccgcctggtgcttcgccgcgcgggccgtgttccggaaacccagcgcgacgcccatgaacccgtcgccctgcgcgtctacgtacatgcacgcgtcagcctgtgcaggccatgtaaatcgatggagaagctagcgtgcaatgcgtgttctggctcttactgaaggtcgccgtcttgtaggtggtgaggccgtcgacgaagttccggttgccggtgatgatggtcttcttggcgccgtcgccgtacatggtcacgttcgccatcttcttggtgatcgtcacgtactcctcgtacaccccttccttcacgtagatcacgtacctgaagaacacgattcatgcccaaagctttggttagtagtactagaattgatgagagatgttgaacattcaggtcgatcgtgcaggcgcattcaccttccggtgtacttcttgggcatggcggcgagcgcgtcgttgatggtcttgaacttgccgctgccgtccttggccacgacgacgttgggcttgagcttgttctggaacttggccttgagcagcctcctctcctgccggttcacccagaccaggacgtcgtcgtcgttccctttgggctgctttggggcgttctcgtcgaaggcgaagctgagaagtcgccggaggctgttcccggacgaacggttcacttcgggctgcttcgtggcgtcctcatcgaaggcgaagctgagaagccgccggaggctgttcccggacgaacggttcacttcgggctgctttgtgacgtcctcatcgaaggcgaagctgagaagccgccggtggctggccgccgaagacgctgggaggtggagcgcggcgaggaacgaggacgccttcccgatgagggccagcgcgttgctcgtcagctccttgccggactccatggcgtccctcatcttgtccttgaggtcgccgtcggggaagccgtcgatgcacgtctcctggtgcgcgatcaccgcgctcagccacacgcggagctggtacccgcccttggtgagcccgtccacgccgccggcgtcgatgcctgcgagagtgcggtcgaggtcgtccttcgcgttctcgtagatctccttgcaatccgcgacggcggccttgacccgcgggtcgtcgctgacgatcacgctcgacttgtcgaacgccttctcgatggcgtcgccgatcacggccacggaggcgcgcacgacgtccttgggcgacgacgacgacgacgacgcgctggcgttcgcggcggccttggcgaggctcttctcgcaggtgtccttgtagtccgtctgcgcgcacatcgccttgatgatcttggacacgccgtgcaggctgggctgcgcgccgccacctgacgctgaaccggaggaggaagaggagccaccatcaccgaagctcgcgttgtaggcgacggccgcgccgcccatgacgatgatgataagaatgaccgacgcggcgccggctgcaaccatgacgcgcctgcgctcttgcctctgcctctcgacatggcggcgctcagtgatcggatcgaagtccgagaaggtcgttgacatggccgacgaccttctcgccctgcctgaagaatgttttcggcgtcgccgccgccgctctctccctccctctgcccttaccacgatcggcaaaggcagagagagaggatcgagcgagagcgagagagtgaggggggagaagagcttgtttattcagaggattcaagggtggagagagattttagggagtcaggttaaatttgggagctggttcgttctcgtttccttgtcatgcaaaggcagcaacgcccgcgcgggagctcctgacgcggctgccgatttctcgcttcattcccagcaaaaacaacgtgactacacgggtgtgtttgcaagagcaagttcccaacactccccacgcgtacgtttttcaaactgctaaatggtacgttttttacaaaaagtttctatataaaagttgttttaaaaaaaatcatattgatccatttttaaataaaaactaacacttaattaatcatacgctaatggattgctccgttttccgtgcataggagatgggttcccagcacccacctccgaacacagccgtacgtgagcactgagcagtttgattccggcgaagtagaccgtttcaagttgtaatgggccgttgagcccgtggtgtgtgtcaactttgtttcctcgttgggcctggtggttcgtttacggcttatctgttgttgccttgttggagacgagatgtgttggcgtgtgcgctttctctcccacctttcggcttttcacggattccaggcctttcgttgaggaggacattgtagatttgtagactgtagtcttccttttttttgttcaaccacgttgaacaagcatggtttgtatcggtataaagtggcaaacacgcgtacttgagccaagaaaaacatgcaattagaccttttccggtggcacaagcacagtgacaaaaacccaagtggcaaccaagatttacaattccgagatggccttccgttttaggttctgacagaatgatggttttcgtgaaatccggtgaaaagccgatagattccgaacaaatttcataaacaaaaatttgaatacaaattccctgagtttaccgataagcttgcgaaaacatgtcggctttggcaaaattccgagcgaaatcatcgaaatttcaatccgtaactagaaaaagaggtaaactaagggtgtgtttgaggagaaggggattgaggagattgagaagatacgcaaaacgaggggagccattagctcatgattaattgagtattaactattttaaatttcaaaaatggactaatatgattttttaaaacaactttcctatataaatcttttacaaaaaatgcatcgtttagtagtttgggaagcgtgcgcgcggataacgaaacaaactcactcactatctcaccctctcaaacgcagcctaaaattgttttcctttttttaattcgctattcttttctttcttactgtaaattttagtaaatacatggaatacatcgtttttttgaaaatttatatcccaataggttctatgaatatcataatatttataagattttatttgattttttgcttttttcttaattcaaatttaaatttggatgaaactcatcgaaatctcatacggtttctactttcgagcctcatcaaaacctcgaaatttcgtggaatttgaccggtttttgtcggaattttgtataccctggtggcaacagtgccattgacagagaattatactcctctctgtgttgatttacgtaattttaaggagtcaggttgattaaagttagtcaaactatggttatatactaaagactactttatacagctataaatattggattttaagatttaattaaacttttaatactttaaatattaatttaatattaaaacaaatttataatctaacaagtttttatatcacgatggtccttgaattaagtataaacatgtatttcagcacatacacatagactcctttcagtagagtatatctctattaattgctctaatgtaatccaacatagtcgttatcggcacatcgagtattaatttctcgagttaaaattccacatccataatttcccgtcacgctacaacacaaatactttccacgctgagtcaaataaataccatattatataaatgttacaagtcatataaaaaaagaaaattgatatgcatacgatctaactgtccgactcacatacgattgaatttaatcaacacatataaaaggatgtagtccatgtaaacatgctctcattggattgatttatggttggatgtttcttgtacatgagcgtatagcagtacttataaaaaaaaaccagcacgtataactataagctgtagccttggacgtactctctctacatggtacgcgcatatctttggacatttcctgtcaagttcctatcgtccagatgatcgatgttccaatgatatatgcagtagcaatcagccaaaatataagtgtagtactgtagtgtaccaaactaatttcttccgttcctttttagggataatgcagaggaatcatttcattttcgtgtagcgaccaactgacgaccgtcgacatgattcctgatttctgcctatcatacttcaatcagaatgatttggttttactccaccgattcgatgtgacatatttttatgttttctagtatttcctccatttcaaaataaattatttttgaagttaaaattttgttctataaatataataagttaatttacatcattttacctacttaggatctataaatcaagaagtatatcattcaaaactctttacgtacctacccaacaatactatttttttaataagcgacactttggttattttctctccctactaaaattgccttagaatacaacatatgcttttatttttggatagcaggagtagtgcaacgtacaagaggatttttcctacaatagaagtagaggatttttattgtaaatctaaaaatttacaatagagcaaactcggtctcggtccttggtctttcagtaaattctaataatctaaaactggaattgcaatatccgaataatttgagtctcggtcatgaccaaaatttcataaagatcccaaaattaacatacaaatcaccaagaaactttagcggatctaaaaaaaatcatatccactatttgatcgttcgctgccatcggccaccgccagcgtggaggcggcatcgcaaattcatcgtcgctaccaccgttggagtggaggatgcaccatgacgacggtgcagcaggacggtggagcgggctcaacggccaggacctctagcggtgcggctatcagcgtaaacggtcagcatgatgcgatatttgtggtgattgcgagaatcgcatgggtatgggtatgtgtgtggtgattgggtgcacggggtctgactgggagtagtagtaggatttgttgccctattgggttattttcggtatattcaatcagttcagttaaccgataatgattatcggcacggcactcacctcatctgcatgagcagagggtaagatgcaggaaggagaaagaaaatgattgaaaaaacggtctcagtctcctgacctttagttttggtctttcggattcggtcaattttacctggcaaaagaagcgagagagttataagagtttgtcctatgatgagtaagccagtaggtgaatgatctacaagactcggggcttgttcactttgctactattttcaaccttaccaagttttggtgttgttaaattttagaagagttaccaaaattttagcaaaattgccaaattttggcaagatttcgtatgtacttaataaaatttaacaacaaactaacatagccaaaattttagcaactttaccaaaaataatagtatggttaaaaattacatcaaagtgaacaggccctagtcggtcttaaaaaaacaacacagccagatggctccatgcaaaccagtgattacaaaatactactactcctaaacactgtttagatctgtcacttgggcacttggcacacatgtgcagacagcagacttgcaaagcttgacctgatcaacctattttaacttttccttgtggaaaaactagctccattaattaacctattcatttttccctctcgtttcgtgtcgagtcgccgtcttgttcccatcacgctatacgcgcccaaaccgtccgttctcccggccatctcgacagcgaccccgcgagtccgcgacaccctcgcggcctcgcctcgtcggacccctgggcgtacgaatcgcgcgcgtgatctcaccccgaatccaccggtccaaggctccccgtccaatctccggcctccgggtcaccgggtggcggccggcgggtggtagctgcgggtcggctcagctcgctgctcgcctcaaggccctcgcctacagcacgggccacggcacgacacgacaggacggctactcgtacttgcttcagcccgggtggaccacatgtcgcgcccggcgcccgcgccgtccgtcgctctccgcccgttcgcgtctctgtctgtccctggcctcccacacgcttcgtcgacgcttcgtctcggcgattcgcggcttcgtgcgctacgggagaaaacggcaaagccgttgccgccgaaacaggacacatgcagctacagagctactgttgctgctgctgctgtgctggtggtggcacagcgcggcgtatcgtgctggtgtattctattgctatcatcacaacggctgtgagtacaaatttcgcggcgatcgagaaggttccacggttgatggtgtgacatgtgcgcgtatgcatgtgtgggttagtgccacatggggagggagggtgacgagagcgagacaggaatactcttgtggtgttttttttttctctgttcttttctcaaaagaagagtttggatgaagattaagatttttatgccatgctttttaaactgctaaacggtacgtttcgtgtgaaaaatttctatataaaagttgctctaaaatatcatattaatctattttttaagtttatatcaatcatacgttaacaccacctcgttttgcgtaaaaaaacttaatcttcatttttatccccatcccaaagataaagatgaagattaaatttttcacagaaaataagatggtattaacgtatgattgattgagttttaattattacaaacttgaaaaatagattaatatgatattttagagcaactttcatataaaaagttttaacacgaaacgcaccgtttagcagtttaaaaaatgtgccataaaaattttaatcttcatcaaacaaactcttgttggagaaaagaacgggccctctatatagcgaaattgttgctgttttcctggagtgtggtttggtttggtgaagtatgcatttgcttcgctgcatgattcgatcgatcgtccatctgcacagcgagatcatcgtggtcggtcttggtggcccacctgaaagcggcactcacggtcacggagaggtaacaccaaacaagctatataacagaatcccgttttaaaacgggatgattctgaataggtatcaggtgtgatacctatcaggtatcagacgattcgacacaacaggatgattccgagtaggtatcaggtatcaaatgattctacacacgtttcaagtgatacttacaagtatcatgctatttctaccacgtattgcgtgatactcgcgaggtatcatgtgaaacctgtcaggtatcagacgatttcaatcacgtatcgcgtgatactcacgaggtatcatgcgatatctgtcatgtatcagacgatttctaccacgtatcgcgtgatactcgcgaggtatcatgtgatacttgtcaagtatcagacgatttctaccatgtatcgcgcgatacttgcgaggtatcggatgatacctaccaagtatcaggtgattcctactagatatagctgggcatcccgttgggggaggagcacctcgacccgcgcggtcggccccctgcagccgtcccttgtagatgaggacggcgacggcggcggcaggggacgggcacgacaacggcggtggtagcgggggacgggcgcggcggcgaaggcgggggacgggcgcgacgatggcgggggatagcaatgacggcagtgggggatgggcgtggcggcggcggcggtgtcgatgggggacgagcgcggtggcggcgggggacagcgacggcggcggtgggggatgggtgcggcggcggtggcggcggcgtacggaggcgacgggggacgggcgcggcagtgatgggggacggcgacggcagcgagtgagcagaaatcgcgttgtggaagaggagctattccgttgggggacggtatcccgtcccctagcattccaaaaaaaaaagtcactgggagaaacgatcgaaataggttggatgtatctttaggccttatttttttttctctaataaaaattagataaacttttagattctcgtggcatgcttttcaaaccgctaaacaatgtgtttcgtgtgaaaactttttatatgaaagttgttctaaaatatcagattaatccattttttaaatttataataattaaaactcaattaatcacacattattactatctcgttttacgtgaaacacttaatttttattttcatctttatctttagaagattcaaacaccaccttagtacgtttaagagaaatggatgggtgaagaagagaggagagaaatttaatgtttacttattgcttattgcttattgcccggcagcagagctactatccagatgataccactacatgatgaatcatgtaatagagctcctttactagttaatttttaagcacattgtgaatggcataatgagcgatcgatgatttttttattaattctttttaataagaaatcctttcaaaacttgttttttaagatatgaaccttttggccataccagcccatgctgatccgactggcatggcaacgttatatggccacgccgctctgactagcgtgacaacattattttaccatgccacagtgacagggtaaaactatcacgctcgctacatgtggtatgttagtattgttttgccacgctagactgggctaaaaggttcggattttagaaataggttttggaaatatttattttaaaatttaaaaaaataaaaaggttcaaaaataaaaaatctcggtaggtcccaacagcaatcgtttttattttctttttcagagtacattattatatgcctcaactttatataccggaagtttacatactcgatcaaattcgaattcagattcaaatatttcatacataatatttttatacataaagaagcttataggtacaaagtttataatgtatgtatttctatatataaagcatacacacacgatttttcaattttataagtacagtatttttttctattttctctcttgttcttgaaactatcttttaatggaaaaagtataaaataccccctgaactattattgtcgaccgaattaccctctaaatttgaaaactagatatttttacactctcaactattaaaatctaacaaataattaaccccctaactcaattcggagtaattttggtcctatgtggtatatgcataacagtccagtcaacaattattttttaaaaattagtggtatatgcgtggcagtccggtgagatctctcccctctcccctctacctctctcttctcccggattcctcccgggttccccttgctaaatcacgaggcgggggccgaccgtcgaactcactggctaggcttcctcctcttcctcagcacaacaagcatgccgctctccctccgcttgtgcttacctgtcgcatccttgcgttggagaccaaggaggaggcgtgttggcggttgcctccttgagctcgagctcaaacgctccaacatccttgtgccggaggatgaggaggagatgcacatcgacagccgcctcctcgagcgcgagctttgcagcttccctgcattggaggctgccgaggtcagggaggatggggagaaacggcggagttcggcaacgaagcacgacaatggcggtgaaggagggcgaggtcgagatgctaccagatctattcgcgtggccatcctgttttccctcctccctttttctaacaccccctttcctccaggccaatggttgtagtcctggtagagaaagtggtgacggcgtggagaaagcggcggtcgtctgtgtagcgtgaagggagaaaatgtcattgagggagctcgagacgacgtcgggttcatcgccaccttcgctacttcactgctaccgcagctgcctctgtgcaagcttcggctctgccaccctctccaagtgacgggggtgacggactggtagttggggaggcaatgctgctggcctccggtggttgtcgtcaagcatctcgaggcgctcgatgctggtggacgtcggaggcctgacacgacggtgacctcatggatcctgtctactccctccgtcccataatataagagattttgagtttttgcttacactgtttgaccactcgtcttatccaaaaaatattagaattattatttattttatttgacttactttattatccaaagtactttaagcacaacttttcatttttatatttgtataaaattttttttgaataaaacgagtgatcagacaataaaaaaaaaactcaaaatccataatagggacggagggcgtacgttggcgctgcagctcttttgaatttgatttgaatttttgtaagtgcacgtggaaaggggagtcgggggcagagggaggcacatgcacgctgattagactgactgaaatgaaatgaccctctcgatatatcgtagatacggaatctacagttaaacaaaaaagatactccctccgtcccatataaaatccaaccctaacatctcagtacaaaattagtgaagagtgaaaataattaaaatatctcttattattttaaaaaatagtaatagtgatagatacgtaaaagttattgaaaaaataaaacttatcattttacatgttgagagtacgtagaatggtagaagttgattttttatacgtaaaatttaaactccagatattgacttttttttgaacggagggagtaactaaaaaaagcaaaacaaaagaatacgcttttgtccattgtgcatatcatactgctcggtgaaatttttatttggaaaagagtgaaaaaggggtgcatcgtcatcatattcaccaccacgtttaaggcatcttgttcaattggattcttaacgagtaactaaaaaatgtaaaaaaaaaaaactagaaatcttatgatgtgagaattgagtttatgcccttatcggttggcaatacattattataagcagtaacggcttattagctacttaaaaacaattttaaagtaaaatttttatatatttattgttaactacttaaaaataatgctaaaaaaatagtgttgaaaaatactctgaaataaacttcaaaattaattcataaatttaaattttgacaatgactcatgggaaacgagaagcccttaaagagagtcgaagtgcttgcttgcatgtcccaccatatgcaatccctggtgaatataacatcgtccatgtaaagccatacaaaaccatattacagtttttagtggtagttttcttcatgccagaaaattcttaaatggacattttttgagtttatttacctaaaagaaatgattttgtggtccatgagaagctaccatatatagcttttaatatgttaatttgcggtagctcttgataccttaaggtgctaatatctatgctaaacttgtggtgcctccttatttaaggacatcaaatcctttttttattatcagtttatatcctatctatatctatacattgtatataataatagttacacttcactaagcatttaaaactcaactacgtgcaaccctagtaatcacatctacaattatattacattctaaaatacaagcattctaaaccataattgttcttcacattaatttaacctaaaactatttaccatttctataacatttaaacatatattcatccgtatatttcgcagtaaaacacatgacgtcatcatctaattgccttagtacacaatcctatttaatgggatcatccgatggagaaaataatcaccatatgatctcatgttgtctcggtaaatatcttagagaaaagcaatcgtgtcaagagctacaatcggaatgtcgcaaacgagaaaatgacctataataattacggacgtgcatatatgtgagggcaacaaacaattggtcaaacattgcacaaaataattgaagatggcgctacaacgtaccatgtgtccattatatagtcatgcttatgatcgattttcaaaacggaattgctatatgtcattcgaatgaaatgttatagattttggatcattggatccatgccaagattcgtgcatctgcttctctcctccaactctggcgggctccccttcttctccggtgccggcgacacccctaactccggcagggagcatacgggttagggtttggagttggggtgagggtaggagaggggttgggcgagggggaagagggggggttaatttcctcggggcttcgagggatggccgtgggcagcggaggaccagcggtgggcggtggactttggcgggcggcgaggcggcggcggcaccgccgaagccacggggatggaggagggcagtgggccggcgtcggcggcggggccaaagcaagcgtgcggttaggaggcagcgggcagtggttgcggatccgacggcagggagccgtcggagacagggaagatggcggggtaggggcacctcgccgtcgccgccttgaggagaaagag

SEQ ID NO: 6069 - DNA, 687 bp, Oryza sativa
ataccatgcatgaaccctacaaacatatgcaagatagtgaagcctagcaccaaacaataaccactatacgtgaccgttcgtcgctaagcggagactcccaaaagaaaggcttggttcagtctgtcgaatatatggattacaataagcataacttgaaatgttgatgatatgctagctgcagcgcatacccatggtggcaatggtgcaagaagtactaataatgaactagccctttttttcacacgaagaataattcaccaatctttatttattcgcatgcagagttaatttacagcacgaaccgtgctaccaaagaccaacaaggcttactgcacacagtcaccgtcatttattccactaccataatatatacacatgacatgtcactcttttaacagagctcgatcagacactgcagcctgcaaccacctccaatgagatggacagtgaaagcactcctcatgcgtctgagcctgcaacggagggtgggaagacccctctcccgggctggcgatcagcaaccgatccgtgccgagttagcaactacatgcagcgaaacatcacatccattatattagcatttttttagaaaaaatattattttaataaaaacttgtaaaaccacaaatttagcaccatgtcgaacacatgacacatggtgtaaggtagggttgttgtgcagtaaaa

SEQ ID NO: 6070 - DNA, 3758 bp, Oryza sativa
tataatgtaaatctcgaaattacatatgtaaatttcaaaattacatatgtaaatattaaaattacatatgtaaatagagtgtaattttacatgtagatagcaaaggaacgtgatcgatcggataaatcacagcaagcagcacaggtgcatgtgtatgtagtacgaactagtgcttgcacgcacgatggcaaattaagtagtcctgcatgaatctaaacgaaactttgagggctaacaaactgactgtaattagagaagatttatggcgacataactatagcaaaaccgattaaacaatatattgaagtttgctaaaatataggataaacgtattgaaattcattaaaagtgaggacaaatatattagagttcgttaaagtatattatagtgttttacggtatgcaagactgggaaaaaaggagacggagcaagttgcagtggtggtggagagcccctagcgcaaacagggcctatagttcccatcctctccaaattaatacagggagcctccacccccaccatttttgctatagaaaagatactactgcatgatgattgatgagtagtttcttttgaaaaaaaaatgattgaggagtagttgtaaaatgtagaagagtggtacttctggagggtggaaaaacatatatggaatatccttttatcggactgctccatgtttagatgtaagctgaacacatggacagcgtcaggcttgataatgtctttttcccccagaaaggaaggattaacactctaactaactcgtgatgaccttcggatatgatagagctttacagatatggagtatactcattcacgagccttgtcttaccccgtacatcacggattcacatcaagaccagaattctgcccaccactggcattattgtcctccaagatgaaggacagtggtaggcgcaagtgcacgactctacaagttctgcacagtaagagagcaacgacgacgatgacgggtcagtcagtcaagtcagagtaacatggtcactgaactgttctacatatcgtgcacgggagacccctctcctcgtcagtttcaaccaacggagtggtctctcttttgagatcctcgaacgaattctcaggtcttcgcgagagcgcgagcgtgatcagacgcgcctaagaacaaaaacctgccattcctgccgaacaaattgaaacgccgcacgtcgcatgctggccgtgatggtcactcactcatcacgcccagatggcgatcatggacatgagccctgcgccgagcagcaacgcgacgttcatggcgagctgcaggcgtccccttctctgcaccttggtcttcatgaagtcctcggcgaggatgtcgacgagcgccatgtagacgagtatccccgctgccgacgcctcgaggagcccctgcaccaccagcgccgttgggctgttcgcgtcgtagacggaggagatcccgatcccgacgacgatgccggccggcgtcgtcagggagaagaagagcgccatcgtcaccactgacctgacacggaactttgcctgcagaaacaagaaagaacaggttatattataagttattttaacttttttcttaatcaaacttatttaagtttacctaaatttatagaaagattaaggagtattaagaaaaccgcagtaagttttttgagtgaaaaattttcagatataactataatataattgaagtgaaattacatcgtaaccacactgcaactgcgctgtaactgtaatataacttatataaaacttatattctactatgttttggttagcatcaagttcttacgcgtgagatgggtgaaaatttctttctaccaattattttccttcatgcacaaatctcaatgcgatctgatggccacaaatctgaaagttttttgggggcaaaaaaaaacttgcggaagttttctagcaattccgaaaaattattaacatctacaatacgaaattaatttcattaaaattaacataaaatatattttgataatatatttgttttgggttaaaatgttgttatatttttctataaacttagtcaaattttaaaaagaaagttaaaacgattaataataatataaaatagaaggattacttttgattgagattaattagtggaggcccagccgcccagggaagtaggatgggatgcgatttgagtcgtgatttaacaactgggcccctcaaagtactaaggcccatctgtaaatctgcaaaatcggaacgtctttttctaactttttggtagtacaagacatcagttgtcctcttgtttgaaatcggtatcttcggacgagttagtaagcacgatggattgataggatatgaacaccaaaaacgttgaaatctttctctctctctctctctctcgaaaaaaaaaaaaaacaggttgaaattgacaattgtgagtgcggagtaaatgtgtgggtaaatcacctgaacgatgcatccgccgagcccgatgccctcgaagaactgatgaaacgtcagcgccggcacgagcggccgcaccgtgctcgggaagtcggaggcgcccagcgacatcccgatgatgagcgagtgcaccaccactcccagctccagcacctccaccatcaaggacgcacaagcaaaatcgattaagaaaataagaacagaaattttgattgaattttcttaatttggttgcgtttttttgttttcgcagctctgtttcttgaatggcgcggtggcgggagatgtagtatgacatacctgagagatgacgcggtggcggacgaggtcttcctcgccggcgggagcgacggacatgacggacatgccgtgggcgtggccgtggctgtgctcgtcggaggcctccaggtcgtcggctggctcgtcggcgacggccgcggccttcctcttggcgtccgtgcggtgaaagtaccccgtggcgacggtgtcgacgatgagcgtgccgatggcggagaccatggcgaccatgccggcgatcgggaagcgcttccacgggccgccgacgaggcacggcgagctgagcgcctcgaaggccgcgggaaggatgtgcaccaggcccgtggcgaggatgacgccgccggcgaaggccttgacggagagtaacacgtccgtctccggctggatcgccgggaacctgccgcccagggacggcagcgccgccccgacggtgctcccggcgaggatgcagaagatggcgatgaccttgagccgcagcgcctgcgccttgtcccgccccgccgtgtccgtcgcgcagtcgcactccgctgccgccgcgtgcgccggcaggtagcacgccgccaccagaaagagcaggacgaacaccttggtcatcgccgccgtcgccatcgccgatggctcacctgcagctaagcttagctcgcgcggcgagatgtcgcggcgtttcgcagcggaggttcaggttggcacatgcgcgagctaagctccgcttcgttcttctaggccttttgaacccgtggactctccatttcagtctccgatccgttgcatgtaaacaaacaaatttaaaaaagaagagaaataattgattgctggggcgttcgcgcgctcaactgagattaaattataactacttagttaattaattcttcgagcaacaataacagtttggctggccttgatgcgtttccaattttttgtgtggtttgcctttgccacaacaggtataagcatgaaaatgtgaaacatgcactaatccggttcttctatttcaatgaaattggtcaaaaaaaaagagaaagaa

SEQ ID NO: 6071 - DNA, 646 bp, Oryza sativa
cgacgacgatgccggccggcgtcgtcagggagaagaagagcgccatcgtcaccactgacttgacacggaactttgcctgcagaaacaagaaagaacaggttatattataagttattttaacttttttcttaatcaaacttatttaagtttacctaaatttatagaaagattaaggagtattaagaaaaccgcagtaagttttttgagtgaaaaattttcagatataactataatataattgaagtgaaattacatcgtaaccacactgcaactgcgctgtaactgtaatataacttatataaaacttatattctactatgttttggttagcatcaagttcttacgcgtgagatgggtgaaaatttctttctaccaattattttccttcatgcacaaatctcaatgcgatctgatggccacaaatctgaaagttttttgggggcaaaaaaaaacttgcggaagttttctagcaattccgaaaaattattaacatctacaatacgaaattaatttcattaaaattaacataaaatatattttgataatatatttgttttgggttaaaatgttgttatatttttctataaacttagtcaaattttaaaaagaaagttaaaacgattaataataatataaaatagaagga

SEQ ID NO: 6072 - DNA, 702 bp, Oryza sativa
tctggcttgtctgccctctctccactccgtggcagttggttccaggactagtggccgtcttccagggcctgcttacctgagcacctccgcgacagcttcgactccctagtgctcctggtctcttggtgtctatggaaggagcggaactctagggttttcgactccgctctctcttcggtcacagtggttttggagtccgtccatgtggagggccatctgtggtctttagctggcgtcgctgcttttggggatttgttgggagtttagcatggcttagccccttcccgctgcttggagtctgttttagccaccgtaatttctgtaagcttcaggttttttttcttcttttactttttcttccttcccttagcataagccagtctggctgattgcgtttgtttaactaaaactcttttccttctaatatactagcaaaaatgcccgtgtgttgcaacgggtgaaaaaaattctaatgataatatacgtttttcatgcataatcatgtcaatgacaatgtttgtattttaatgagcgacatgcttttttataaacgatgtttttttctcttgcgcgattttctcaaaccatttttcaaaaatggcgcatttctttctaacattttttttcctagcatgttctttttgctttttttttactgacgacgaaaaccatatttgggtaccgagctcgaattcgccctat

SEQ ID NO: 6073 - DNA, 6181 bp, Oryza sativa
tgcagagaaaaagatatgggagcactataaacaattagtaccataactgtctagttatcgataataggtctcataattaatggtgtgactatattgatggtatacataatgattaggaaggaattaagcaatatagggcatattcaatggtagaaacgggtatggtctcttaaacaatacaaaattatttagagaccatgtctttacaatagttgagacgacaaaggctctaatcattaactcaaaaaatattcctttgttaatattcttttcatatttttatcctcatgcaaccatatttccatattataatgactaagagtcgttgttaagccgttgtcatgcataacaacgatgttttatctctcctctttctctttcctccatgtcaacaagtattcctaattagcaacgctaagagatcactattgacaaccattgtacatgccgttagaccatttgtcgatcaacggatgacatccttctttcttctctttctcttcattcttcgtcgtacaataaatcctacgtgacatattctctcaatagtgacattattcacgcccttaaaagttgattatggattggattctgatgcgtatgggctttatatatgacctagtacgtagaatgatatggtttttataaatccccaatgaaatcttatatgcagatattttttagagcaatatatatacttacttcggtcctgggcacaactactaaggtgtgacaagaacaaggaactaatacatattgcatatcgaatcctagagtcaacggctatacatatttttaccaagctcgagtggagatttagaaacaaacttgaataaatgtatatctcctttagtgttggagtattagtctttgcatcattcctggattgtacctgctctctattgagcgaattgtgtaataagtggttgtagcttcactgaagtaaaggccagttcattatctaaaaaaaataaagacttatttggattgttaccaattttgtcctatcaatattttagtagaatcatttggtaagtgagtgtaaatccatcaggggttaaatcttggtgtacacaaatattatgcacatgtaggtgaactttcaacaagattttgatgagatcattaatgtgctgttggttttttaatcttagagcatgtgttagtggggcgtctaatatggtgtcaatttggtattgcgtatgaaatactccctccgtccaaaaaggacaaactctgagtttccgtgtccaacgtttgaccgtccgtcttatttgaaaaaaatatgaaaaaaattaaaaagacaagtcacgcataaagtattaatcatgtttatcatctaacaacaatgaaaatactaattataaaaaaatttcatataagacggacagtcaaacgttggacacggaaatctagggtttgtcttttttttttttggacggagggagtaatatatgtcagtatgtttctgcaatgtaatccaaaatagaatgaaaaaaaaggaaatatggcttgaaaagaacttaggtcccatcttttggctagctaaatgctcgtaacataccatacaacgtattaaagaaatcatatatgtcttcagcgatttaaatgtctttttttacgaacgcgcaaaagaattgcatgttaatctctatctcttctacttataaaaaaataaaaaataagagatgtttcctccatccgtcaaaacaaaaaaaagtagcgaaaaaaagtccgactcctaccgattccttctcaaaaagggaaaaaaaagtcctactctagatcggattcacccttaaaaacgaaaaataaaattgatgtgccggattgaagatctgtttgcaaaaatggaacctatcggttgagagcattccatttttatatgattttaatttttgatctgtacttttgcatttgagtccctgtaattttgtaatttttatatttacatttgagtccctataatcttgtgataagatacttgaggttgtttttgatttaaaaaataataaaagggaaagaacataggcagaaagctgcataaaaagaaaaagaaaaaccgcaaaaaaaaagaaaaagaaaaaataaacaacaacaaaactccgtttctcctaagtggcgaaaataaccgtagatccgatcctataaaaagcaaaaaaaagtgaaaaaaatactagatctgattcatttaaaaacggaaaaaaaaagtccgattcctataaaggcgaaaaaaattcgaaaaaacatataaaaagttcgtccagttctctaagaagaaaaaatggtttgtataaaataaaaaatacgcgtgaggaaaaaatagaaggggcgaaacaaattccgatttctaaccaatatatatctcttcgctacgtataatctaatctaactatttaaaaagagaaaatgcacgacaaaataaaaacggttcaaagaaacgtgtgagaaaaatcagaaaaaagcgcaaaaaaaacacgctaaaaaggttttccatcttccataaaaaataaaaaaacgtgcgagaaaaaaatatttccatcgtcagtaaaaaaattttaaaaaaacatgcgagggaaaaactatcagaaaaaacgcgccatttttaaaaaatggtttgaaaaaaccgtgtaaaaaaacatcgcctattaaaaaaacaaatcgatccgaaaaaactgtcagaaaaaagttaaattgatggacacttgagccggataggatccatcgattttttgtcatctactacacggcttttatttcgtcatatattctcctgtattggaaaaagaaaaaaagaacattcgaaaaaacaagcaaaaaaacacgcgagaaaataattgtcagaaaaaacatgcaaaaaacacactagaaaagaaaagcaaaaaaaggagaaaaatatggttttcgtcgtcagtaaaaaaaaagcaaaaagaacatgctaggaaaaaaaatgttagaaagaaatgcgccatttttgaaaaatggtttgagaaaatcgcgcaagagaaaaaaacatcgtttataaaaaagcatgtcgctcattaaaatacaaacattgtcattgacatgattatgcatgaaaaacgtatattatcattagaatttttttcacccgttgcaacacacgggcatttttgctagtatattagaaggaaaagagttttagttaaacaaacgcaatcagccagactggcttatgctaagggaaggaagaaaaagtaaaagaagaaaaaaaacctgaagcttacagaaattacggtggctaaaacagactccaagcagcgggaaggggctaagccatgctaaactcccaacaaatccccaaaagcagcgacgccagctaaagaccacagatggccctccacatggacggactccaaaaccactgtgaccgaagagagagcggagtcgaaaaccctagagttccgctccttccatagacaccaagagaccaggagcactagggagtcgaagctgtcgcggaggtgctcaggtaagcaggccctggaagacggccactagtcctggaaccaactgccacggagtggagagagggcagacaagccagaaggcgacaacacccggagccagacctgccgagcgaatacgtagtcgaggaggatgtggttcgccatctcaagatcttgagcgcaaaaggggcaagccgagtgactatcgataccacgcttctggagaagatcagccgtccagcagcgctgctggaaagcggaccaaagaacgaacctgcatttggtaggaccctttgcttgccagagaagatcagcacaggcaaaaaaaatgttggccatagaagaaagcctgttatgccgaacgcgcagagtagcgctggtcagccgtccagcggcaaacgagacgatcctcgtcaccggcgagagctgtacgtgaagcaccgcatcccagataagaagaaactaggagatgaccgggacagtgagggcaccgcggatatcagcgatttaaatgtcaatacttaaaaataaacttcaatagaaaaactttaaaattaagttttaaaatttaaattttgacaactactgattatgcatagacgaaacgttaggtgccttaattaagcgtgaggaaaatatagagatatctcgcccgtctttacctatcaaattgatgaatgcaacatttcacctttcccaaagacaaacgaaacgaagcaattaaaattcgaaacttcaactgaaagaaagaagccggccggctgccggcgcatctcgaaagcagccgtttttcaattccttttgaaaccaccgatgctctcttgcaatcgaccgaccaatcgctttgccatcgtcaaatcctccggaaagtcgatgtggtcgtcgccgtttagagcccaagcgtatacctgcaagcggcgacgaagaggtcgatttttttaaaaaaaaatattatttttttttggcttctacatccaactgggtatatgcagccattttaaattaggaacttagcccatcaaacaacccaatttgaactcgagattttgcgctactactcagatcactacaaccactaaggccccctttgattcaaaagaaatttataggaattttagaggattttatttctatagtaatttttcctatatagccctttgaatcaaaggaatggatcttatggaatcctatgaaattcctatggaatgcctaatgccatgcaagttttggaggaattctaacatgaggtaaaacctcatggaaactttcctttgagtctttatctctctctaattcatgtgtttttcctgcggtccaatcaaacgctcattcctatcaaaattctacgttttttttattcctacgttttttcattcctacgattcaaaggggccctaaactgcatctccttttacgaggaagagatagatagaatgaagcagttggagagggaaaaaaagaaagaaccccagaaaaggattagcacgccggcgaagcttctctccccctgtgcaaagcaagcaaagcacggcgcgcccaacttgcatggcaacttgcatgtgcgatgccgcaagctcatctaacttagcaaaaaaacaagaggagaaggagaggataataacaaagcatggaggccaaataaatcaaatccggcgaacggccgagttgttctttaatttttgttcctccttttcttttcttttcgcgaacacgacggtcgagttgctctagatagctagctgatcgatctttcctgtgtagcaagcttgaccgcgggaacgagcaaagagagatggcgggaaaaatgccagttgaacaacttggccaagtgcccaaatatataaactcctatgctactactctttttcctctccatatgtcgcaagctttcagtttgttaatgccaagtggtccttataaaacaagaaggggcaaaaaaaaaactgaagtaaatgttcataaccatactgccagttgcagatttttaacatcacggtacagggctagctagcatgacgtcgtacaatttggtcaggcatgtgtaccattttctttggcaacgggtacaaaagggctcgatctgtgagctgtgaatatcttaatttcgccggatcagccagcattgatacattgaaacaccagtagttgagcatgtcatcactactactgtaaccagctactccgtccctaaatatttgacgtcgttaatttttttaaatatatttgaccattcgtcatattcaaaaactttgtgaatattattcaaaaacttgagtagtagtaatatattttaacaatgaattaaatgatagaaaaataattaataattacttaaattttttttataaaacgaacggtcaaatacattttaaaaaatcaatggcgtcaaatatttagagacggagtgagtaattactaagctatacccaagaatcacaatgtacgcggcttggctggctccatgtttgtattgcctgccgccatgactggcatcagagcaagctccaagctttcgctgcgatattagcttgcatgcactcgcgtcaggtggcacagaccacctcgacctgtcgagcagaaagaatcctaagcgaacgcatacatacaccgatacccgcacggtctcctagctgatcgctgtcaagctagttcttttgcccagttgatggatcattgatgatggatggatgaagcatcgttccactttactt

SEQ ID NO: 6074 - DNA, 2021 bp, Oryza sativa
aacacctttgtccctcttttcatgttacagccacgaaggtagccatacaatgttattttcctgtcacactttctgttcaagcgcacactttctggaggagttacatcttcaaatctatcgactagcagataaggatgtgccatcctccaactcagtgggataggcttgataacagagatgaaccttgcaagattatggacttctcttttcgtgtacctgcatgagacaaaaaatgaaacttctacactaaatgaccaaatagtagaaatgaaaagaacataaaaacaagcattctcacttataactgcagcatgaagaaagataatgtatagtaactccctgctaatatggtgagcttaaatcagcatagatttgtttactgataagtatcgattgatagttcagctataaccactcctccgtccatgatataagggattctaggttattttggagagattttaaggatgaagggaaaagactgtgatgctctttattaaatgagaggtggttggaagtaagattgggtgaaaattacatgagggatggttgaatgggcaagtagtactctacaatccattatatttgtgtacaaaacttgaacctcaaaatcccttatatttgtggacagagggagaacaaacaaagagtctgaaggaagaaataccagctttatgccaacttactttccatgaatgagaccagacaagtagaaaagttttgctccctcctttatctcagcccaaaatcgatgcttcaggcgctgcttggttttcctaagcttttttacatctttaaacttatcaagatgtgtaaggactcccatcaccttggggaatccgtgcacttgcataatatttaggaactcaaatgtatcctggaaacaagcagttatttaggtgccagtagtacaataaagcataaatggaattaatcacgcggatagaaagcagtgaatagatcagcataataaatacagtatgtcagctccatcactagtaggagtggtaggcagtaatggacagcactttaattgctagtaatggaactttagttaaatgtataagatgaaacttttatcggggatgtgctcctaagggcgaaaaaacatatttcagactacatcctaagctagaaatatttgtgaaaatataggcttcaacagcacaccatttcaaatccatagcttccatcaataagcagcagagcaagatcagctattttagcagcatcaatcattccgttgatatcatttggacactccaagaactgtacgcgcctgcttttacctgcacatgatgaaaaaattgcatacattagtttcatatcttcacaataattcaattgttcagaagaacaatatagattgtcctcaagtacaaggttcagagggttcattaacctgacacaacagtgattggaccacggacttcagacaaattttgtttcgtgtagtgctttactagacattttatcagcagcgacttcccaacctgataaataatgtaatgatcagaaaacaatccacatacatcatcttctccaggtggcagagcatacctgaggaggcccttgaactacaacaacaaaaggtggtggttcaccaattgagcgatccataattggcacatgaagacgacgttgttcaatctcagccgatcgtgcttgtagacgcttggcctttgcagctgactgaaaggcaaaagcctgggacaaggaatggtaacctattaaaataaatactccaaaactagagaaggaaaaggttaaacagatagacaaaccattcttgagttgttgagttcgtttgcacagtgtaaagaaccatttagttacagagatctaaccgtgtcctttttaaggaggatatttaccatttttctttaaaaagcatggatcatagccagtgaccacatgacctccaaccaaactcataaaattccatatatagacggcagaaaatatcaccaaagcataaataaataaatgcatctattgcaatagcttgctaataatacgag

SEQ ID NO: 6075 - DNA, 1551 bp, Oryza sativa
cctttcgccaaccgcccactcgtcctttcgcttctcgaaccctaatattctcgccacctcacactgtctcgtgctccacgctctccatcacctcttcgccggttgccatggcccaagacaccggcgacgcagtgctcccttcctcttgcatcacggcagacaggcaccttagccttccttgcaagatcatgccgggcggtgccgtcgtgcgggcgggagagtcgaggccgtggccgcgatatccggagcgatccgtgcacctcttgtccttcgccatggtaggcttgatcccgctgttctccagattcttccatgaagttctggatttctacgaaattcacgccttgcatctcgcacctaatgccgtgatgacgctggccatcttcgcggatttgtgcgagatgttcattggggtgcgaccgacgatttggtggttccaggccttctttatcccgcagctgctgcaaggcgtagaggtggggggatgctacttccagccccgaccgggcacagcgggccagtacatcgagagccacctccacaagaaatgggaggactagaagaaagactggttctacaccgcgttgccggaccatccgcgacttcgagttcccgctggccctcccgaaaggtctgccgcatggttggcgacgtcggagttgggcgaggaatacgacgcggtgtgggatcgcctcaggggcctgcggagcctaggcctcacgggggcgatggtctttggcgattacttccgccgccgcatcgcacccctccaggaatgatcccgtggagcgtgggaatacactggtcccaacgaccccatgcggacgcatgtgggcgagcgctgggactggggtgaggaggacacgaagagggtgattcggcgggtgctgggcctagactccaccgagccaacactaatccctgatgggattcttcccctctgctgcgaccgctggtgagagctcactagtgaactgggtaccgttgtctgtaatgatacggttgggcactccgaatcgagacgtgatgcccctgatgaacttaagagcagaatgcttgtcgattttgacgactgggtaggcctcgggccacttggtgaatttatcaatggcgacgtacaagtgctgatacccgccttgagccgccttgaacggtctaaggatgtctagcccccagactgcgaaaggccaagatagtggaatgacctgtaagatttgggccggctggtgggtctgcttggcgtggaactggcatgccttgcaccgctggacccattcttgggcatcttgtaatgcagtcggccaataaaaaccttgccggaaggcttttccgaccaaagttcgtgaggccgaatgggctccgcactcaccctgatgggcgtcggctatgagctcgatgccctgctctcgagaaatgcacttcaagagtatcccattcgcggcacgccggtagagggccccctctacgaggacgtaccgcttggagatgcgcgcgagcttttcagcttccacgcgtttctcagtagggtaccgagctcgaattcgccctata

SEQ ID NO: 6076 - DNA, 2178 bp, Oryza sativa
cactttcacaccggagaagggccacccaaacgccttcgccttcgtcaacggcatcgaggttttctcctcccccgacctctttggcagctccaacccgatggaggtcaccggcgacggcagcggcacgcctttcccgatcgacgccggtactgctatgcagaccatgtaccggctcaacgtcggcggcaacgcgatctccccctccaaggacacgggcgggtatcggtcatgggaagatgacacgccatacataccctttgcgtcattcggggtgagctacgcgaatgacaccaatgttcccataaattaccctgacagtattccgcagtatgtggcgccggcagatgtctactctacggcgcggtcgatggggcctgacaacaatgtgaatttgcaatacaatctcacctgggcaatgcaggtggatgctggttatcagtatctcgtgaggctccatttctgtgaaatacagtctgggatcagtaagatcaatcaacggacatttgacatctacatcaacaaccagactgcttttagtggcgctgatgtgattgcgtggtctactgggcttggcattccagtgtacaaggattttgtggtgttccccatgggttcagggcctatggatttgtgggtggatctacatccaaatgtcaaaaacaagccacagtactataatgctatcctcaatgggatggaggtttttaagttgcagcttactaatgggagccttgctgggctcaaccctgtccctagtattgtaccaacagcgtcgggtggaaattctgggaagaagtcaagtgttggtccaattattggaggagtgattggaggtctggtagttcttgcacttggatgttgctgcttctttgtgatctgcaagcgtcggcagagagcaggtaaggattcaggaatgagtgatgggcattctggttggttgccgctctcactttatggcaactcacacacttccagctcagccaagtcacacactactgggagccatgcttcgtctttgccatccaacctgtgccgccatttctcatttgtggagatcaaggctgcgacaaacaactttgatgagtccctcctccttggcgtgggtggttttggtaaagtttaccgtggagagattgacggaggagcaaccaaggtggctatcaagcgtggaaacccattgtctgagcagggtgtgcatgagttccaaacagagatcgagatgttgtcgaagctccgccaccgacatcttgtgtcgcttattggttactgcgaggagaagaatgagatgatcctggtctatgactatatggctcacggaactcttcgtgagcacctgtacaagacccaaaatgcaccactttcttggaggcagcgcttggatatctgcattggtgcagctcgtgggcttcactacctacacactggtgcaaagcacaccatcatccaccgtgatgtgaagacgacaaacatcctcctcgatgagaagtgggtagccaaggtttcagattttggtttgtccaagactggtccaacaatggatcatacgcatgtgagcacagttgtcaagggcagttttggttatcttgatcctgagtacttccgcaggcagcagcttactgacaaatctgatgtctattcttttggtgttgtactgtttgaggtcctatgtgctcggcctgccttgaatcccactcttgcaaaggaagaagttagcttggctgagtgggcattacactgccagaagaagggtattcttgatcagattgttgatccccacctgaagggaaagattgctccacaatgtttcaagaagtttgcagaaacagctgagaagtgtgtttctgatcagggcattgaccgtccttcgatgggagatgtgctgtggaacttggaatttgcccttcaaatgcaggaaagtgcagaggagagcggaagccttggatgtgggatgtcagacgacagcactccccttgtgatagttggaaagaaggatcccaatgatccatctatcgagtcaagcaccacgacaacgacaactacctcgataagcatgggtgagcagagtgttgcaagtattgactcggatgggctgacgcctagtgctgtcttctcgcagatcatgaaccccaagggacggtgaggtaacaatgtctcggcttgttaccctgcaggcataat

SEQ ID NO: 6077 - DNA, 10221 bp, Oryza sativa
acacaaatataatggattgtagagtactacttgcccattcaaccatccctcatgtaattttcacccaatcttacttccaaccacctctcatttaataaagagcatcacagtcttttcccttcatccttaaaatctctccaaaataacctagaatcccttatatcatggacggaggagtggttatagctgaactatcaatcgatacttatcagtaaacaaatctatgctgatttaagctcaccatattagcagggagttactatacattatctttcttcatgctgcagttataagtgagaatgcttgtttttatgttcttttcatttctactatttggtcatttagtgtagaagtttcattttttgtctcatgcaggtacacgaaaagagaagtccataatcttgcaaggttcatctctgttatcaagcctatcccactgagttggaggatggcacatccttatctgctagtcgatagatttgaagatgtaactcctccagaaagtgtgcgcttgaacagaaagtgtgacaggaaaataacattgtatggctaccttcgtggctgtaacatgaaaagagggacaaaggtgttcttcatcatctctggaacttaatgttaaactaacccagattctactttgtagcagatagatgttatttaacttgttactttacttaatgttagtacatgattttgggtccctagttgatcttatttgaacagccttagtaaatatgacaaaattgagggtgaagataatgacatcttattttacaggaagcatgaatttactgccaatgaacctgatgaatcttcaaaaattttttaattttgaaaaattagctaacagaatgtgtggcactatctacattaattatgcttcagtctggttggcaaaactgaagctaattacttttcctttctgtgaggagaaattctaagttctttcatgtctgactatagtgccctaaacttttggatagtaaaacacacaattatctgtgcaggtacatatcacaggggcaggtgattttagcttgtctggggtaacaagtttggcagatccttgcccattgccatcagctgcaaagaagagaggactacgtgacaaggaaaagctgttctacgcgccaatgtctggccttggtgatctactgtatgacacagatgcagtttatataaacatcaatcctcatcttgttcagttctcaaagactggtgagaatgatgcatctaaaaagcaaggtatgtttaaagtataaaccattcataatgatactaggcacctcattccttcatcctctttgcatttgaagtttcttgaagtatgttgtttaggacgataaggtcctgaggactgtgcaatgcacaaacatactttaatagacaagacccatcaagttgaaaactcactttacttatgttttcttgtctatttatttctttggtagagtggtgtgcaacctgaaagaatgttttggcgttgaaagtttttcagtgttttctgagcttggattgcaaagcaaggcacacactgttactgttacacctgttccttgtgcctggaagagattttagcaaataaaagaaaatctaagagttagatctttaacagattatttgtctatttacctttatagtatctgtccggtttcatatattcacatttatcatgcaattttagcttgccatcaaaacacaagtaggaatatgtatcagatctatcatagaagaacttcctacaatagatgcacgcttgtgcttgaatggaagtaattttagttttgttggctagaatcctgctctagctttttttttgtcttctttatgtatggccatcctttgttgtttgctagattactgacttatcatcatacagggaaaggacaggatgttggtgtaaccctagtaaaaacacttcagaaccccagatattcccttaatgaaaagttggatcagagttttataaatttatttggtagaaagcctgctgctcagtccgaagacatctctggcaaccagaatgatcagggagatgctaatattttggaagaagcagatggtaataacatatgcaacgcaaacacattggagagcaatgatcattcttattctgagtgctccagcgatagtgaacatgataatgatgaagcaactcagcaaaatgaccatgaagttggcttgagagaagaggtggaattttgcaatggaaggatgaggagaaaagctgtatcagctaattttaaagatgatgacgatgatgaggtttttaccattttcctttgttcttattaattaatagttctcttgctctcacattcttttttttttcttgctctcttactcttaagttccctgtttagttttgttttgcccgatgtaatccatccaggaaacacatggctttgcatcactactccagaccaagaaatttgacataaaacactatgcagctgaataacattatgttagcacagctattggccattcctaagtcaccagttgtagttcatgtctcaacatcatttgaagtgtagaacaatgatattttttgaatacttatcatacataaatattaatgttaaatatttacgttaatatttaacactaaatatttacttacaatatctagtttgttttagcaccgtattaacataaatatttgcaatgtgtactttgatttctagtacaactcactaatattacttacagatacatatttggaatagttagaagaacacgttttattgtaacccttgacttctagcacagcttctattcgcctggtatacttccaaattacctcattgcgatgaaccatgaaccatgatgtggtactttgcttttaattcttttacatgtctacagattttcaatttcaagcttttaaaggtatttcaaccttggtctaccttgtagggtgcggaagaagatgacgttgacagtgaaaattctggtgatgaccagttatctgaaggttccgcagatgacagtgaagaatcacttgattcaggtactactttgcacacacgcacgcacttactcacttggtgtaacatcttttcgttgatggggagcaaatagagtcttgctactgttaatttagcatatacatgggatcccataggcaccacctatatctgtacccatcacctgtgatccactcgacctgcacataaaatcatgttgctattttatttgctgaagtagttagctctgcaactgaagagcatttgtgtttttcaaatctaaaactcttttcttttggtattctagatgatgaaactgagaacaattcaaagtggaaagagtccttgcttgctagaacactgtccagacggagtgccaatctaatgcaacttgtatatggccaagcttcaaagaagctggatgaaggaaatgacagtagtgcagaagagagttcagatgaagaattttttgtaccaaaaggacaaaagaaggtaatgatgtgctaatacagaattgaaggagaagttatcctgcactttgactgcaatacacactactcatggcatttatagttaagatacatacaggacaggatatgattttacccttcctttgctgtataggctaacattgtatattcccttatctatggtcaaaggaactgaaattagctaggtgcattgttaggtttcagatcatctttgttctttcttgtactacctccatttcaggttataagactttctagcgttgcccacattcacatagatgttaatgaatctaggcacatatatatgtctagattcattaacatatatatgaatgtgggcaatgctagaaagtcttataatatgaaacgaaggaagtaataatctgccttttaacttttttttacaaaggtgggtagactgcttggtagttaataagaccacagagccctcctagttttttttatctgaaataataaaggactgctttctatccttacagcaagcaaagaatgaatcaacaagctttgatgatatggatgctgaggattactccaagttttttaaaactgagctaagagattggtctgacgaagatctcatcaagagcattcgtgaccgtttcgtgactggaaattggtcaaaagcagctctaagaggacaggaaataaatgaaaacgatgtggatgacgaagaagtcgatggagattttgaagatctggagactggtgaggtgcatacaagcaaggcatatgaaaatacttcaggaaatggaggtactcacaagcaagatgaccttgctatggaagaaagaagactcaagaagctcgcacttaaggcaaaatttgatgcagaatatcctttcttacatttttgaatgttttttttcttttgtttgttgtcaaataatttgctatcatttaaaaggggaattgcttttatggtccactctgcactgcatgtttaattcttcttttgctgccccttagacttggttttttttgtctccgtggcctgttttcttttccaggttatctagtctaagttctcatttgcttttttgagcgtacttcactgcgtgcacttactttctgattccttaacttaaacctacatatgatggatctgatctctccggtgaggaagttgataatgacacaaagaaatcgaaacgagaagaaactaatggagggggctatttcgataaggtatgtcatagaatcttttgcttttgttttgttggaactcttgtattacctggttattgaaccatcacattttgtaccttttcagttaaaggaggaaattgaaattcgcaagcaaatgaatatttccgaactcaatgatttagatgaagataccagggtagaaattgaagggtttaggactggttcttacatcagattagaggtacatggtgtgccgtttgagctagttgaatattttgatccttgccatcccattctcgttggaggcattggccttggtgaggagaatactggatatatgcaggtcagctattttaattttcctctcctatttgctgtatgaaaaagttcagtgttcagtaattgtaggaaataatggatgcagcagtgcaacatacatgcatcgccattcagtgttagatcagacaatttttgcttgatagtttaagtggttatgacattctgggattttaaaatgatgcatcatataggagtacatccttacttctagctgtcaatatgtaatttaactatgaaataatgttcttgggcactccctccggttccatattaattgacgttttggacaaggttaaggtcaaacttttttaactttgaccatcaaactttaaaaatatttagtttaaaagaactagaacgacatatatagatttttcttttaaagcactataataaaagtaaacatgcatttatttattatatatattatagtagaaaaataaggtcaaagatatatcttgtagaccgtgtcattgtccgaaacgtcaattaaaatgaaaccggagggagtaccttgttgcttctaagctagatattcccatgtgaattggaaggaaaatttaaaaaacaatctctagaccacttatttggtggacccagaataaaacagtttatgtgtaacatattgataaaatataccaagtataacagtgtttctttgaacgttatgataattcaagtggatattatgttgccagtggattgcatttaccttttttcacacttcatacaggctagcctgaaacgacacaggtggcacaggaaagtactgaagacaaaagacccaattattgtctctattggttggaggcgtttccaaacaactcctgtatatgcaatagaggatcgaaatggtcggcaccgcatgctcaaatatacacctgagcatatgcattgctttgctatgttttggggaccgcttgctccaccaaaaagtggtgtactggcagtccagcatctctccaacagtcaggtgggttcaataatttatattcatttgtccatatattttcagtgctgctgcttctgagcaaacatcataattgatggcgctgtcagactagcatcttttaggacttgcttagattcatctagatgcagaacctccctagaatggatattaaccttattcttccatttaccttgtagcattcacatttactctattaaagtgtttgcgctgacattctctttcccaatccttgcacatcaggtaccatttagaattactgcaacaggctttgttcaagaattcaacaatactgcccgaatcatgaagaaaatcaagctcacaggtgtaccgtgcaagatatttaagaaaactgccctagtcaaaggcatgttcacatctgacttagaggttgctaggtttgagggtgcaactattcggacagtaagtggaatccgagggcaagttaaaaaggtaatacatgagatcctatgctctttttctttaacaatgcatgccaacaatgaatcaatgcttgtacatcaacaataagtcccaaccatatgaaattaagtattatttctcaggttcacttctttggccttctattgaggccttgtttagttcccaaaaaattttgcccaaaaacatcacatcgaatctttggacacatacatggagcattaaatatagataaaaaaactaattgcacagtttgcatggaaatcgcgagacaaatcttttgagcctaattagtccatgattagccataagtgctacagtaatccatatgtgctaatgacggattaattaggcttaataaattcgtctcgcagtttctaggcgaattatgaaattagttttttcattcgtgtccgaaagcccctttcgacatccggtcaaacgtccgatgtgatacccaaaaattttctttccgcgaactaaacacaccttgagtacaatatgtacggtataattctgaaaataagtaacaaaaggactccatgagagctatgagttgataattgatttgaatctgtaaacagattattgataataataaaatatacagttgccattttgccatgaaagcacccccccctctttgcagtatatgcatgttagcagaatggattttatttagtcaatgtgtgctcaagtaattattttgggtgttaggtcaaggaaaacgaaagctcgatatggatcataaactctgaagcgtatgtatcgataaatttgggtaattcaagtgtgcgcattaaaacaaatcttccttttattacaggcagcaaagattgaaccaggagatatgccaaggagaaaaggggaaagtatagacgggattgcaaggtgcacatttgaagacagaattcttatgagtgacattgtcttcatgcgtgcatgggtcaatgttgaagttcccacctactgtaaccttgtgacaactgctcttcaaccccaagatgagacttggcaaggcatgagaactactgctgagctgcggagggcacataatattcctataccgcacaacacagattcagtttataaggttctctgagcgtcgaaatcttttgtgtttatttttcttaatatcatgctcatatcatgttatctccaaatggcagcccattgagcggaaagtgcggaagtttaatcctatagagatccctgcaaaactgcagcatctacttccttttaaatctaaaccgaaggatacgcccaagcatagaaaaacaccagtggagaacagggtccctgtccttatgcagcccagtgagaagaagacacatgcagccattcaacagttaaggctgctaaaacatgagaaggtattggtcatgctacagcagcttgttctgatgtcaatcgctgatataatgtgtgctcattatttgcccgatttttccaggcaaggaagaagaaattgcaggatgagaagaagaagaaagcatatgaggcggagaaagcaaagtctgaacttctaacgaagaagcggcagagagaggagaggcgtgtgaggtaccgagaggaagataagcaaaagaagcgagcccgcagataactgaaaatagtaagagacctgcaggcataatgagtcccagaaatctcctgaggcacatcatccagagcatatggttgcttcaaactagctcaagttgccgcctccagaaaaaagaggctcggattgacagcagacgaggtctgatgcctcggcatatcaagctggagatgcagaacaacttggtataatctgggccggattcaactagtagcgtcttttttatgtagctaaccagttttgctccaccatgctgctacgaaaattttgtcatccatgtaactgatgatttgtagctcccaggtgaagtgggagtgaatatgttaaattatcaatcttaggacataacagttgcccattttcaggcctattataattctagagctaggggacactgagttgtcagcattggatttattggtactactgtatgacaaggacgtgattttgataaatttggttcccgttctgctcgcaactacatcctgtacagtttggcaacactacaaaagcagagaagaatttcttctgtgtagctaacagtaatggatcggagggtactggtagagatcatgtgtagttgtgctcctaatcctatcgctcatctgtcattttcgtccctttgggctaggagttccacggatgtcaaaagcgacccaactcggatacgagagacgggaaggtagtgacggtgcgtgtcacgcttcctaacgttcccaatgcatgttagtcggacccacgcggcggccactaccttcccctccgcgtcgatcggccgctttggacggccctgattacgcccatcccggaacattttagcggagctggtggagcccatctcctcgctggttggctagattcggctggctcacagctttgcattcggcagctaacgccacgcccactgactcgtgggcccgggatattggccccacctgtcacagactatcgcgcttgacaccactgtccacgcaataataaacggaactgtccacgttaccagcccgcattgaataacgctttgtcctaggtacgccgtgcgcggctgggcaacactcactgacacgaggcccccacccccaatagccctcaatagccctcgcacatgtacgcgaccgcgccgccgaggaaaagctttacaaaaattccaagctggaggaaaacccgcagccgagcgcacaccactgctagttgcacacaccgcgcggtgcgagctgtcgtccacagtccacacccaccaccgtcaccgcggtagcaaaccccccgagccactgctcacgtgggcccgtggcgtccccagacccaccggccagtgggcacgcggtagcgagacggctccagcacgacgcggtaagcgagcgagcacgagcagtagggcggagtaggtcgccgttgccgttgctggtggcctctcccacttaatgccgcggccgtaatcccgaagcctcacatcacacccccccccccccctttcctcacgcgagctccccctccaccaccgccgccgccgccgcggctgccactctcggttcctcttcctccccaccgagctccaccccccacgaatcttagcctcccactcctcttcacgccgcgccgctaagagcgatcgagccgggggtttccgtcagagacgccgcgaaaatcgccccagatcggtggatgggcgatctgtgagccgcggcagggggagagagagagagagagaggaagctgaagccatgatggtgagttctaggtttgtggccgtgcttcttctggtggcgctggcgccggcggcgcgggggcagggaggaggagggggcaactcgagcgccccggcggcgtcgccgccggggccgttcgtgccgcgggacaacatcctgctcgactgcggcgcgacggggcaggccaacgacacggacgggcggctctggaccgggaacacgggctccaagtacctgccggcgaacctcgccgccgcggccgccaccgcgcaggacccttctgtgccgcaggtgccgtacctcaccgcgcgcttctccgcggcgcccttcacctactcgttcccggtcggcgccgggcgcaagttcctcaggctccacttctacccggcgaactactccaaccgcaacgccgccgacgcgcttttctccgtctccatccccgaccccaacatcacgcttctctccaacttcagcgcctaccagaccgccttcgccttcaacttcgactacctcgtccgcgaattctccgtcaatg
